(19) United States
(12) Patent Application Publication
(10) Pub. No.: US 2023/0081756 A1
(43) Pub. Date: Mar. 16, 2023

(54) COMPOSITIONS COMPRISING BACTERIAL SPECIES AND METHODS RELATED THERETO

(71) Applicant: XBIOME INC., New York, NY (US)

(72) Inventors: Jackie PAPKOFF, South San Francisco, CA (US); Jun MA, South San Francisco, CA (US); Jason HUDAK, South San Francisco, CA (US); Linh NGUYEN, South San Francisco, CA (US)

(21) Appl. No.: 17/790,378

(22) PCT Filed: Dec. 31, 2020
(86) PCT No.: PCT/US20/67685

§ 371 Date: Jul. 1, 2022

Related U.S. Application Data
(60) Provisional application No. 62/955,951, filed on Dec. 31, 2019.
(60) Provisional application No. 62/959,558, filed on Jan. 10, 2020.
(60) Provisional application No. 62/975,827, filed on Feb. 13, 2020.
(60) Provisional application No. 63/035,128, filed on Jun. 5, 2020.

(51) Int. Cl. A61K 35/74; C12N 1/20; A61K 47/26; A61K 35/747; A61K 39/395; A61P 35/00; A23L 33/135; A23L 33/21

(52) U.S. Cl. CPC A61K 35/74; C12N 1/205; A61K 47/26; A61K 35/747; A61K 39/3955; A61P 35/00; A23L 33/135; A23L 33/21; C12R 2001/01

(57) ABSTRACT

The disclosure relates generally to bacterial strains of the genus Butyricimonas, e.g., Butyricimonas faecihominis bacterial strains, and compositions, e.g., pharmaceutical compositions, comprising such strains. The disclosure further relates to methods of using such strains and compositions for preventing or treating a disorder, e.g., a cancer, when administered to a subject in need thereof.

### CROSS REFERENCE TO RELATED APPLICATIONS

[0001] This application claims the benefit of, and priority to, U.S. provisional patent application Ser. No. 62/955,951, filed Dec. 31, 2019, U.S. provisional patent application Ser. No. 62/959,558, filed Jan. 10, 2020, U.S. provisional patent application Ser. No. 62/975,827, filed Feb. 13, 2020, and U.S. provisional patent application Ser. No. 63/035,128, filed Jun. 5, 2020, each of which are hereby incorporated by reference herein in their entirety.

### SEQUENCE LISTING

[0002] The instant application contains a Sequence Listing which has been filed electronically in ASCII format and is hereby incorporated by reference in its entirety. Said ASCII copy, created on Dec. 30, 2020, is named ASP-061WO_SL.txt and is 6,415,350 bytes in size.

### BACKGROUND

[0003] The gastrointestinal tract (GI), as well as other organ systems, is a complex biological system that includes a community of many different organisms, including diverse strains of bacteria. Hundreds of different species may form a commensal community in the gastrointestinal tract and other organs in a healthy person. Moreover, microorganisms present in the gut not only play a crucial role in digestive health, but also influence the immune system. A disturbance or imbalance in a biological system, e.g., the gastrointestinal tract, may include changes in the types and numbers of bacteria in the gut which may lead to the development of, or may be an indicator of, an unhealthy state and/or disease.

### SUMMARY

[0004] The disclosure relates generally to bacterial strains, bacterial strain mixtures, and compositions comprising bacterial strains of the genus Butyricimonas. In some embodiments, the disclosed bacterial strains, bacterial strain mixtures or compositions are useful for preventing and/or treating cancer.

[0005] In one aspect, provided herein is a composition, for example, a pharmaceutical composition, comprising a bacterial strain of the genus Butyricimonas. In some embodiments, the composition further comprises an excipient, diluent and/or carrier. In some embodiments, the bacterial strain in the composition is lyophilized, freeze dried or spray dried.

[0006] In some embodiments, the composition or the bacterial strain in the composition is capable of increasing production of at least one pro-inflammatory gene product, e.g., interferon gamma (IFN-γ), interleukin 1 beta (IL-113), interleukin 6 (IL-6), interleukin 12 (IL-12, e.g., IL-12p40, IL-12p70), interleukin 23 (IL-23), interleukin 27 (IL-27), tumor necrosis factor (TNF), and/or TNF-related apoptosis inducing ligand (TRAIL), in a human cell, e.g., a macrophage (e.g., a THP-1 macrophage), a monocyte, a peripheral blood mononuclear cell (PBMC), or a monocyte-derived dendritic cell. For example, in some embodiments, the composition increases production of at least one pro-inflammatory gene product, e.g., IFN-γ, IL-1β, IL-6, IL-12p40, IL-12p70, IL-23, IL-27, TNF, and/or TRAIL, in a human cell, e.g., a macrophage (e.g., a THP-1 macrophage), a monocyte, a PBMC, or a monocyte-derived dendritic cell, when the human cell is contacted with the composition. In some embodiments, the composition or the bacterial strain in the composition is capable of increasing infiltration of T cells into a tumor.

[0007] In some embodiments, the composition comprises a bacterial strain of Butyricimonas that comprises a 16s rRNA gene sequence with at least about 98% sequence identity to the polynucleotide sequence of SEQ ID NO: 846. In some embodiments, the Butyricimonas bacterial strain comprises a 16s rRNA gene sequence with at least about 98.5%, 99% or 99.5% sequence identity to the polynucleotide sequence of SEQ ID NO: 846. In some embodiments, the Butyricimonas bacterial strain comprises a 16s rRNA gene sequence of SEQ ID NO: 846. In some embodiments, the Butyricimonas bacterial strain shares at least 70% DNA-DNA hybridization with strain Butyricimonas faecihominis P40-F2a, having the deposit accession number DSM 33411. In some embodiments, the Butyricimonas bacterial strain comprises a nucleotide sequence having at least about 70% identity to any one of SEQ ID NOs: 1-845. In some embodiments, the Butyricimonas bacterial strain comprises a genome having at least 95% average nucleotide identity (ANI) with the genome of Butyricimonas faecihominis strain P40-F2a, having the deposit accession number DSM 33411. In some embodiments, the Butyricimonas bacterial strain comprises a genome having at least 96.5% average nucleotide identity (ANI) and at least 60% alignment fraction (AF) with the genome of Butyricimonas faecihominis strain P40-F2a, having the deposit accession number DSM 33411. In some embodiments, the Butyricimonas bacterial strain is Butyricimonas faecihominis P40-F2a, having the deposit accession number DSM 33411.

[0008] In some embodiments, the Butyricimonas bacterial strain of the composition is viable. In some embodiments, the bacterial strain is capable of at least partially colonizing an intestine of a human subject. In some embodiments, the composition is suitable for oral delivery to a subject. In some embodiments, the composition is formulated as an enteric formulation. In some embodiments, the enteric formulation is formulated as a capsule, tablet, caplet, pill, troche, lozenge, powder, or granule. In some embodiments, the composition is formulated as a suppository, suspension, emulsion, or gel. In some embodiments, the composition comprises at least 1×10³ CFU of the bacterial strain.

[0009] In some embodiments, the composition comprises a therapeutically effective amount of the bacterial strain sufficient to prevent or treat a disorder when administered to a subject in need thereof. In some embodiments, the disorder is a cancer. Examples of cancers include solid tumors, soft tissue tumors, hematopoietic tumors and metastatic lesions. Examples of hematopoietic tumors include, leukemia, acute leukemia, acute lymphoblastic leukemia (ALL), B-cell, T-cell or FAB ALL, acute myeloid leukemia (AML), chronic myelocytic leukemia (CML), chronic lymphocytic leukemia (CLL), e.g., transformed CLL, diffuse large B-cell lymphomas (DLBCL), follicular lymphoma, hairy cell leukemia, myelodyplastic syndrome (MDS), a lymphoma, Hodgkin's disease, a malignant lymphoma, non-Hodgkin's lymphoma, Burkitt's lymphoma, multiple myeloma, or Richter's Syndrome (Richter's Transformation). Examples of solid tumors include malignancies, e.g., sarcomas, adenocarcinomas, and carcinomas, of the various organ systems, such as those affecting head and neck (including pharynx), thyroid, lung (small cell or non-small cell lung carcinoma (NSCLC)), breast, lymphoid, gastrointestinal (e.g., oral, esophageal, stomach, liver, pancreas, small intestine, colon and rectum, anal canal), genitals and genitourinary tract (e.g., renal, urothelial, bladder, ovarian, uterine, cervical, endometrial, prostate, testicular), CNS (e.g., neural or glial cells, e.g., neuroblastoma or glioma), or skin (e.g., melanoma). In certain embodiments, the cancer is colorectal cancer (CRC).

[0010] In some embodiments, the composition comprises an excipient selected from the group consisting of a filler, a binder, a disintegrant, and any combination(s) thereof. In some embodiments, the excipient is selected from the group consisting of cellulose, polyvinyl pyrrolidone, silicon dioxide, stearyl fumarate or a pharmaceutically acceptable salt thereof, and any combination(s) thereof. In some embodiments, the composition further comprises a cryoprotectant. In some embodiments, the cryoprotectant is selected from the group consisting of a fructoligosaccharide, trehalose and a combination thereof. In some embodiments, the fructoligosaccharide is Raftilose® (fructooligosaccharide derived from inulin). In some embodiments, the composition is suitable for bolus administration or bolus release. In some embodiments, the composition comprises the Butyricimonas bacterial strain and at least one more additional bacterial strain(s).

[0011] In another aspect, provided herein is a bacterial strain, e.g., an isolated bacterial strain, of the genus Butyricimonas, wherein the bacterial strain comprises a 16s rRNA gene sequence with at least about 98% sequence identity to the polynucleotide sequence of SEQ ID NO: 846. In some embodiments, the Butyricimonas bacterial strain is capable of increasing production of at least one pro-inflammatory gene product, e.g., IFN-γ, IL-1β, IL-6, IL-12p40, IL-12p70, IL-23, IL-27, TNF, and/or TRAIL, in a human cell, e.g., a macrophage (e.g., a THP-1 macrophage), a monocyte, a PBMC, or a monocyte-derived dendritic cell. For example, in some embodiments, the Butyricimonas bacterial strain increases production of at least one pro-inflammatory gene product, e.g., IFN-γ, IL-1β, IL-6, IL-12p40, IL-12p70, IL-23, IL-27, TNF, and/or TRAIL, in a human cell, e.g., a macrophage (e.g., a THP-1 macrophage), a monocyte, a PBMC, or a monocyte-derived dendritic cell, when the human cell is contacted with the Butyricimonas bacterial strain.

[0012] In some embodiments, the Butyricimonas bacterial strain comprises a 16s rRNA gene sequence with at least about 98.5%, 99%, or 99.5% sequence identity to the polynucleotide sequence of SEQ ID NO: 846. In some embodiments, the Butyricimonas bacterial strain comprises a 16s rRNA gene sequence of SEQ ID NO: 846. In some embodiments, the Butyricimonas bacterial strain shares at least 70% DNA-DNA hybridization with strain Butyricimonas faecihominis P40-F2a, having the deposit accession number DSM 33411. In some embodiments, the Butyricimonas bacterial strain comprises a nucleotide sequence having at least about 70% identity to any one of SEQ ID NOs: 1-845. In some embodiments, the Butyricimonas bacterial strain comprises a genome having at least 95% average nucleotide identity (ANI) with the genome of Butyricimonas faecihominis P40-F2a, having the deposit accession number DSM 33411. In some embodiments, the Butyricimonas bacterial strain comprises a genome having at least 96.5% average nucleotide identity (ANI) and at least 60% alignment fraction (AF) with the genome of Butyricimonas faecihominis P40-F2a, having the deposit accession number DSM 33411. In some embodiments, the Butyricimonas bacterial strain is Butyricimonas faecihominis P40-F2a, having the deposit accession number DSM 33411. In some embodiments, the bacterial strain is capable of at least partially colonizing an intestine of a human subject.

[0013] In another aspect, provided herein is a food product comprising a Butyricimonas bacterial strain described herein, or a composition comprising a Butyricimonas bacterial strain described herein.

[0014] In another aspect, provided herein is a method of preventing or treating a cancer in a subject in need thereof. A contemplated method comprises administering to the subject an effective amount of a disclosed pharmaceutical composition, pharmaceutical unit, bacterial strain or bacterial strain mixture.

[0015] Also provided herein is a method of treating a dysbiosis in a subject in need thereof, the method comprising administering a Butyricimonas bacterial strain described herein or a composition comprising a Butyricimonas bacterial strain described herein (e.g., a therapeutically effective amount of a Butyricimonas bacterial strain described herein or a composition comprising a Butyricimonas bacterial strain described herein) to the subject. Also provided herein is a method of modifying a gut microbiome in a subject, the method comprising administering a Butyricimonas bacterial strain described herein or a composition comprising a Butyricimonas bacterial strain described herein (e.g., a therapeutically effective amount of a Butyricimonas bacterial strain described herein or a composition comprising a Butyricimonas bacterial strain described herein) to the subject. In some embodiments of the methods provided herein, the method further comprises administering a prebiotic to the subject. In some embodiments, the subject is selected from the group consisting of a human, a companion animal, or a livestock animal.

### DESCRIPTION OF THE DRAWINGS

[0016] The disclosure can be more completely understood with reference to the following drawings.

[0017] FIG. 1 depicts the effects of Butyricimonas faecihominis P40-F2a on (A) IL-27; (B) TRAIL; (C) IL-6; and (D) IFN-β production in human monocyte-derived dendritic cells (moDCs). moDCs were co-incubated with PBS only, the Butyricimonas faecihominis P40-F2a strain (2 doses), or an anti-inflammatory strain control (2 doses), and supernatants were collected and assayed for production of the indicated cytokine. Each test article was evaluated in 4 replicates and results are representative of at least two independent experiments. p value ≤0.05 (one-way ANOVA).

[0018] FIG. 2 depicts the effects of Butyricimonas faecihominis P40-F2a on (A) IL-12p′70; (B) IL-1β; and (C) IL-23 production in human moDCs. MoDCs were co-incubated with PBS only, the Butyricimonas faecihominis P40-F2a strain (2 doses), or an anti-inflammatory strain control (2 doses), and supernatants were collected and assayed for production of the indicated cytokine. Each test article was evaluated in 4 replicates and results are representative of at least two independent experiments. p value ≤0.05 (one-way ANOVA).

[0019] FIG. 3 depicts the effects of Butyricimonas faecihominis P40-F2a on (A) IFN-γ; (B) IL-1β; (C) IL-6; (D) TRAIL; and (E) TNF production in human peripheral blood mononuclear cells (PBMCs). PBMCs were co-incubated with PBS only, the Butyricimonas faecihominis P40-F2a strain (2 doses), or an anti-inflammatory strain control (2 doses), and supernatants were collected and assayed for production of the indicated cytokine. Each test article was evaluated in 4 replicates and results are representative of at least two independent experiments. p value ≤0.05 (one-way ANOVA).

[0020] FIG. 4 depicts the effects of Butyricimonas faecihominis P40-F2a on (A) IL-1β; (B) IL-12p40; (C) TNF; (D) CCL-18; and (E) IL-10 production in human THP-1 M2 macrophages. THP-1 M2 macrophages were co-incubated with PBS only, the Butyricimonas faecihominis P40-F2a strain (3 doses), or an anti-inflammatory strain control (3 doses), and supernatants were collected and assayed for production of the indicated cytokine. Each test article was evaluated in 4 replicates and results are representative of at least two independent experiments. p value ≤0.05 (one-way ANOVA).

[0021] FIG. 5 depicts the effects of administration of (A) Butyricimonas faecihominis P40-F2a and (B) an anti-PD-L1 antibody, respectively, on tumor volume (fold-change) compared to vehicle in a murine B16F10 melanoma model. (A) Tumor volume ratio relative to day 12-post cell implantation. Mean+SEM; n=10 (Butyricimonas faecihominis), n=15 (Vehicle). (B) Tumor volume ratio relative to day 12-post cell implantation. Mean+SEM; n=10 (Anti-PD-L1), n=15 (Vehicle).

[0022] FIG. 6 depicts the effects of administration of (A) Butyricimonas faecihominis P40-F2a and (B) an anti-PD-L1 antibody, respectively, on tumor volume (mm³) compared to vehicle in a murine B16F10 melanoma tumor model. (C) Effect of administration of Butyricimonas faecihominis P40-F2a, vehicle, and an anti-PD-L1 antibody, respectively, on tumor weight (g) in a murine B16F10 melanoma model. (A) Absolute tumor volume (mm³). Mean+SEM; n=10 (Butyricimonas faecihominis), n=15 (Vehicle). (B) Absolute tumor volume (mm³). Mean+SEM; n=10 (Anti-PD-L1), n=15 (Vehicle). (C) Tumor weight on day 23 of study (mean+SEM); n=10 (Butyricimonas faecihominis, Anti-PD-L1), n=15 (Vehicle).

[0023] FIG. 7 depicts the effects of administration of (A) Butyricimonas faecihominis P40-F2a and (B) an anti-PD-L1 antibody, respectively, on body weight (g) compared to vehicle in a murine B16F10 melanoma model.

[0024] FIG. 8 depicts the effects of administration of (A) Butyricimonas faecihominis P40-F2a and (B) an anti-PD-1 antibody, respectively, on tumor volume (fold-change) compared to vehicle in a murine CT26 colon tumor model. (A) Tumor volume ratio relative to day 9-post cell implantation. Mean+SEM; n=10 (Butyricimonas faecihominis), n=15 (Vehicle). (B) Tumor volume ratio relative to day 9-post cell implantation. *P<0.05, 2-way ANOVA, Mean+SEM; n=10 (Anti-PD-1), n=15 (Vehicle).

[0025] FIG. 9 depicts the effects of administration of (A) Butyricimonas faecihominis P40-F2a and (B) an anti-PD-1 antibody, respectively, on tumor volume (mm³) compared to vehicle in a murine CT26 colon tumor model. (C) Effect of administration of Butyricimonas faecihominis P40-F2a, vehicle, and an anti-PD-1 antibody, respectively, on tumor weight (g) in a murine CT26 colon tumor model. (A) Absolute tumor volume (mm³). Mean+SEM; n=10 (Butyricimonas faecihominis), n=15 (Vehicle). (B) Absolute tumor volume (mm³). Mean+SEM; n=10 (Anti-PD-1), n=15 (Vehicle) (C) Tumor weight on day 24 of study (mean+SEM); n=10 (Butyricimonas faecihominis, Anti-PD-1), n=15 (Vehicle).

[0026] FIG. 10 depicts the effects of administration of (A) Butyricimonas faecihominis P40-F2a and (B) an anti-PD-1 antibody, respectively, on body weight (g) compared to vehicle in a murine CT26 colon tumor model.

[0027] FIG. 11 depicts the effects of administration of (A) Collinsella ASMB P121-D5a (C. P121-D5a); (B) Butyricimonas faecihominis P40-F2a; and (C) combination of Collinsella ASMB P121-D5a and Butyricimonas faecihominis P40-F2a strains, respectively, on tumor volume (left: mm³; right: fold-change) compared to vehicle in a murine CT26 colon tumor model. (A) Tumor volume and tumor volume change relative to 1^{st} day of dosing (day 10). Mean±SEM; n=15 (Vehicle), n=10 (Collinsella P121-D5a). (B) Tumor volume and tumor volume change relative to 1^{st} day of dosing (day 10). Mean±SEM; n=15 (Vehicle), n=10 (B. faecihominis). (C) Tumor volume and tumor volume change relative to 1^{st} day of dosing (day 10). Mean±SEM; n=15 (Vehicle), n=10 (Collinsella P121-D5a+B. faecihominis P40-F2a). ***P<0.001, significant difference compared to Vehicle on respective day by 2-way ANOVA with Dunnett post hoc test.

[0028] FIG. 12 depicts the effects of administration of (A) Collinsella ASMB P121-D5a; (B) Butyricimonas faecihominis P40-F2a; (C) an anti-PD-1 antibody; (D) combination of Collinsella ASMB P121-D5a and Butyricimonas faecihominis P40-F2a strains; and (E) combination of Collinsella ASMB P121-D5a and Butyricimonas faecihominis P40-F2a strains plus an anti-PD-1 antibody, respectively, on tumor volume (left: mm³; right: fold-change) compared to vehicle in a murine CT26 colon tumor model. Bacterial test articles were mixed with equal volumes of Vehicle prior to administration. (A) Collinsella ASMB P121-D5a induced a decrease in tumor volume (left), also depicted as tumor volume change (right). n=10 (C. P121-D5a+Vehicle), n=15 (Vehicle); mean±SEM. Significant difference compared to Vehicle on Day 19 **, Day 21 ****, Day 24 ****, Day 25 ****; **P<0.01, ****P<0.0001 by 2-way ANOVA with Dunnett post hoc test. (B) Butyricimonas faecihominis P40-F2a induced a decrease in tumor volume (left), also depicted as tumor volume change (right). n=10 (B. faecihominis+Vehicle), n=15 (Vehicle); mean±SEM. Significant difference compared to Vehicle on Day 24 **, Day 25 ***; **P<0.01, ***P<0.001 by 2-way ANOVA with Dunnett post hoc test. (C) α-PD-1 induced a decrease in tumor volume (left), also depicted as tumor volume change (right). n=10 (α-PD-1+Vehicle), n=15 (Vehicle); mean±SEM. Significant difference compared to Vehicle on Day 21 *, Day 24 **, Day 25 ***; **P<0.01, ***P<0.001 by 2-way ANOVA with Dunnett post hoc test. (D) The combination of Collinsella ASMB P121-D5a+Butyricimonas faecihominis P40-F2a induced a decrease in tumor volume (left), also depicted as tumor volume change (right). n=10 (Collinsella ASMB P121-D5a+Butyricimonas faecihominis P40-F2a), n=15 (Vehicle); mean±SEM. Significant difference compared to Vehicle on Day 21 *, Day 24 ***, Day 25 ****; *P<0.05, ***P<0.001, ****P<0.0001 by 2-way ANOVA with Dunnett post hoc test. (E) Collinsella ASMB P121-D5a+Butyricimonas faecihominis P40-F2a+α-PD-1 combination decreased tumor volume (left) and tumor volume change (right). n=10 (Collinsella ASMB P121-D5a+Butyricimonas faecihominis P40-F2a+α-PD-1), n=15 (Vehicle); mean±SEM. Significant difference compared to Vehicle on Day 19 **, Day 21 ****, Day 24 ****, Day 25 ****; **P<0.01, ****P<0.0001 by 2-way ANOVA with Dunnett post hoc test.

[0029] FIG. 13 depicts the effects of administration of (A) Alistipes senegalensis P150-D12a; (B) a Butyricimonas faecihominis strain; (C) an anti-PD-1 antibody; (D) the combination of Alistipes senegalensis P150-D12a and Butyricimonas faecihominis strains; and (E) the combination of Alistipes senegalensis P150-D12a and Butyricimonas faecihominis strains plus an anti-PD-1 antibody, respectively, on tumor volume (left: mm³; right: fold-change) compared to vehicle in a murine CT26 colon tumor model. Bacterial test articles were mixed with equal volumes of Vehicle prior to administration. (A) A. senegalensis induced a decrease in tumor volume (left), also depicted as tumor volume change (right). n=10 (A. senegalensis+Vehicle), n=15 (Vehicle); mean±SEM. Significant difference compared to Vehicle on Day 19 *, Day 21 **, Day 24 ****, Day 25 ****; *P<0.05, **P<0.01, ****P<0.0001 by 2-way ANOVA with Dunnett post hoc test. (B) B. faecihominis induced a decrease in tumor volume (left), also depicted as tumor volume change (right). n=10 (B. faecihominis+Vehicle), n=15 (Vehicle); mean±SEM. Significant difference compared to Vehicle on Day 24 **, Day 25 ***; **P<0.01, ***P<0.001 by 2-way ANOVA with Dunnett post hoc test. (C) α-PD-1 induced a decrease in tumor volume (left), also depicted as tumor volume change (right). n=10 (α-PD-1+Vehicle), n=15 (Vehicle); mean±SEM. Significant difference compared to Vehicle on Day 21 *, Day 24 **, Day 25 ***; *P<0.05, **P<0.01, ***P<0.001 by 2-way ANOVA with Dunnett post hoc test. (D) The combination of A. senegalensis+B. faecihominis induced a decrease tumor volume (left); also depicted as tumor volume change (right). n=10 (A. senegalensis+B. faecihominis), n=15 (Vehicle); mean±SEM. Significant difference compared to Vehicle on Day 21 **, Day 24 **, Day 25 ***; **P<0.01, ***P<0.001 by 2-way ANOVA with Dunnett post hoc test. (E) The combination of A. senegalensis+B. faecihominis+α-PD-1 induced a decrease in tumor volume (left), also depicted as tumor volume change (right). n=10 (A. senegalensis+B. faecihominis+α-PD-1), n=15 (Vehicle); mean±SEM. Significant difference compared to Vehicle on Day 19 **, Day 21 ****, Day 24 ****, Day 25 ****; **P<0.01, ****P<0.0001 by 2-way ANOVA with Dunnett post hoc test.

[0030] FIG. 14 depicts the effects of administration of a combination of Collinsella ASMB P121-D5a and Butyricimonas faecihominis P40-F2a strains plus an anti-PD-1 antibody on tumor-infiltrating CD8⁺ T cells in a murine CT26 colon tumor model. Shown are representative immunohistochemistry stainings for CD8 in formalin-fixed paraffin-embedded (FFPE) tumor sections following treatment with (A) Collinsella ASMB P121-D5a+Butyricimonas faecihominis P40-F2a (Ca+Bf); (B) Collinsella ASMB P121-D5a+Butyricimonas faecihominis P40-F2a+α-PD-1 (Ca+Bf+α-PD-1); (C) Vehicle; or (D) α-PD-1. (E) CD8-positive cells were quantified as a percentage of non-necrotic cells in whole tissue sections in blinded fashion. Ca, Collinsella ASMBP121-D5a; Bf, Butyricimonas faecihominis P40-F2a. *P<0.05, 1-way ANOVA with Dunnett's post hoc test; mean+SEM; n=10 per group, n=15 Vehicle.

[0031] FIG. 15 depicts the effects of administration of a combination of Alistipes senegalensis P150-D12a and Butyricimonas faecihominis P40-F2a strains plus an anti-PD-1 antibody on tumor-infiltrating CD8⁺ T cells in a murine CT26 colon tumor model. Shown are representative immunohistochemistry stainings for CD8 in FFPE tumor sections following treatment with (A) Alistipes senegalensis P150-D12a+Butyricimonas faecihominis P40-F2a (As+Bf); (B) Alistipes senegalensis P150-D12a+Butyricimonas faecihominis P40-F2a+an anti-PD-1 antibody (As+Bf+α-PD-1); (C) Vehicle; or (D) α-PD-1. (E) CD8-positive cells were quantified as a percentage of non-necrotic cells of whole tissue sections in blinded fashion. As, Alistipes senegalensis P150-D12a; Bf, Butyricimonas faecihominis P40-F2a. **P<0.01, 1-way ANOVA with Dunnett's post hoc test; mean+SEM; n=10 per group, n=15 Vehicle.

[0032] FIG. 16 depicts the effects of administration of a combination of Collinsella ASMB P121-D5a and Butyricimonas faecihominis P40-F2a strains with or without an anti-PD-1 antibody on tumor-infiltrating T cells in a murine CT26 colon tumor model, as determined by Nanostring RNA-based cell type profiling. RNA was extracted and purified from tumor samples and analyzed using the Mouse PanCancer TO 360 Panel. T cell designation was based on expression of Cd3d, Cd3e, Cd3g, Cd6, Sh2d1a and Trat1. Ca, Collinsella ASMB P121-D5a; Bf, Butyricimonas faecihominis P40-F2a. n=14 (Vehicle), n=9 (α-PD-1), n=10 (Ca+Bf) and n=9 (Ca+Bf+α-PD-1).

[0033] FIG. 17 depicts the effects of administration of a combination of Alistipes senegalensis P150-D12a and Butyricimonas faecihominis P40-F2a strains plus an anti-PD-1 antibody on tumor-infiltrating T cells in a murine CT26 colon tumor model, as determined by Nanostring RNA-based cell type profiling. RNA was extracted and purified from tumor samples and analyzed using the Mouse PanCancer TO 360 Panel. T cell designation was based on expression of Cd3d, Cd3e, Cd3g, Cd6, Sh2d1a and Trat1. As, Alistipes senegalensis P150-D12a; Bf, Butyricimonas faecihominis P40-F2a. n=14 (Vehicle), n=9 (α-PD-1), n=4 (As+Bf+α-PD-1).

[0034] FIG. 18 depicts the effects of administration of a combination of Alistipes senegalensis P150-D12a and Butyricimonas faecihominis P40-F2a strains plus an anti-PD-1 antibody on tumor-infiltrating CD8⁺ T cells in a murine CT26 colon tumor model, as determined by flow cytometry analysis of fresh tumor tissue. CD8⁺ T cells were identified from gating CD8⁺ CD4⁻ CD3⁺ CD45⁺ lymphocytes and quantified as percentage of live cells. As, Alistipes senegalensis P150-D12a; Bf, Butyricimonas faecihominis P40-F2a. ****P<0.0001, 1-way ANOVA with Dunnett's post hoc test; mean+SEM. n=8 (As+Bf+α-PD-1), n=15 (Vehicle), n=9 (α-PD-1).

[0035] FIG. 19 depicts the effects of administration of a combination of Collinsella ASMB P121-D5a and Butyricimonas faecihominis P40-F2a strains plus an anti-PD-1 antibody on IFN-γ in tumors in a murine CT26 colon tumor model. IFN-γ concentration was determined by MSD analysis of tumor tissue homogenate and normalized to homogenate protein concentration. Ca, Collinsella ASMB P121-D5a; Bf, Butyricimonas faecihominis P40-F2a. *P<0.05, **P<0.01, 1-way ANOVA with Dunnett's post hoc test; mean+SEM; n=10 (Ca+Bf), n=9 (Ca+Bf+α-PD-1), n=9 (α-PD-1) and n=15 (Vehicle).

[0036] FIG. 20 depicts the effects of administration of a combination of Alistipes senegalensis P150-D12a and Butyricimonas faecihominis P40-F2a strains plus an anti-PD-1 antibody on IFN-γ in tumors in a murine CT26 colon tumor model. IFN-γ concentration was determined by MSD analysis of tumor tissue homogenate and normalized to homogenate protein concentration. As, Alistipes senegalensis P150-D12a; Bf, Butyricimonas faecihominis P40-F2a. **P<0.01, 1-way ANOVA with Dunnett's post hoc test; mean+SEM; n=10 (As+Bf), n=5 (As+Bf+α-PD-1), n=15 (Vehicle) and n=9 (α-PD-1).

[0037] FIG. 21 depicts the effects of administration of Lactobacillus ruminis P167-B1a (Lr) and an anti-PD-L1 antibody, respectively, in a B16F10 tumor model. (A) Individual tumor volume (left panel) and mean tumor volume fold change (right panel). 2-way ANOVA with Dunnett's post hoc test compared to Vehicle; mean+SEM; ns=not significant. (B) Immunohistochemistry (IHC) analysis of CD3⁺ cells in fixed tumor sections, as a percentage of non-necrotic cells. Mean+SEM; ns=not significant.

[0038] FIG. 22 depicts the effects of administration of (A) Lactobacillus ruminis P167-B1a (Lr); (B) a combination of Lr and an anti-PD-1 antibody; (C) a combination of Butyricimonas faecihominis P40-F2a (Bf) and an anti-PD-1 antibody; and (D) a combination of Lr and Bf strains plus an anti-PD-1 antibody; each in comparison to administration of an anti-PD-1 antibody alone and vehicle alone, respectively, in a murine CT26 colon tumor model. (A) Lr induced a decrease in tumor volume (left), also depicted as tumor volume fold-change (right). n=10 (Lr; anti-PD-1), n=10 (Vehicle); mean±SEM. Significant difference compared to Vehicle on Day 25* by 2-way ANOVA with Dunnett post hoc test. Administration of Anti-PD-1 antibody also induced a decrease in tumor volume (significant difference compared to Vehicle on Day 21*, Day 24*** and Day 25**** by 2-way ANOVA with Dunnett post hoc test). (B) The combination of Lr and an anti-PD-1 antibody did not significantly increase tumor reduction in comparison to anti-PD-1 antibody alone. n=10 (Lr+anti-PD-1), n=10 (Vehicle); mean±SEM. Significant difference compared to Vehicle on Day 24** and Day 25*** by 2-way ANOVA with Dunnett post hoc test. (C) The combination of Bf and an anti-PD-1 antibody did not significantly increase tumor reduction in comparison to anti-PD-1 antibody alone. n=10 (Bf+anti-PD-1), n=10 (Vehicle); mean±SEM. Significant difference compared to Vehicle on Day 24*** and Day 25**** by 2-way ANOVA with Dunnett post hoc test. (D) The combination of Lr+Bf+anti-PD-1 antibody showed higher anti-tumor activity in comparison to anti-PD-1 antibody alone, and also compared to each of Lr+anti-PD-1 and Bf+anti-PD-1. n=10 (Lr+Bf+anti-PD-1), n=10 (Vehicle); mean±SEM. Significant difference compared to Vehicle on Day 21**, Day 24*** and Day 25*** by 2-way ANOVA with Dunnett post hoc test.

[0039] FIG. 23 depicts the effects of administration of a combination of Lactobacillus ruminis P167-B1a (Lr)+Butyricimonas faecihominis P40-F2a (Bf)+anti-PD-1 antibody on tumor infiltrating cells, compared to administration of anti-PD-1 antibody alone, as shown by immunohistochemistry (IHC) and flow cytometry (FC). (A, B) CD4⁺ T cells; (C, D) natural killer (NK) cells; (E) dendritic cells (DC); and (F) CD45⁺ leukocytes. *P<0.05, **P<0.01, ****P<0.0001 by 1-way ANOVA compared to Vehicle or α-PD-1 with Dunnett's post hoc test; mean+SEM.

[0040] FIG. 24 depicts the effects of administration of an anti-PD-1 antibody alone compared to: (A) a combination of Lactobacillus ruminis P167-B1a (Lr), Alistipes senegalensis P150-D12a (As) and Butyricimonas faecihominis P40-F2a (Bf) strains; (B) a combination of Lr+As+Bf; and a combination of Lr+As+Bf plus anti-PD-1 antibody, respectively; (C) a combination of Collinsella ASMB P121-D5a (Ca)+Lr+Bf strains; (D) a combination of Ca+Lr+Bf; and a combination of Ca+Lr+Bf plus anti-PD-1 antibody, respectively; and (E) Lr+Bf plus anti-PD-1 antibody, in a murine CT26 colon tumor model. (A) Lr+As+Bf induced a decrease in tumor volume (left), also depicted as tumor volume fold-change (right). n=10 (Lr+As+Bf; anti-PD-1), n=10 (Vehicle); mean±SEM. Significant difference compared to Vehicle on Day 21*, Day 24* and Day 25* by 2-way ANOVA with Dunnett post hoc test. Administration of Anti-PD-1 antibody also induced a decrease in tumor volume (significant difference compared to Vehicle on Day 24* and Day 25** by 2-way ANOVA with Dunnett post hoc test). (B) The combination of Lr+As+Bf+anti-PD-1 antibody significantly increased tumor reduction in comparison to anti-PD-1 antibody alone and Lr+As+Bf, respectively. n=10 (Lr+As+Bf; Lr+As+Bf+anti-PD-1; anti-PD-1), n=10 (Vehicle); mean±SEM. Significant difference compared to Vehicle, Lr+As+Bf, and anti-PD-1 alone, respectively, on Day 24** and Day 25** by 2-way ANOVA with Dunnett post hoc test. (C) Ca+Lr+Bf induced a decrease in tumor volume (left), also depicted as tumor volume fold-change (right). n=10 (Ca+Lr+Bf; anti-PD-1), n=10 (Vehicle); mean±SEM. Significant difference compared to Vehicle on Day 21*, Day 24** and Day 25*** by 2-way ANOVA with Dunnett post hoc test. (D) The combination of Ca+Lr+Bf+anti-PD-1 antibody significantly increased tumor reduction in comparison to anti-PD-1 antibody alone and Ca+Lr+Bf, respectively. n=10 (Ca+Lr+Bf; Ca+Lr+Bf+anti-PD-1; anti-PD-1), n=10 (Vehicle); mean±SEM. Significant difference compared to Vehicle, Ca+Lr+Bf, and anti-PD-1 alone, respectively, on Day 24** and Day 25** by 2-way ANOVA with Dunnett post hoc test. (E) The combination of Lr+Bf+anti-PD-1 antibody significantly increased tumor reduction in comparison to anti-PD-1 antibody alone. n=10 (Lr+Bf+anti-PD-1; anti-PD-1), n=10 (Vehicle); mean±SEM. Significant difference compared to Vehicle, Lr+As+Bf, and anti-PD-1 alone, respectively, on Day 24* and Day 25** by 2-way ANOVA with Dunnett post hoc test.

[0041] FIG. 25 depicts the effects of administration of a combination of Lactobacillus ruminis P167-B1a (Lr), Alistipes senegalensis P150-D12a (As) and Butyricimonas faecihominis P40-F2a (Bf) strains plus anti-PD-1 antibody on tumor-infiltrating immune cell populations in a murine CT26 colon tumor model. Trends for increased infiltration of (A) CD3⁺ T cells; (B) CD4⁺ T cells; (C) CD8⁺ T cells; and (D) Nkp46⁺ NK cells compared to administration of anti-PD-1 antibody only, as a frequency of non-necrotic cells in fixed tumor sections by immunohistochemistry (IHC). (E)-(J): Tumor-infiltrating immune cells were scored by targeted gene expression using Nanostring platform from RNA extracted from frozen tumor pieces. (E) T cell score based on expression of the following genes: Cd3d, Cd3e, Cd3g, Cd6, Sh2d1a and Trat1. (F) Th1 cell score based on expression of Tbx21. (G) Exhausted CD8 T cell score based on expression of the following genes: Cd244, Eomes, Lag3 and Ptger4. (H) NK CD56dim cell score based on expression of: Il21r, Kir3d11 and Kir3d12. (I) Cytotoxic T cell score based on expression of: Ctsw, Gzma, Gzmb, Klrb1, Klrd1, Klrk1, Nkg7 and Prf1. (J) CD45 score based on expression of Ptprc. *P<0.05, **P<0.01, ***P<0.001 and ****P<0.0001 by 1-way ANOVA with Dunnett's post hoc test compared to Vehicle or α-PD-1; mean+SEM.

[0042] FIG. 26 depicts the effects of administration of a combination of Collinsella ASMB P121-D5a (Ca), Lactobacillus ruminis P167-B1a (Lr) and Butyricimonas faecihominis P40-F2a (Bf) strains, with and without the addition of anti-PD-1 antibody, on tumor-infiltrating immune cell populations in a murine CT26 colon tumor model. Shown are trends for increased infiltration of: (A) CD3⁺ T cells; (B) CD4⁺ T cells; (C) CD8⁺ T cells; and (D) Nkp46⁺ NK cells, when compared to anti-PD-1 and significant increases compared to vehicle as a frequency of non-necrotic cells in fixed tumor sections by immunohistochemistry (IHC). (E)-(L): Tumor-infiltrating immune cells were scored by targeted gene expression using Nanostring platform from RNA extracted from frozen tumor pieces. (E) T cell score based on expression of the following genes: Cd3d, Cd3e, Cd3g, Cd6, Sh2d1a and Trat1. (F) Th1 cell score based on expression of Tbx21. (G) Exhausted CD8 T cell score based on expression of: Cd244, Eomes, Lag3 and Ptger4. (H) NK CD56dim cell score based on expression of: Il21r, Kir3d11, and Kir3d12. (I) CD45 score based on expression of Ptprc. (J) Neutrophil score based on expression of: Ceacam3, Csf3r, Fcgr4 and Fpr1. (K) Cytotoxic T cell score based on expression of: Ctsw, Gzma, Gzmb, Klrb1, Klrd1, Klrk1, Nkg7 and Prf1. (L) Dendritic cell score based on expression of: Ccl2, Cd209e and Hsd11b1. *P<0.05, **P<0.01, ***P<0.001 and ****P<0.0001 by 1-way ANOVA with Dunnett's post hoc test compared to Vehicle or α-PD-1; mean+SEM.

[0043] FIG. 27 depicts the effects of administration of a combination of Lactobacillus ruminis P167-B1a (Lr) and Butyricimonas faecihominis P40-F2a (Bf) strains plus anti-PD-1 antibody on tumor-infiltrating immune cell populations in a murine CT26 colon tumor model. Shown are trends for increased infiltration of: (A) CD3⁺ T cells; (B) CD4⁺ T cells; (C) CD8⁺ T cells; and (D) Nkp46⁺ NK cells compared to administration of anti-PD-1 alone, and significant increases compared to vehicle as a frequency of non-necrotic cells in fixed tumor sections by immunohistochemistry (IHC). (E)-(L): Tumor-infiltrating immune cells were scored by targeted gene expression using Nanostring platform from RNA extracted from frozen tumor pieces. (E) T cell score based on expression of: Cd3d, Cd3e, Cd3g, Cd6, Sh2d1a and Trat1. (F) Th1 cell score based on expression of Tbx21. (G) Exhausted CD8 T cell score based on expression of: Cd244, Eomes, Lag3, and Ptger4. (H) NK CD56dim cell score based on expression of: Il21r, Kir3d11, and Kir3d12. (I) CD45 score based on expression of Ptprc. (J) Neutrophil score based on expression of: Ceacam3, Csf3r, Fcgr4 and Fpr1. (K) Cytotoxic T cell score based on expression of: Ctsw, Gzma, Gzmb, Klrb1, Klrd1, Klrk1, Nkg7, and Prf1. (L) CD8 score based on expression of Cd8a and Cd8b1. *P<0.05, **P<0.01, ***P<0.001 and ****P<0.0001 by 1-way ANOVA with Dunnett's post hoc test compared to Vehicle or α-PD-1; mean+SEM.

[0044] FIG. 28 depicts the effects of administration of anti-PD-1 antibody with the combination of Lactobacillus ruminis P167-B1a (Lr) and Butyricimonas faecihominis P40-F2a (Bf) strains reconstituted from lyophilized stocks in a murine CT26 colon tumor model, in comparison to administration of anti-PD-1 antibody with the combination of Lr and Bf strains reconstituted from frozen stocks. n=10 (Lr+Bf+anti-PD-1; anti-PD-1), n=10 (Excipient); *P<0.05, **P<0.01, ***P<0.001, ****P<0.0001 2-way ANOVA with Fisher post hoc; mean+SEM.

[0045] FIG. 29 depicts the effects of administration of an anti-PD-1 antibody alone to: (A) a combination of Alistipes indistinctus and Butyricimonas faecihominis P40-F2a (Bf) strains and an anti-PD-1 antibody; (B) a combination of Bacteroides thetaiotaomicron and Bf strains and an anti-PD-1 antibody; and (C) a combination of Intestinimonas butyriciproducens and Bf strains and an anti-PD-1 antibody, in a murine CT26 colon tumor model. None of the 2-strain combinations plus anti-PD-1 antibody significantly increased tumor reduction compared to anti-PD-1 alone. n=10 (2-strain combo+anti-PD-1; anti-PD-1), n=10 (Vehicle). *P<0.05, **P<0.01, ***P<0.001, ****P<0.0001 by 2-way ANOVA with Fisher's LSD post hoc test; mean±SEM.

### DETAILED DESCRIPTION

### I. Bacterial Strains

[0046] A contemplated bacterial strain, for example, for use in a bacterial strain mixture, pharmaceutical composition or unit, or method provided herein, includes a Butyricimonas species strain. Exemplary Butyricimonas species include Butyricimonas faecihominis. Those of skill in the art will recognize that the genus Butyricimonas may undergo taxonomical reorganization. Thus, it is intended that contemplated Butyricimonas species include Butyricimonas species that have been renamed and/or reclassified, as well as those that may be later renamed and/or reclassified.

[0047] As used herein, the term “species” refers to a taxonomic entity as conventionally defined by genomic sequence and phenotypic characteristics. A “strain” is a particular instance of a species that has been isolated and purified according to conventional microbiological techniques. Bacterial species and/or strains described herein include those that are live and/or viable, as well as those that are killed, inactivated or attenuated. Additionally, bacterial species and/or strains described herein include vegetative forms and non-spore forming forms of bacteria.

[0048] In some embodiments, a bacterial strain of Butyricimonas comprises a 16S rRNA gene sequence having a certain % identity to a reference sequence. rRNA, 16S rDNA, 16S rRNA, 16S, 18S, 18S rRNA, and 18S rDNA refer to nucleic acids that are components of, or encode for, components of the ribosome. There are two subunits in the ribosome termed the small subunit (SSU) and large subunit (LSU). Ribosomal RNA genes (rDNA) and their complementary RNA sequences are widely used for determination of the evolutionary relationships among organisms as they are variable, yet sufficiently conserved to allow cross-organism molecular comparisons. 16S rDNA sequence of the 30S SSU can be used, in embodiments, for molecular-based taxonomic assignments of prokaryotes. For example, 16S sequences may be used for phylogenetic reconstruction, as they are general highly conserved but contain specific hypervariable regions that harbor sufficient nucleotide diversity to differentiate genera and species of most bacteria. Although 16S rDNA sequence data has been used to provide taxonomic classification, closely related bacterial strains that are classified within the same genus and species may exhibit distinct biological phenotypes.

[0049] Accordingly, a bacterial strain of Butyricimonas provided herein includes strains comprising a 16s rRNA gene sequence having a certain % identity to SEQ ID NO: 846. In some embodiments, the bacterial strain is a strain of the genus Butyricimonas comprising a 16s rRNA gene sequence with at least 94% sequence identity to the polynucleotide sequence of SEQ ID NO: 846. In some embodiments, the bacterial strain comprises a 16s rRNA gene sequence with at least about 94%, about 94.25%, about 94.5%, about 94.75%, about 95%, about 95.25%, about 95.5%, about 95.75%, about 96%, about 96.25%, about 96.5%, about 96.75%, about 97%, about 97.05%, about 97.1%, about 97.15%, about 97.2%, about 97.25%, about 97.3%, about 97.35%, about 97.4%, about 97.45%, about 97.5%, about 97.55%, about 97.6%, about 97.65%, about 97.7%, about 97.75%, about 97.8%, about 97.85%, about 97.9%, about 97.95%, about 98%, about 98.05%, about 98.1%, about 98.15%, about 98.2%, about 98.25%, about 98.3%, about 98.35%, about 98.4%, about 98.45%, about 98.5%, about 98.55%, about 98.6%, about 98.65%, about 98.7%, about 98.75%, about 98.8%, about 98.85%, about 98.9%, about 98.95%, about 99%, about 99.1%, about 99.2%, about 99.3%, about 99.4%, about 99.5%, about 99.6%, about 99.7%, about 99.8%, or about 99.9% identity to the polynucleotide sequence of SEQ ID NO: 846. In a particular embodiment, the bacterial strain comprises a 16s rRNA gene sequence identical to SEQ ID NO: 846. In some embodiments, the sequence identity referred to above is across at least about 70% of SEQ ID NO: 846. In other embodiments, the sequence identity referred to above is across at least about 71%, 72%, 73%, 74%, 75%, 76%, 77%, 78%, 79%, 80%, 81%, 82%, 83%, 84%, 85%, 86%, 87%, 88%, 89%, 90%, 91%, 92%, 93%, 94%, 95%, 96%, 97%, 98%, 99% or 100% of SEQ ID NO: 846.

[0050] In some embodiments, the bacterial strain of Butyricimonas provided herein is a bacterial strain of Butyricimonas faecihominis. In some embodiments, the bacterial strain of Butyricimonas faecihominis comprises a genomic sequence (e.g., a whole genome sequence, or fragments or contigs thereof) having a certain % identity to one or more of SEQ ID NOs: 1-845. In some embodiments, a Butyricimonas faecihominis strain comprises a polynucleotide sequence selected from any one of SEQ ID NOs: 1-845, or a nucleotide sequence having at least about 65%, about 70%, about 75%, about 80%, about 85%, about 90%, about 91%, about 92%, about 93%, about 94%, about 95%, about 96%, about 97%, about 98%, or about 99% identity to a polynucleotide sequence selected from any one of SEQ ID NOs: 1-845. In some embodiments, the sequence identity referred to above is across at least about 70% of the bacterial genome. In other embodiments, the sequence identity referred to above is across at least about 75%, 80%, 85%, 90%, 95% or greater than 95% of the bacterial genome. In some embodiments, a Butyricimonas faecihominis strain genome may comprise the polynucleotide sequence of each of SEQ ID NOs: 1-845, or each of a polynucleotide sequence having at least about 65%, about 70%, about 75%, about 80%, about 85%, about 90%, about 91%, about 92%, about 93%, about 94%, about 95%, about 96%, about 97%, about 98%, or about 99% identity to the polynucleotide sequence of each of SEQ ID NOs: 1-845.

[0051] In some embodiments, a bacterial strain of Butyricimonas faecihominis comprises a whole genomic sequence having at least about 70% identity across at least 70% of its genome to the sum of all genomic contigs represented by SEQ ID NOs: 1-845. In some embodiments, the whole genomic sequence has at least about 75%, 80%, 85%, 90%, 95% or greater than 95% identity to the sum of all genomic contigs represented by SEQ ID NOs: 1-845. In some embodiments, the sequence identity referred to above is across at least 75%, 80%, 85%, 90%, 95% or greater than 95% of the whole genomic sequence of the bacterial strain. In some embodiments, a bacterial strain of Butyricimonas faecihominis comprises a whole genomic sequence comprising coding regions having at least about 70% identity across at least 70% of the total coding regions in its genome to the coding regions within the sum of all genomic contigs represented by SEQ ID NOs: 1-845. In some embodiments, the coding regions within the whole genomic sequence have at least about 75%, 80%, 85%, 90%, 95% or greater than 95% identity to the coding regions within the sum of all genomic contigs represented by SEQ ID NOs: 1-845. In some embodiments, the sequence identity referred to above is across at least 75%, 80%, 85%, 90%, 95% or greater than 95% of the coding regions within the whole genomic sequence of the bacterial strain.

[0052] The identity of a bacterial strain of Butyricimonas may be determined by sequence analysis, for example, of the 16s rRNA gene sequence or a genomic sequence (e.g., a whole genome sequence, or fragments or contigs thereof) of the bacterial strain, using any sequencing methods known in the art, including, for example, Sanger sequencing. An example of a sequencing technology useful for identifying strains of Butyricimonas is the Illumina platform. The Illumina platform is based on amplification of DNA on a solid surface (e.g., flow cell) using fold-back PCR and anchored primers (e.g., capture oligonucleotides). For sequencing with the Illumina platform, bacterial DNA is fragmented, and adapters are added to terminal ends of the fragments. DNA fragments are attached to the surface of flow cell channels by capturing oligonucleotides which are capable of hybridizing to the adapter ends of the fragments. The DNA fragments are then extended and bridge amplified. After multiple cycles of solid-phase amplification followed by denaturation, an array of millions of spatially immobilized nucleic acid clusters or colonies of single-stranded nucleic acids are generated. Each cluster may include approximately hundreds to a thousand copies of single-stranded DNA molecules of the same template. The Illumina platform uses a sequencing-by-synthesis method where sequencing nucleotides comprising detectable labels (e.g., fluorophores) are added successively to a free 3′ hydroxyl group. After nucleotide incorporation, a laser light of a wavelength specific for the labeled nucleotides can be used to excite the labels. An image is captured and the identity of the nucleotide base is recorded. These steps can be repeated to sequence the rest of the bases. Sequencing according to this technology is described in, for example, U.S. Patent Publication Application Nos. 2011/0009278, 2007/0014362, 2006/0024681, 2006/0292611, and U.S. Pat. Nos. 7,960,120, 7,835,871, 7,232,656, and 7,115,200. Another example of a sequencing technology useful for identifying strains of Butyricimonas is SOLiD technology by Applied Biosystems from Life Technologies Corporation (Carlsbad, Calif.). In SOLiD sequencing, bacterial DNA may be sheared into fragments, and adapters may be attached to the terminal ends of the fragments to generate a library. Clonal bead populations may be prepared in microreactors containing template, PCR reaction components, beads, and primers. After PCR, the templates can be denatured, and bead enrichment can be performed to separate beads with extended primers. Templates on the selected beads undergo a 3′ modification to allow covalent attachment to the slide. The sequence can be determined by sequential hybridization and ligation with several primers. A set of four fluorescently labeled di-base probes compete for ligation to the sequencing primer. Multiple cycles of ligation, detection, and cleavage are performed with the number of cycles determining the eventual read length. Another example of a sequencing technology useful for identifying strains of Butyricimonas is Ion Torrent sequencing. In this technology, bacterial DNA is sheared into fragments, and oligonucleotide adapters are then ligated to the terminal ends of the fragments. The fragments are then attached to a surface, and each base in the fragments is resolvable by measuring the H⁺ ions released during base incorporation. This technology is described in, for example, U.S. Patent Publication Application Nos. 2009/0026082, 2009/0127589, 2010/0035252, 2010/0137143, and 2010/0188073.

[0053] Upon obtaining a polynucleotide sequence of a bacterial strain (e.g., 16s rRNA gene sequence or genomic sequence), sequence identity with a polynucleotide sequence of a Butyricimonas strain may be determined in various ways that are within the skill in the art, e.g., using publicly available computer software such as BLAST, BLAST-2, BLAT (BLAST-like alignment tool), ALIGN or Megalign (DNASTAR) software. BLAST (Basic Local Alignment Search Tool) analysis using the algorithm employed by the programs blastp, blastn, blastx, tblastn and tblastx (Karlin et al., PROC. NATL. ACAD. SCI. USA 87:2264-2268 (1990); Altschul, J. MOL. EVOL. 36, 290-300 (1993); Altschul et al., NUCLEIC ACIDS RES. 25:3389-3402 (1997)) are tailored for sequence similarity searching. For a discussion of basic issues in searching sequence databases see Altschul et al., NATURE GENETICS 6:119-129 (1994). Those skilled in the art can determine appropriate parameters for measuring alignment, including any algorithms needed to achieve maximal alignment over the full length of the sequences being compared. The search parameters for histogram, descriptions, alignments, expect value (i.e., the statistical significance threshold for reporting matches against database sequences), cutoff, matrix and filter are at the default settings. The default scoring matrix used by blastp, blastx, tblastn, and tblastx is the BLOSUM62 matrix (Henikoff et al., (1992) PROC. NATL. ACAD. SCI. USA 89:10915-10919). Four blastn parameters may be adjusted as follows: Q=10 (gap creation penalty); R=10 (gap extension penalty); wink=1 (generates word hits at every wink^{th} position along the query); and gapw=16 (sets the window width within which gapped alignments are generated). The equivalent Blastp parameter settings may be Q=9; R=2; wink=1; and gapw=32. Searches may also be conducted using the NCBI (National Center for Biotechnology Information) BLAST Advanced Option parameter (e.g.: -G, Cost to open gap [Integer]: default=5 for nucleotides/11 for proteins; -E, Cost to extend gap [Integer]: default=2 for nucleotides/1 for proteins; -q, Penalty for nucleotide mismatch [Integer]: default=−3; -r, reward for nucleotide match [Integer]: default=1; -e, expect value [Real]: default=10; —W, wordsize [Integer]: default=11 for nucleotides/28 for megablast/3 for proteins; -y, Dropoff (X) for blast extensions in bits: default=20 for blastn/7 for others; -X, X dropoff value for gapped alignment (in bits): default=15 for all programs, not applicable to blastn; and —Z, final X dropoff value for gapped alignment (in bits): 50 for blastn, 25 for others). A Bestfit comparison between sequences, available in the GCG package version 10.0, uses DNA parameters GAP=50 (gap creation penalty) and LEN=3 (gap extension penalty) and the equivalent settings in protein comparisons are GAP=8 and LEN=2.

[0054] In a particular embodiment, a bacterial strain of Butyricimonas useful for the compositions and methods provided herein is Butyricimonas faecihominis strain P40-F2a. A deposit of Butyricimonas faecihominis strain P40-F2a was made to DSMZ (Deutsche Sammlung von Mikroorganismen and Zellkulturen GmbH, Inhoffenstraβe 7B, 38124 Brunswick, Germany) under the Budapest Treaty on the International Recognition of the Deposit of Microorganisms for the Purposes of Patent Procedure on Jan. 20, 2020. This deposit was accorded accession number DSM 33411. The 16s rRNA gene sequence of Butyricimonas faecihominis strain P40-F2a is provided herein as SEQ ID NO: 846, and genomic sequences of Butyricimonas faecihominis strain P40-F2a are provided herein as SEQ ID NOs: 1-845. In another particular embodiment, a bacterial strain of Butyricimonas useful for the compositions and methods provided herein is Butyricimonas faecihominis strain 180-3^{T} (=JCM 18676^{T}=CCUG65562^{T}). See Sakamoto et al., International Journal of Systematic and Evolutionary Microbiology 64, 2992-2997 (2014). In another particular embodiment, a bacterial strain of Butyricimonas useful for the compositions and methods provided herein is Butyricimonas faecihominis strain 30A1 (GenBank assembly accession: GCA_003851945.2; RefSeq assembly accession: GCF_003851945.2).

[0055] Additional bacterial strains of Butyricimonas provided herein include Butyricimonas strains having a DNA-DNA hybridization (DDH)) value of equal to or greater than about 70% with Butyricimonas faecihominis strain P40-F2a. In particular embodiments, the Butyricimonas faecihominis strain is one having greater than about 70%, about 75%, about 80%, about 85%, about 90%, about 95%, about 96%, about 97%, about 98%, or about 99% DNA-DNA hybridization with Butyricimonas faecihominis strain P40-F2a, or any range between any of the above values. Any method for determining DNA-DNA hybridization values known in the art may be used to assess the degree of DNA-DNA hybridization, including but not limited to the spectrophotometric method for determining renaturation rates described by De Ley et al. (J Biochem 12 133-142 (1970)), slightly modified in hybridization temperature (Gavini et al., Ecology in Health and Disease 12 40-45 (2001)); and those described by Grimont et al., Curr Microbiol 4, 325-330 (1980) and Rossello-Mora, Molecular Identification, Systematics and Population Structure of Prokaryotes pp. 23-50 (2006). In some embodiments, the degree of DNA-DNA hybridization is determined by digital DNA-DNA hybridization (dDDH) analysis, for example, using the Genome-to-Genome Distance Calculator online tool (see Meier-Kolthoff et al., BMC Bioinformatics 14:60 (2013)). In particular embodiments, the Butyricimonas strain is one having a DDH or dDDH value of equal to or greater than about 70% with Butyricimonas faecihominis strain P40-F2a. In some embodiments, the DDH or dDDH value is greater than about 75%, about 80%, about 85%, about 90%, about 95%, about 96%, about 97%, about 98%, or about 99% with Butyricimonas faecihominis strain P40-F2a, or any range between any of the above values.

[0056] Additional bacterial strains of Butyricimonas provided herein include Butyricimonas strains having equal to or greater than 95% average nucleotide identity (ANI) with Butyricimonas faecihominis strain P40-F2a. In some embodiments, the ANI is equal to or greater than about 95%, about 95.5%, about 96%, about 96.5%, about 97%, about 97.5%, about 98%, about 98.5%, about 99%, about 99.5% or 100% with Butyricimonas faecihominis strain P40-F2a, or any range between any of the above values. The average nucleotide identity (ANI) of the shared genes between two strains is known to be a robust means to compare genetic relatedness among strains, and that ANI values of ˜95% correspond to the 70% DNA-DNA hybridization standard for defining a species. See, e.g., Konstantinidis and Tiedje, Proc Natl Acad Sci USA, 102(7):2567-72 (2005); Goris et al., Int Syst Evol Microbiol. 57(Pt 1):81-91 (2007); and Jain et al., Nat Commun. 9(1):5114 (2018). In some embodiments, the ANI between two bacterial genomes is calculated from pair-wise comparisons of all sequences shared between any two strains and can be determined, for example, using any of a number of publicly available ANI tools, including but not limited to OrthoANI with usearch (Yoon et al. Antonie van Leeuwenhoek 110:1281-1286 (2017)); ANI Calculator, JSpecies (Richter and Rossello-Mora, Proc Natl Acad Sci USA 106:19126-19131 (2009)); and JSpeciesWS (Richter et al., Bioinformatics 32:929-931 (2016)). Other methods for determining the ANI of two genomes are known in the art. See, e.g., Konstantinidis, K. T. and Tiedje, J. M., Proc. Natl. Acad. Sci. U.S.A., 102: 2567-2572 (2005); Varghese et al., Nucleic Acids Research, 43(14):6761-6771 (2015); and Jain et al., Nat Commun. 9(1):5114 (2018). In a particular embodiment, the ANI between two bacterial genomes can be determined using an alignment-based method, for example, by averaging the nucleotide identity of orthologous genes identified as bidirectional best hits (BBHs). Protein-coding genes of a first genome (Genome A) and second genome (Genome B) are compared at the nucleotide level using a similarity search tool, for example, NSimScan (Novichkov et al., Bioinformatics 32(15): 2380-23811 (2016). The results are then filtered to retain only the BBHs that display at least 70% sequence identity over at least 70% of the length of the shorter sequence in each BBH pair. The ANI of Genome A to Genome B is defined as the sum of the percent identity times the alignment length for all BBHs, divided by the sum of the lengths of the BBH genes. In another particular embodiment, the ANI between two bacterial genomes can be determined using an alignment-free method, for example, FastANI, which uses alignment-free approximate sequence mapping to assess genomic relatedness. See Jain et al., Nat Commun. 9(1):5114 (2018). FastANI has been demonstrated to reveal clear genetic discontinuity between species, with 99.8% of the total 8 billion genome pairs analyzed conforming to >95% intra-species and <83% inter-species ANI values. Accordingly, in some embodiments, a bacterial strain having a genome with equal to or greater than 95% average nucleotide identity (ANI) with the genome of Butyricimonas faecihominis strain P40-F2a is identified as a bacterial strain of the species Butyricimonas faecihominis.

[0057] Additional bacterial strains of Butyricimonas provided herein include Butyricimonas strains having equal to or greater than 60% alignment fraction (AF) with Butyricimonas faecihominis strain P40-F2a. In some embodiments, the AF is equal to or greater than about 65%, about 70%, about 75%, about 80%, about 85%, about 90%, about 95%, or 100% with Butyricimonas faecihominis strain P40-F2a, or any range between any of the above values. In some embodiments, the AF is computed by dividing the sum of the lengths of all BBH genes by the sum of the length of all the genes in Genome A. This computation is performed separately in both directions: from Genome A to genome B and from Genome B to Genome A.

[0058] In a particular embodiment, a Butyricimonas strain comprises a genome having equal to or greater than about 95% ANI and equal to or greater than 60% AF with the genome of Butyricimonas faecihominis strain P40-F2a. In another particular embodiment, a Butyricimonas strain comprises a genome having equal to or greater than about 96.5% ANI and equal to or greater than 60% AF with the genome of Butyricimonas faecihominis strain P40-F2a.

[0059] Additional bacterial strains of Butyricimonas provided herein include Butyricimonas strains that having the same or approximately the same genome characteristics as Butyricimonas faecihominis strain P40-F2a. Such genome characteristics can include, for example, genome size, G+C content, number of coding sequences, and number of tRNAs. In some embodiments, the Butyricimonas strain comprises a genome of about 4.7 to about 4.9 Mb in size. In some embodiments, the Butyricimonas strain comprises a genome of about 4.71, 4.72, 4.73, 4.74, 4.75, 4.76, 4.77, 4.78, 4.79, 4.80, 4.81, 4.82, 4.83, 4.84, 4.85, 4.86, 4.87, 4.88, 4.89 or about 4.9 Mb in size. In a particular embodiment, the Butyricimonas strain comprises a genome of about 4.85 Mb in size. In some embodiments, the Butyricimonas strain comprises a genome that comprises about 3600 to 4000 coding sequences. In some embodiments, the Butyricimonas strain comprises a genome that comprises about 3650 to 3950 coding sequences. In some embodiments, the Butyricimonas strain comprises a genome that comprises about 3660, 3670, 3680, 3690, 3700, 3710, 3720, 3730, 3740, 3750, 3760, 3770, 3780, 3790, 3800, 3810, 3820, 3830, 3840, 3850, 3860, 3870, 3880, 3890, 3900, 3910, 3920, 3930, or 3940 coding sequences. In a particular embodiment, the Butyricimonas strain comprises a genome that comprises about 3904 coding sequences. In some embodiments, the Butyricimonas strain comprises a genome that comprises about 40 to 60 tRNA sequences. In some embodiments, the Butyricimonas strain comprises a genome that comprises about 41, 42, 43, 44, 45, 46, 47, 48, 49, 50, 51, 52, 53, 54, 55, 56, 57, 58, 59 or 60 tRNAs. In a particular embodiment, the Butyricimonas strain comprises a genome that comprises about 49 tRNAs. In some embodiments, the Butyricimonas strain comprises a genome that has a G+C content of about 35% to about 55%. In some embodiments, the Butyricimonas strain comprises a genome that has a G+C content of about 40% to about 50%. In some embodiments, the Butyricimonas strain comprises a genome that has a G+C content of about 40.0%, 40.5%, 41.0%, 41.5%, 42.0%, 42.5%, 43.0%, 43.5%, 44.0%, 44.5%, 45.0%, 45.5%, 46.0%, 46.5%, 47.0%, 47.5%, 48.0%, 48.5%, 49.0%, 49.5%, or about 50%. In a particular embodiment, the Butyricimonas strain comprises a genome that has a G+C content of about 43.47%.

[0060] Additional bacterial strains of Butyricimonas provided herein include Butyricimonas strains that provide the same or approximately the same pattern as Butyricimonas faecihominis strain P40-F2a when analyzed, for example, by DNA fingerprinting techniques. Any DNA fingerprinting technique known in the art may be used to identify strains of Butyricimonas, including but not limited to, Pulsed Field Gel Electrophoresis (PFGE), ribotyping, Randomly Amplified Polymorphic DNA (RAPD), Amplified Fragment Length Polymorphism (AFLP), Amplified Ribosomal DNA Restriction Analysis (ARDRA), rep-PCR (repetitive element primed PCR, directed to naturally occurring, highly conserved, repetitive DNA sequences, present in multiple copies in the genomes) including Repetitive Extragenic Palindromic PCR (REP-PCR), Enterobacterial Repetitive Intergenic Consensus Sequences-PCR (ERIC-PCR), BOX-PCR (derived from the boxA element), (GTG)₅-PCR, Triplicate Arbitrary Primed PCR (TAP-PCR), Multi-Locus Sequence Analysis (MLSA), Multi-Locus Sequence Typing (MLST), Multiple Locus Variable-number Tandem Repeat Analysis (MLVA) and DNA microarray-based genotyping techniques.

[0061] Additional bacterial strains of Butyricimonas provided herein include Butyricimonas strains showing phenotypic similarity to Butyricimonas faecihominis strain P40-F2a. Phenotypic similarity can be based on, for example, cell shape and size, colony morphology (e.g. size, color and odor of plate colonies), Gram staining, biochemical tests, pH and temperature optima, sugar fermentation, metabolic capabilities (e.g. catalase and/or oxidase negative), chemotaxonomic analysis (e.g. polar lipid and lipoquinone composition; see Tindall et al., Int J Syst Evol Microbiol 58, 1737-1745 (2008)) and/or fatty acid methyl ester (FAME) analysis.

[0062] Additional bacterial strains of Butyricimonas provided herein include Butyricimonas strains showing carbon utilization similar to Butyricimonas faecihominis strain P40-F2a. In some embodiments, the Butyricimonas bacterial strain is capable of utilizing one or more carbon sources selected from the group consisting of α-D-Glucose, D-Mannose, α-D-Lactose, Glycerol, D-Galactose, N-Acetyl-D-glucosamine, D,L-α-Glycerol-Phosphate, D-Glucosamine, N-Acetyl-D-Galactosamine, N-Acetyl-Neuraminic Acid, α-Keto-Valeric Acid, and Melibionic Acid.

[0063] A contemplated bacterial strain, bacterial strain mixture, or composition may be characterized as having an effect on gene product production, e.g., IFN-γ, IL-1β, IL-6, IL-12p40, IL-12p70, IL-23, IL-27, TNF, and/or TRAIL production, in a cell, tissue, or subject, e.g., an immune cell, e.g., a macrophage (e.g., a THP-1 macrophage) or PBMC (including lymphocytes (T cells, B cells, NK cells) and monocytes). In vivo, major sources of cytokines include T helper cells, monocytes, macrophages and dendritic cells, however myriad immune effector cell types are capable of producing cytokines in certain contexts including B cells, cytotoxic T cells, NK cells, mast cells, and granulocytes like neutrophils and eosinophils. Gene product production, e.g., IFN-γ, IL-1β, IL-6, IL-12p40, IL-12p70, IL-23, IL-27, TNF, and/or TRAIL production, in a macrophage may, for example, be assayed as follows. THP-1 human macrophages are made by culturing the THP-1 human monocyte cell line with phorbol 12-myristate 13-acetate (PMA) for 24 hours, optionally followed by IL-4 and IL-13 as described previously (Genin et al., BMC Cancer 15:577 (2015)). A bacterial strain, bacterial strain mixture, or composition is incubated with THP-1 macrophages in the presence of lipopolysaccharide (LPS) for 24 hours. Gene product production is assessed by measuring the concentration of the gene product, e.g., IFN-γ, IL-1β, IL-6, IL-12p40, IL-12p′70, IL-23, IL-27, TNF, and/or TRAIL, in the cell culture supernatant by ELISA. Gene product production may also be assayed as described in Sudhakaran et al., Genes Nutr., 8(6): 637-48 (2013). Gene product production, e.g., IFN-γ, IL-1β, IL-6, IL-12p40, IL-12p70, IL-23, IL-27, TNF, and/or TRAIL production, in a PBMC may, for example, be assayed as follows. Primary PBMCs are isolated from blood samples of donors using a percoll gradient (Sim et al., J. Vis. Exp. (112), e54128 (2016)). A bacterial strain, bacterial strain mixture, or composition is incubated with PBMCs for 24 hours. Gene product production is assessed by measuring the concentration of the gene product, e.g., IFN-γ, IL-1β, IL-6, IL-12p40, IL-12p′70, IL-23, IL-27, TNF, and/or TRAIL, in the cell culture supernatant by ELISA.

[0064] In some embodiments, a Butyricimonas (e.g., Butyricimonas faecihominis) bacterial strain (or a bacterial strain mixture or composition comprising the Butyricimonas bacterial strain) increases, or is capable of increasing, production of at least one pro-inflammatory gene product, e.g., a pro-inflammatory cytokine or chemokine, in a cell, tissue, or subject. Exemplary pro-inflammatory gene products include IFN-γ, IL-1β, IL-6, IL-12p40, IL-12p70, IL-23, IL-27, TNF, and TRAIL. For example, in some embodiments, a Butyricimonas (e.g., Butyricimonas faecihominis) bacterial strain provided herein (or a composition or bacterial strain mixture comprising the Butyricimonas bacterial strain) increases, or is capable of increasing, expression of one or more of IFN-γ, IL-1β, IL-6, IL-12p40, IL-12p70, IL-23, IL-27, TNF, and TRAIL in a cell, tissue, or subject. In some embodiments, the increased production of a pro-inflammatory gene product, e.g., IFN-γ, IL-1β, IL-6, IL-12p40, IL-12p′70, IL-23, IL-27, TNF, and/or TRAIL, occurs in a human cell, e.g., a THP-1 macrophage, monocyte, PBMC or moDC. For example, contacting a human cell, e.g., a THP-1 macrophage, PBMC or moDC with the Butyricimonas (e.g., Butyricimonas faecihominis) bacterial strain (or the composition or bacterial strain mixture comprising the Butyricimonas bacterial strain), e.g., by culturing the human cell with the Butyricimonas bacterial strain (or the composition or bacterial strain mixture comprising the Butyricimonas bacterial strain) increases production of IFN-γ, IL-1β, IL-6, IL-12p40, IL-12p70, IL-23, IL-27, TNF, and/or TRAIL in the cell by at least about 10%, at least about 20%, at least about 30%, at least about 40%, at least about 50%, at least about 75%, at least about 100%, at least about 200%, at least about 300%, at least about 400%, at least about 500%, at least about 750%, at least about 1000%, from about 10% to about 20%, from about 10% to about 50%, from about 10% to about 100%, from about 10% to about 200%, from about 10% to about 500%, from about 10% to about 1000%, from about 20% to about 50%, from about 20% to about 100%, from about 20% to about 200%, from about 20% to about 500%, from about 20% to about 1000%, from about 50% to about 100%, from about 50% to about 200%, from about 50% to about 500%, from about 50% to about 1000%, from about 100% to about 200%, from about 100% to about 500%, from about 100% to about 1000%, from about 200% to about 500%, from about 200% to about 1000%, or from about 500% to about 1000%, relative to a cell (e.g., of the same cell type) that was not contacted, e.g., cultured, with the Butyricimonas bacterial strain (or the composition or bacterial strain mixture comprising the Butyricimonas bacterial strain). In some embodiments, the contacting of the human cell with the Butyricimonas (e.g., Butyricimonas faecihominis) strain (or the composition or bacterial strain mixture comprising the Butyricimonas bacterial strain) occurs in vitro. In other embodiments, the contacting of the human cell with the Butyricimonas (e.g., Butyricimonas faecihominis) strain (or the composition or bacterial strain mixture comprising the Butyricimonas bacterial strain) occurs in vivo.

[0065] In some embodiments, a Butyricimonas (e.g., Butyricimonas faecihominis) bacterial strain (or a bacterial strain mixture or composition comprising the Butyricimonas bacterial strain) increases, or is capable of increasing, infiltration of T cells into a tumor (e.g., a tumor in a subject). In some embodiments, the T cells are CD3+ T cells. In some embodiments, the T cells are CD8+ T cells. In some embodiments, contacting a tumor with the Butyricimonas (e.g., Butyricimonas faecihominis) bacterial strain (or the composition or bacterial strain mixture comprising the Butyricimonas bacterial strain), e.g., by administering the Butyricimonas bacterial strain (or the composition or bacterial strain mixture comprising the Butyricimonas bacterial strain) to a subject with the tumor, increases infiltration of T cells into the tumor by at least about 10%, at least about 20%, at least about 30%, at least about 40%, at least about 50%, at least about 75%, at least about 100%, at least about 200%, at least about 300%, at least about 400%, at least about 500%, at least about 750%, at least about 1000%, from about 10% to about 20%, from about 10% to about 50%, from about 10% to about 100%, from about 10% to about 200%, from about 10% to about 500%, from about 10% to about 1000%, from about 20% to about 50%, from about 20% to about 100%, from about 20% to about 200%, from about 20% to about 500%, from about 20% to about 1000%, from about 50% to about 100%, from about 50% to about 200%, from about 50% to about 500%, from about 50% to about 1000%, from about 100% to about 200%, from about 100% to about 500%, from about 100% to about 1000%, from about 200% to about 500%, from about 200% to about 1000%, or from about 500% to about 1000%, relative to a tumor (e.g., of the same tumor type) that was not contacted with the Butyricimonas bacterial strain (or the composition or bacterial strain mixture comprising the Butyricimonas bacterial strain). In some embodiments, said contacting further comprises contacting the tumor with a checkpoint inhibitor, for example, a checkpoint inhibitor antibody.

[0066] Also provided herein are strains of the species Lactobacillus ruminis, for example, a strain referred to herein as Lactobacillus ruminis strain P167-B1a, and compositions, for example, pharmaceutical compositions, comprising such strains.

[0067] A bacterial strain of the species Lactobacillus ruminis provided herein includes strains comprising a 16s rRNA gene sequence having a certain % identity to SEQ ID NO: 847. In some embodiments, the bacterial strain comprises a 16s rRNA gene sequence with at least about 98.00%, about 98.05%, about 98.1%, about 98.15%, about 98.2%, about 98.25%, about 98.3%, about 98.35%, about 98.4%, about 98.45%, about 98.5%, about 98.55%, about 98.6%, about 98.65%, about 98.7%, about 98.75%, about 98.80%, about 98.85%, about 99%, about 99.1%, about 99.2%, about 99.3%, about 99.4%, about 99.5%, about 99.6%, about 99.7%, about 99.8%, or about 99.9% identity to the polynucleotide sequence of SEQ ID NO: 847. In a particular embodiment, the bacterial strain comprises a 16s rRNA gene sequence identical to SEQ ID NO: 847. In some embodiments, the sequence identity referred to above is across at least about 70% of SEQ ID NO: 847. In other embodiments, the sequence identity referred to above is across at least about 71%, 72%, 73%, 74%, 75%, 76%, 77%, 78%, 79%, 80%, 81%, 82%, 83%, 84%, 85%, 86%, 87%, 88%, 89%, 90%, 91%, 92%, 93%, 94%, 95%, 96%, 97%, 98%, 99%, or 100% of SEQ ID NO: 847.

[0068] In a particular embodiment, a bacterial strain of Lactobacillus ruminis provided herein is Lactobacillus ruminis strain P167-B1a. A deposit of Lactobacillus ruminis strain P167-B1a was made to DSMZ (Deutsche Sammlung von Mikroorganismen and Zellkulturen GmbH, Inhoffenstraβe 7B, 38124 Brunswick, Germany) under the Budapest Treaty on the International Recognition of the Deposit of Microorganisms for the Purposes of Patent Procedure on Mar. 6, 2020. This deposit was accorded accession number DSM 33536. The 16S rDNA sequence of Lactobacillus ruminis strain P167-B1a is provided as SEQ ID NO: 847.

[0069] Additional bacterial strains of the species Lactobacillus ruminis provided herein include Lactobacillus ruminis strains having a DNA-DNA hybridization (DDH) value of equal to or greater than about 70% with Lactobacillus ruminis strain P167-B1a. In particular embodiments, the Lactobacillus ruminis strain is one having greater than about 70%, about 75%, about 80%, about 85%, about 90%, about 95%, about 98%, or about 99% DNA-DNA hybridization with Lactobacillus ruminis strain P167-B1a, or any range between any of the above values. In particular embodiments, the Lactobacillus ruminis strain is one having a DDH or dDDH value of equal to or greater than about 70% with Lactobacillus ruminis strain P167-B1a. In some embodiments, the DDH or dDDH value is greater than about 75%, about 80%, about 85%, about 90%, about 95%, about 98%, or about 99% with Lactobacillus ruminis strain P167-B1a, or any range between any of the above values.

[0070] Additional bacterial strains of the species Lactobacillus ruminis provided herein include Lactobacillus ruminis strains having equal to or greater than 95% average nucleotide identity (ANI) with Lactobacillus ruminis strain P127-A10a. In some embodiments, the ANI is equal to or greater than about 95%, about 95.5%, about 96%, about 96.5%, about 97%, about 97.5%, about 98%, about 98.5%, about 99%, about 99.5%, or 100% with Lactobacillus ruminis strain P167-B1a, or any range between any of the above values.

[0071] Additional bacterial strains of the species Lactobacillus ruminis provided herein include Lactobacillus ruminis strains having equal to or greater than 60% alignment fraction (AF) with Lactobacillus ruminis strain P167-B1a. In some embodiments, the AF is equal to or greater than about 65%, about 70%, about 75%, about 80%, about 85%, about 90%, about 95%, or 100% with Lactobacillus ruminis strain P167-B1a, or any range between any of the above values. In some embodiments, the AF is computed by dividing the sum of the lengths of all BBH genes by the sum of the length of all the genes in Genome A. This computation is performed separately in both directions: from Genome A to genome B and from Genome B to Genome A.

[0072] In a particular embodiment, an Lactobacillus ruminis strain comprises a genome having equal to or greater than about 95% ANI and equal to or greater than 60% AF with the genome of Lactobacillus ruminis strain P167-B1a. In another particular embodiment, an Lactobacillus ruminis strain comprises a genome having equal to or greater than about 96.5% ANI and equal to or greater than 60% AF with the genome of Lactobacillus ruminis strain P167-B1a.

[0073] Those of skill in the art will recognize that the genus Lactobacillus may undergo taxonomical reorganization. Thus, it is intended that a contemplated Lactobacillus species include Lactobacillus species that have been renamed and/or reclassified, as well as those that may be later renamed and/or reclassified. For example, contemplated strains of Lactobacillus ruminis includes those reclassified as Ligilactobacillus ruminis (see e.g., Zheng et al., Int. J. Syst. Evol. Microbiol. 2020; 70:2782-2858).

[0074] In some embodiments, a bacterial strain mixture or composition comprising the Butyricimonas bacterial strain (e.g., a bacterial strain mixture or composition that increases, or is capable of increasing, infiltration of T cells into a tumor) may comprise Butyricimonas faecihominis and one or more non-Butyricimonas bacterial species. In some embodiments, the one or more non-Butyricimonas bacterial species includes a member of the genus Collinsella, for example, Collinsella ASMB P121-D5a. Collinsella ASMB P121-D5a is described in U.S. Provisional Application No. 62/955,957 filed Dec. 31, 2019 and U.S. Provisional Application No. 63/035,132 filed Jun. 5, 2020. A deposit of Collinsella ASMB strain P121-D5a was made to DSMZ (Deutsche Sammlung von Mikroorganismen and Zellkulturen GmbH, Inhoffenstraβe 7B, 38124 Brunswick, Germany) under the Budapest Treaty on the International Recognition of the Deposit of Microorganisms for the Purposes of Patent Procedure on Sep. 20, 2019. This deposit was accorded accession number DSM 33276.

[0075] In some embodiments, the one or more non-Butyricimonas bacterial species includes a member of the genus Alistipes, for example, Alistipes senegalensis. In a particular embodiment, the Alistipes senegalensis is Alistipes senegalensis strain P150-D12a. Alistipes senegalensis P150-D12a is described in U.S. Provisional Application No. 62/959,280 filed Jan. 10, 2020 and U.S. Provisional Application No. 63/035,135 filed Jun. 5, 2020. A deposit of Alistipes senegalensis strain P150-D12a was made to DSMZ (Deutsche Sammlung von Mikroorganismen and Zellkulturen GmbH, Inhoffenstraβe 7B, 38124 Brunswick, Germany) under the Budapest Treaty on the International Recognition of the Deposit of Microorganisms for the Purposes of Patent Procedure on Dec. 13, 2019. This deposit was accorded accession number DSM 33382.

[0076] In some embodiments, the one or more non-Butyricimonas bacterial species includes a member of the genus Lactobacillus, for example, Lactobacillus ruminis. In a particular embodiment, the Lactobacillus ruminis is Lactobacillus ruminis strain P167-B1a. A deposit of Lactobacillus ruminis strain P167-B1a was made to DSMZ (Deutsche Sammlung von Mikroorganismen and Zellkulturen GmbH, Inhoffenstraβe 7B, 38124 Brunswick, Germany) under the Budapest Treaty on the International Recognition of the Deposit of Microorganisms for the Purposes of Patent Procedure on Mar. 6, 2020. This deposit was accorded accession number DSM 33536.

[0077] In some embodiments, the one or more non-Butyricimonas bacterial species includes (i) a member of the genus Collinsella, for example, Collinsella ASMB P121-D5a; and/or (ii) a member of the genus Alistipes, for example, Alistipes senegalensis, for example, Alistipes senegalensis strain P150-D12a; and/or a member of the genus Lactobacillus, for example, Lactobacillus ruminis, for example, Lactobacillus ruminis strain P167-B1a. In some embodiments a bacterial strain mixture or composition comprising a Butyricimonas (e.g., Butyricimonas faecihominis) bacterial strain and optionally, one or more non-Butyricimonas bacterial species (e.g., a Collinsella, Alistipes or Lactobacillus bacterial strain) also comprises an immune checkpoint inhibitor. As used herein, an “immune checkpoint inhibitor” refers to a molecule, such as e.g., a small molecule, a soluble receptor, or an antibody, which targets an immune checkpoint and blocks the function of said immune checkpoint. More specifically, an “immune checkpoint inhibitor” as used herein is a molecule, such as e.g., a small molecule, a soluble receptor, or an antibody, that is capable of inhibiting or otherwise decreasing one or more of the biological activities of an immune checkpoint. In some embodiments, an inhibitor of an immune checkpoint protein (e.g., an antagonistic antibody) can, for example, act by inhibiting or otherwise decreasing the activation and/or cell signaling pathways of the cell expressing said immune checkpoint protein (e.g., a T cell), thereby inhibiting a biological activity of the cell relative to the biological activity in the absence of the antagonist. Example of immune checkpoint inhibitors include small molecule drugs, soluble receptors, and antibodies. The checkpoint inhibitor may, for example, be selected from a PD-1 antagonist, PD-L1 antagonist, CTLA-4 antagonist, adenosine A2A receptor antagonist, B7-H3 antagonist, B7-H4 antagonist, BTLA antagonist, KIR antagonist, LAG3 antagonist, TIM-3 antagonist, VISTA antagonist or TIGIT antagonist. In certain embodiments, the checkpoint inhibitor is a PD-1 or PD-L1 inhibitor. Exemplary PD-1/PD-L1 based immune checkpoint inhibitors include antibody-based therapeutics.

[0078] The present disclosure encompasses derivatives of the disclosed bacterial strains. The term “derivative” includes daughter strains (progeny) or stains cultured (sub-cloned) from the original but modified in some way (including at the genetic level), without negatively altering a biological activity of the strain.

### II. Compositions Comprising a Butyricimonas Strain

[0079] In another aspect, provided herein are compositions, for example pharmaceutical compositions, comprising a bacterial strain of Butyricimonas (e.g., Butyricimonas faecihominis). In some embodiments, the compositions comprise one or more bacterial strains, including one or more bacterial strains of Butyricimonas. In some embodiments, a composition provided herein comprises a bacterial strain of Butyricimonas faecihominis and does not comprise any other strains or species of bacteria. In other embodiments, the composition comprises a bacterial strain of Butyricimonas faecihominis and at least one or more additional strains or species of bacteria. In some embodiments, the at least one additional strain or species of bacteria in the composition is a bacterial strain of the genus Butyricimonas. For example, the composition may comprise an additional strain of Butyricimonas faecihominis and/or one or more strains of a Butyricimonas species that is not Butyricimonas faecihominis. Exemplary additional Butyricimonas species include Butyricimonas synergistica, Butyricimonas faecalis, Butyricimonas virosa and Butyricimonas paravirosa. In other embodiments, the composition may comprise Butyricimonas faecihominis and one or more non-Butyricimonas bacterial species. In some embodiments, the one or more non-Butyricimonas bacterial species includes Collinsella ASMB P121-D5a. In some embodiments, the one or more non-Butyricimonas bacterial species includes an Alistipes species, for example, Alistipes senegalensis. In a particular embodiment, the Alistipes senegalensis is Alistipes senegalensis strain P150-D12a. In some embodiments, the one or more non-Butyricimonas bacterial species includes (i) a member of the genus Collinsella, for example, Collinsella ASMB P121-D5a, and (ii) a member of the genus Alistipes, for example, Alistipes senegalensis, for example, Alistipes senegalensis strain P150-D12a. In yet other embodiments, the composition may comprise a Butyricimonas strain selected from Butyricimonas synergistica, Butyricimonas faecalis, Butyricimonas virosa and Butyricimonas paravirosa, and one or more non-Butyricimonas bacterial species.

[0080] A contemplated composition or bacterial strain mixture may, e.g., comprise or consist essentially of 2, 3, 4, 5, 6, 7, 8, 9, 10, or more than 10 bacterial strains. In some embodiments, one or more strains of the composition or bacterial strain mixture are vegetative. In some embodiments, all the strains of the composition or bacterial strain mixture are vegetative. For example, in certain embodiments, a disclosed composition or bacterial strain mixture comprises or consists essentially of 2 to 10, 2 to 9, 2 to 8, 2 to 7, 2 to 6, 2 to 5, 2 to 4, or 2 to 3 bacterial strains; or, for example, may comprise or consist essentially of 3 to 10, 3 to 9, 3 to 8, 3 to 7, 3 to 6, 3 to 5 or 3 to 4 bacterial strains; or, for example, may comprise or consist essentially of 4 to 10, 4 to 9, 4 to 8, 4 to 7, 4 to 6 or 4 to 5 bacterial strains; or, for example, may comprise or consist essentially of 5 to 10, 5 to 9, 5 to 8, 5 to 7, 5 to 6, 6 to 10, 6 to 9, 6 to 8, 6 to 7, 7 to 10, 7 to 9, or 7 to 8 bacterial strains; or, for example, may comprise or consist essentially of 8 to 10 or 8 to 9 bacterial strains. In some embodiments, a disclosed composition or bacterial strain mixture comprises or consists essentially of 2 or 3 bacterial strains.

[0081] A composition, e.g., a pharmaceutical unit provided herein, may include each bacterial strain at any appropriate ratio, measured either by total mass or by colony forming units of the bacteria. For example, a disclosed pharmaceutical composition or unit may include two strains at a ratio of 0.1:1, 0.2:1, 0.25:1, 0.5:1, 0.75:1, 1:1, 2:1, 3:1, 4:1, 5:1, or 10:1, either by total mass or by colony forming units of the bacteria. For example, a disclosed pharmaceutical composition or unit may include three strains at a ratio of 1:1:1, 1:1:2, 1:1:4, 1:2:1, 1:2:2, 1:2:4, 1:4:1, 1:4:2, 1:4:4, 2:1:1, 2:1:2, 2:1:4, 2:2:1, 2:4:1, 4:1:1, 4:1:2, 4:1:4, 4:2:1, 4:4:1, either by total mass or by colony forming units of the bacteria.

[0082] In certain embodiments, the composition comprises a bacterial strain of Butyricimonas faecihominis, and optionally, one or more additional strains or species of bacteria, wherein the composition: (i) increases production of one or more pro-inflammatory gene products, for example, IFN-γ, IL-1β, IL-6, IL-12p40, IL-12p70, IL-23, IL-27, TNF, and/or TRAIL, in a human cell, e.g., a THP-1 macrophage or monocyte or a PBMC.

[0083] Excipients

[0084] A bacterial strain of Butyricimonas disclosed herein may be combined with pharmaceutically acceptable excipients to form a pharmaceutical composition, which can be administered to a patient by any means known in the art. As used herein, the term “pharmaceutically acceptable excipient” is understood to mean one or more of a buffer, carrier, or excipient suitable for administration to a subject, for example, a human subject, without excessive toxicity, irritation, allergic response, or other problem or complication, commensurate with a reasonable benefit/risk ratio. The excipient (s) should be “acceptable” in the sense of being compatible with the other ingredients of the formulations and not deleterious to the recipient.

[0085] Pharmaceutically acceptable excipients include buffers, solvents, dispersion media, coatings, isotonic and absorption delaying agents, and the like, that are compatible with pharmaceutical administration. Pharmaceutically acceptable excipients also include fillers, binders, disintegrants, glidants, lubricants, and any combination(s) thereof. For example, a contemplated composition may comprise a pharmaceutical excipient selected from the group consisting of cellulose, polyvinyl pyrrolidone, silicon dioxide, stearyl fumarate or a pharmaceutically acceptable salt thereof, lactose, starch, glucose, methyl cellulose, ethyl cellulose, hydroxypropyl methyl cellulose, magnesium stearate, mannitol, sorbitol, and any combination(s) thereof. For further examples of excipients, carriers, stabilizers and adjuvants, see, e.g., Handbook of Pharmaceutical Excipients, 8^{th} Ed., Edited by P. J. Sheskey, W. G. Cook, and C. G. Cable, Pharmaceutical Press, London, UK [2017]. The use of such media and agents for pharmaceutically active substances is known in the art.

[0086] Stabilized Bacterial Compositions

[0087] In certain embodiments, bacterial strains of Butyricimonas described herein may be used in any composition in stabilized form, including, for example, in a lyophilized state (with optionally one or more appropriate cryoprotectants), frozen (e.g., in a standard or super-cooled freezer), spray dried, and/or freeze dried. Stabilized bacteria (e.g. via lyophilization, freezing, spray drying or freeze drying), and in particular, stabilized anaerobic bacteria may, in certain embodiments, possess advantageous properties over bacteria in culture with respect to administration, e.g., administration of a pharmaceutical composition provided herein. For example, lyophilizing bacterial strains involves a freeze-drying process that removes water from the bacterial cells. The resulting lyophilized bacterial strains may, in certain embodiments, have enhanced stability as compared to bacterial cultures, and thus may be stored for longer periods of time (i.e. extending shelf-life). In addition, in certain embodiments, in stabilized form, dehydrated bacterial cells do not grow or reproduce, but remain viable and may grow and reproduce when rehydrated. In certain embodiments, viability of stabilized anaerobic Butyricimonas bacteria is maintained even when exposed to oxygen, thus facilitating their formulation (for example, into oral dosage forms) and use as a live biotherapeutic product that retains biological activity. Thus, in particular embodiments, the bacterial strains of Butyricimonas described herein are stabilized (e.g. via lyophilization, freezing, freeze-drying or spray-drying), live and viable, and retain some, most, or all of its chemical stability, and/or biological activity upon storage. Stability can be measured at a selected temperature and humidity conditions for a selected time period. Trend analysis can be used to estimate an expected shelf life before a material has actually been in storage for that time period. For live bacteria, for example, stability may be measured as the time it takes to lose 1 log of cfu/g dry formulation under predefined conditions of temperature and/or humidity. Alternatively, stability may be measured as the time required to measure a decrease in a particular biological function per unit of dry formulation.

[0088] In certain embodiments, a pharmaceutical composition or pharmaceutical unit comprising Butyricimonas faecihominis loses at most 0.5 log cfus, 1 log cfus, 1.5 log cfus, 2 log cfus, 2.5 log cfus, 3 log cfus, 3.5 log cfus, 4 log cfus, 4.5 log cfus, 5 log cfus, 5.5 log cfus, 6 log cfus, 6.5 log cfus, 7 log cfus, 7.5 log cfus, 8 log cfus, 8.5 log cfus, 9 log cfus, 9,5 log cfus, or 10 log cfus (total, or per gram of dry formulation) of each bacterial strain present in the pharmaceutical composition or unit upon storage for 1 month, 2 months, 3 months, 4 months, 5 months, 6 months, 7 months, 8 months, 9 months, 10 months 11, months, 12 months, 1 year, 1.5 years, 2 years, 2.5 years, 3 years, 3.5 years, 4 years, 4.5 years, or 5 years at 4° C. or −20° C. For example, the pharmaceutical composition or pharmaceutical unit may lose at most 3 log cfus of each bacterial strain present in the pharmaceutical composition or unit upon storage for 6 months, 1 year, or 2 years at 4° C.

[0089] A Butyricimonas bacteria disclosed herein may be combined with one or more cryoprotectants. Exemplary cryoprotectants include fructoligosaccharides (e.g., Raftilose®, fructooligosaccharide derived from inulin), trehalose, maltodextrin, sodium alginate, proline, glutamic acid, glycine (e.g., glycine betaine), mono-, di-, or polysaccharides (such as glucose, sucrose, maltose, lactose), polyols (such as mannitol, sorbitol, or glycerol), dextran, DMSO, methylcellulose, propylene glycol, polyvinylpyrrolidone, non-ionic surfactants such as Tween 80, and/or any combinations thereof.

[0090] In certain embodiments, the cryoprotectant comprises Raftilose® (fructooligosaccharide derived from inulin), maltodextrin, alginate, trehalose, and sucrose, or any combinations thereof. In some embodiments, a pharmaceutical composition comprising a bacterial strain of Butyricimonas further comprises sucrose as a cryoprotectant. In some embodiments, a pharmaceutical composition comprising a bacterial strain of Butyricimonas further comprises Raftilose® (fructooligosaccharide derived from inulin), maltodextrin, alginate, trehalose, and sucrose as cryoprotectants. In some embodiments, a pharmaceutical composition comprising a bacterial strain of Butyricimonas further comprises Raftilose® (fructooligosaccharide derived from inulin), maltodextrin, alginate, and trehalose as cryoprotectants.

[0091] In some embodiments, a lyophilized powder form of a bacterial strain, as contemplated herein, includes about 10% to about 80% (by weight) of one or more bacterial strains (e.g., one bacterial strain) and about 20% to about 90% (by weight) of one or more cryoprotectants and/or excipients, such as one or more cryoprotectants and/or excipients selected from the group consisting of Raftilose® (fructooligosaccharide derived from inulin), maltodextrin, sodium alginate, trehalose, sucrose, water, and/or combinations thereof. For example, 5 mg of contemplated lyophilized powder form of a bacterial strain may include about 0.5 mg to about 1.5 mg of the bacterial strain, about 1.5 mg to about 2.5 mg of the bacterial strain, about 2.5 to about 3.5 mg of the bacterial strain, or about 3.5 mg to about 4.5 mg of the bacterial strain. It can be appreciated that each lyophilized powder form of bacterial strain that may form a component of a disclosed composition may each have different excipients and/or amounts of excipients, as well as a discrete bacterial strain.

[0092] A pharmaceutical composition should be formulated to be compatible with its intended route of administration. The bacterial compositions disclosed herein can be prepared by any suitable method and can be formulated into a variety of forms and administered by a number of different means. The compositions can be administered orally, rectally, or enterally, in formulations containing conventionally acceptable carriers, adjuvants, and vehicles as desired. As used herein, “rectal administration” is understood to include administration by enema, suppository, or colonoscopy. A disclosed pharmaceutical composition may, e.g., be suitable for bolus administration or bolus release. In an exemplary embodiment, a disclosed bacterial composition is administered orally.

[0093] Solid dosage forms for oral administration include capsules, tablets, caplets, pills, troches, lozenges, powders, and granules. A capsule typically comprises a core material comprising a bacterial composition and a shell wall that encapsulates the core material. In some embodiments the core material comprises at least one of a solid, a liquid, and an emulsion. In some embodiments the shell wall material comprises at least one of a soft gelatin, a hard gelatin, and a polymer. Suitable polymers include, but are not limited to: cellulosic polymers such as hydroxypropyl cellulose, hydroxyethyl cellulose, hydroxypropyl methyl cellulose (HPMC), methyl cellulose, ethyl cellulose, cellulose acetate, cellulose acetate phthalate, cellulose acetate trimellitate, hydroxypropylmethyl cellulose phthalate, hydroxypropylmethyl cellulose succinate and carboxymethylcellulose sodium; acrylic acid polymers and copolymers, such as those formed from acrylic acid, methacrylic acid, methyl acrylate, ammonio methylacrylate, ethyl acrylate, methyl methacrylate and/or ethyl methacrylate (e.g., those copolymers sold under the trade name “Eudragit®”); vinyl polymers and copolymers such as polyvinyl pyrrolidone, polyvinyl acetate, polyvinylacetate phthalate, vinylacetate crotonic acid copolymer, and ethylene-vinyl acetate copolymers; and shellac (purified lac). In some embodiments at least one polymer functions as a taste-masking agent.

[0094] Tablets, pills, and the like can be compressed, multiply compressed, multiply layered, and/or coated. A contemplated coating can be single or multiple. In one embodiment, a contemplated coating material comprises at least one of a saccharide, a polysaccharide, and glycoproteins extracted from at least one of a plant, a fungus, and a microbe. Non-limiting examples include corn starch, wheat starch, potato starch, tapioca starch, cellulose, hemicellulose, dextrans, maltodextrin, cyclodextrins, inulins, pectin, mannans, gum arabic, locust bean gum, mesquite gum, guar gum, gum karaya, gum ghatti, tragacanth gum, funori, carrageenans, agar, alginates, chitosans, or gellan gum. In some embodiments a contemplated coating material comprises a protein. In some embodiments a contemplated coating material comprises at least one of a fat and an oil. In some embodiments the at least one of a fat and an oil is high temperature melting. In some embodiments the at least one of a fat and an oil is hydrogenated or partially hydrogenated. In some embodiments the at least one of a fat and an oil is derived from a plant. In some embodiments the at least one of a fat and an oil comprises at least one of glycerides, free fatty acids, and fatty acid esters. In some embodiments a contemplated coating material comprises at least one edible wax. A contemplated edible wax can be derived from animals, insects, or plants. Non-limiting examples include beeswax, lanolin, bayberry wax, carnauba wax, and rice bran wax. Tablets and pills can additionally be prepared with enteric or reverse-enteric coatings.

[0095] Alternatively, powders or granules embodying a bacterial composition disclosed herein can be incorporated into a food product. In some embodiments a contemplated food product is a drink for oral administration. Non-limiting examples of a suitable drink include water, fruit juice, a fruit drink, an artificially flavored drink, an artificially sweetened drink, a carbonated beverage, a sports drink, a liquid diary product, a shake, an alcoholic beverage, a caffeinated beverage, infant formula and so forth. Other suitable means for oral administration include aqueous and nonaqueous solutions, emulsions, suspensions and solutions and/or suspensions reconstituted from non-effervescent granules, containing at least one of suitable solvents, preservatives, emulsifying agents, suspending agents, diluents, sweeteners, coloring agents, and flavoring agents.

[0096] In certain embodiments, a pharmaceutical composition provided herein includes: (a) a Butyricimonas strain; and (b) a filler (e.g., microcrystalline cellulose, lactose, sucrose, mannitol, or dicalcium phosphate dihydrate), a disintegrant (e.g., polyvinyl pyrrolidone, sodium starch glycolate, starch, or carboxymethyl-cellulose), a flow-aid/glidant (e.g., talc or silica derivatives (e.g., colloidal silica such as Cab-O-Sil or Aerosil)), and a lubricant (e.g., sodium stearyl fumarate, magnesium stearate, calcium stearate, stearic acid, stearic acid salt, talc, liquid paraffin, propylene glycol (PG), PEG 6000, or magnesium/sodium lauryl sulfate).

[0097] In certain embodiments, a contemplated pharmaceutical composition includes: (a) a Butyricimonas strain; and (b) a filler (microcrystalline cellulose), a disintegrant (polyvinyl pyrrolidone), a flow-aid/glidant (silicon dioxide), and a lubricant (sodium stearyl fumarate).

[0098] In certain embodiments, a contemplated pharmaceutical composition is formulated as a capsule. In certain embodiments, the capsule is a hydroxypropyl methylcellulose (HPMC) capsule. In certain embodiments, the capsule includes a banding polymer (e.g., hydroxypropyl methylcellulose (HPMC)), and a banding solvent (e.g., water or ethanol). In certain embodiments, the capsule includes two banding solvents, water and ethanol. In certain embodiments the capsule is coated with a reverse enteric coating polymer (e.g., amino methacrylate copolymer), and comprises a surfactant (e.g., sodium lauryl sulfate), a flow-aid/glidant (e.g., silicon dioxide), a lubricant (e.g., stearic acid), an anti-tacking agent (e.g., talc), and a coating solvent (e.g., water). In certain embodiments the capsule is coated with an enteric coating polymer (e.g., poly (methacrylic acid-co-methyl methacrylate)), and further includes a plasticizer (e.g., triethyl citrate), an anti-tacking agent (e.g., talc), a pH adjuster (e.g., ammonia solution), and a coating solvent (e.g., purified water and isopropyl alcohol).

[0099] In certain embodiments, a contemplated capsule is a capsule-in-capsule dosage form, which includes an inner capsule and an outer capsule. In certain embodiments, the inner capsule includes one or more lyophilized bacterial strains, a filler (e.g., microcrystalline cellulose, lactose, sucrose, mannitol, dicalcium phosphate dihydrate, or starch), a disintegrant (e.g., polyvinyl pyrrolidone, sodium starch glycolate, or carboxymethyl-cellulose), a flow-aid/glidant (e.g., silicon dioxide, talc, or colloidal silica), and a lubricant (e.g., sodium stearyl fumarate, magnesium stearate, calcium stearate, stearic acid, stearic acid salt, talc, liquid paraffin, propylene glycol (PG), PEG 6000, or magnesium/sodium lauryl sulfate). In certain embodiments, the outer capsule includes one or more lyophilized bacterial strains, a filler (e.g., microcrystalline cellulose, lactose, sucrose, mannitol, dicalcium phosphate dihydrate, or starch). a disintegrant (e.g., polyvinyl pyrrolidone, sodium starch glycolate, or carboxymethyl-cellulose), a flow-aid/glidant (e.g., silicon dioxide, talc, or colloidal silica), and a lubricant (e.g., sodium stearyl fumarate, magnesium stearate, calcium stearate, stearic acid, stearic acid salt, talc liquid paraffin, propylene glycol (PG), PEG 6000, or magnesium/sodium lauryl sulfate).

[0100] In certain embodiments, a contemplated capsule is a capsule-in-capsule dosage form, which includes an inner capsule and an outer capsule. In certain embodiments, the inner capsule includes one or more lyophilized bacterial strains, a filler (microcrystalline cellulose), a disintegrant (polyvinyl pyrrolidone), a flow-aid/glidant (silicon dioxide), and a lubricant (sodium stearyl fumarate). In certain embodiments, the outer capsule includes one or more lyophilized bacterial strains, a filler (microcrystalline cellulose), a disintegrant (polyvinyl pyrrolidone), a flow-aid/glidant (silicon dioxide), and a lubricant (sodium stearyl fumarate).

[0101] In certain embodiments, a disclosed pharmaceutical unit comprises a dual component capsule. For example, a dual component capsule may comprise an inner capsule, wherein the inner capsule has a reverse enteric polymeric coating, and an outer capsule encapsulating the inner capsule, wherein the outer capsule has an enteric polymeric coating. A contemplated inner and/or outer capsule may comprise a bacterial strain or a bacterial strain mixture. For example, a dual component capsule may comprise an inner capsule having an inner composition comprising a bacterial strain or bacterial strain mixture and one or more pharmaceutical excipients, wherein the inner capsule has a reverse enteric polymeric coating, and an outer capsule encapsulating the inner capsule and an outer composition comprising a bacterial strain or bacterial strain mixture and one or more pharmaceutical excipients, wherein the outer capsule has an enteric polymeric coating. A contemplated inner and/or outer composition may, e.g., comprise a Butyricimonas strain, and optionally one or more additional strains. The inner composition and the outer composition may be the same or different.

[0102] A contemplated dual component capsule may include a total of about 5 mg to about 60 mg of the inner and outer composition, e.g., a total of about 5 mg to about 50 mg of the inner and outer composition, a total of about 5 mg to about 15 mg of the inner and outer composition, a total of about 5 mg to about 25 mg of the inner and outer composition, or a total of about 25 mg to about 50 mg of the inner and outer composition. A contemplated dual component capsule may include a total of about 50 mg to about 120 mg of the inner and outer composition, e.g., a total of about 50 mg to about 75 mg of the inner and outer composition, a total of about 60 mg to about 85 mg of the inner and outer composition, a total of about 50 mg to about 95 mg of the inner and outer composition, or a total of about 25 mg to about 110 mg of the inner and outer composition.

[0103] In certain embodiments, a disclosed dual component capsule includes an inner capsule with a reverse enteric polymeric coating, and an outer capsule with an enteric polymeric coating. Each respective coating, for example, allows for biphasic release of the capsule's contents (including bacterial strains) at distinct sites along the gastrointestinal tract. For example, it has been determined that the GI tract has several regions sharply demarcated by local pH ranging from 1 to 8.2. The normal pH profile of the GI tract rises and falls between the stomach and the colon with pH ranges of 1-4 in the stomach, 5.5-6.4 in the duodenum, 6.8-8.2 in the ileum, and 5.5-6.5 in the colon. For example, while the distal ileum contains a region where the usual pH is between 6.8 and 8.2, the pH drops sharply from 8.2 to 5.5 after passage through the ileocecal valve into the cecum and ascending colon. The pH gradually rises once again to 8.0 in the progression from proximal to distal colon. Accordingly, in certain embodiments, the enteric polymeric coating of the outer capsule solubilizes in a pH of about 7 to 8, allowing for release in the ileum, and the reverse enteric polymeric coating of the inner capsule solubilizes in a pH of about 6.2 to 6.5, allowing for subsequent release in the colon. In certain embodiments, the outer capsule maintains integrity (e.g., absence of splits, cracks, or rupture of capsule shell) for about 2 hours at pH 1.2 and 37° C. In certain embodiments, the outer capsule maintains integrity (e.g., absence of splits, cracks, or rupture of capsule shell) for about 2 hours at pH 5.5 and 37° C. In certain embodiments, the outer capsule disintegrates within about 1 hour at pH 7.4 and 37° C. In certain embodiments, the inner capsule maintains integrity (e.g., absence of splits, cracks, or rupture of capsule shell) for up to 1 hour at pH 7.4 and 37° C. In certain embodiments, the inner capsule disintegrates within 2 hours at pH 6.5 and 37° C.

[0104] In certain embodiments, the inner and/or outer capsule coating is comprised of poly(dl-lactide-co-glycolide, chitosan (Chi) stabilized with PVA (poly-vinylic alcohol), a lipid, an alginate, carboxymethylethylcellulose (CMEC), cellulose acetate trimellitiate (CAT), hydroxypropylmethyl cellulose phthalate (HPMCP), hydroxypropylmethyl cellulose, ethyl cellulose, food glaze, mixtures of hydroxypropylmethyl cellulose and ethyl cellulose, polyvinyl acetate phthalate (PVAP), cellulose acetate phthalate (CAP), shellac, copolymers of methacrylic acid and ethyl acrylate, or copolymers of methacrylic acid and ethyl acrylate to which a monomer of methylacrylate has been added during polymerization. Methylmethacrylates or copolymers of methacrylic acid and methylmethacrylate are available as Eudragit® polymers (Evonik Industries, Darmstadt, Germany). For example, Eudragit® L100 and Eudragit® S100 (anionic copolymers based on methacrylic acid and methyl methacrylate) can be used, either alone or in combination. Eudragit® L100 dissolves at about pH 6 and upwards and comprises between 46.0% and 50.6% methacrylic acid units per g dry substance; Eudragit® S100 dissolves at about pH 7 and upwards and comprises between 27.6% and 30.7% methacrylic acid units per g dry substance. Another exemplary group of encapsulating polymers are the polyacrylic acids Eudragit® L and Eudragit® S which optionally may be combined with Eudragit® RL or RS (copolymers of ethyl acrylate, methyl methacrylate and a low content of methacrylic acid ester with quaternary ammonium groups). These modified acrylic acids are useful since they can be made soluble at a pH of 6 to 7.5, depending on the particular Eudragit chosen, and on the proportion of Eudragit® S to Eudragit® L, RS, and RL used in the formulation. In certain embodiments, a contemplated coating of the inner capsule is comprised of Eudragit EPO® ReadyMix. In certain embodiments, a contemplated coating of the outer capsule is comprised of Eudragit® L100 (methylacrylic acid-methyl methacrylate co-polymer (1:1)) and Eudragit® 5100 (methylacrylic acid-methyl methacrylate co-polymer (1:2)). In certain embodiments, a contemplated capsule is suitable for extended or timed release. In certain embodiments, a contemplated inner and/or outer capsule coating further comprises a band/seal, e.g., hypromellose, an opacifier, e.g., titanium dioxide, a plasticizer, e.g. triethyl citrate (TEC) or an anti-tacking agent, e.g. talc.

[0105] Further exemplary capsule-in-capsule formulations are described in U.S. Pat. No. 9,907,755.

[0106] Unit Dosage Forms

[0107] Pharmaceutical compositions comprising a Butyricimonas strain disclosed herein can be presented in a unit dosage form, i.e., a pharmaceutical unit. A composition, e.g., a pharmaceutical unit provided herein, may include any appropriate amount of one or more bacterial strains, measured either by total mass or by colony forming units of the bacteria.

[0108] For example, a disclosed pharmaceutical composition or unit may include from about 10³ cfus to about 10¹² cfus, about 10⁶ cfus to about 10¹² cfus, about 10⁷ cfus to about 10¹² cfus, about 10⁸ cfus to about 10¹² cfus, about 10⁹ cfus to about 10¹² cfus, about 10¹⁰ cfus to about 10¹² cfus, about 10¹¹ cfus to about 10¹² cfus, about 10³ cfus to about 10¹¹ cfus, about 10⁶ cfus to about 10¹¹ cfus, about 10⁷ cfus to about 10¹¹ cfus, about 10⁸ cfus to about 10¹¹ cfus, about 10⁹ cfus to about 10¹¹ cfus, about 10¹⁰ cfus to about 10¹¹ cfus, about 10³ cfus to about 10¹⁰ cfus, about 10⁶ cfus to about 10¹⁰ cfus, about 10⁷ cfus to about 10¹⁰ cfus, about 10⁸ cfus to about 10¹⁰ cfus, about 10⁹ cfus to about 10¹⁰ cfus, about 10³ cfus to about 10⁹ cfus, about 10⁶ cfus to about 10⁹ cfus, about 10⁷ cfus to about 10⁹ cfus, about 10⁸ cfus to about 10⁹ cfus, about 10³ cfus to about 10⁸ cfus, about 10⁶ cfus to about 10⁸ cfus, about 10⁷ cfus to about 10⁸ cfus, about 10³ cfus to about 10⁷ cfus, about 10⁶ cfus to about 10⁷ cfus, or about 10³ cfus to about 10⁶ cfus of each bacterial strain, or may include about 10³ cfus, about 10⁶ cfus, about 10⁷ cfus, about 10⁸ cfus, about 10⁹ cfus, about 10¹⁰ cfus, about 10¹¹ cfus, or about 10¹² cfus of a bacterial strain or of each bacterial strain in the composition.

[0109] For example, a disclosed pharmaceutical composition or unit may include from about 10³ cfus to about 10¹² cfus, about 10⁶ cfus to about 10¹² cfus, about 10⁷ cfus to about 10¹² cfus, about 10⁸ cfus to about 10¹² cfus, about 10⁹ cfus to about 10¹² cfus, about 10¹⁰ cfus to about 10¹² cfus, about 10¹¹ cfus to about 10¹² cfus, about 10³ cfus to about 10¹¹ cfus, about 10⁶ cfus to about 10¹¹ cfus, about 10⁷ cfus to about 10¹¹ cfus, about 10⁸ cfus to about 10¹¹ cfus, about 10⁹ cfus to about 10¹¹ cfus, about 10¹⁰ cfus to about 10¹¹ cfus, about 10³ cfus to about 10¹⁰ cfus, about 10⁶ cfus to about 10¹⁰ cfus, about 10⁷ cfus to about 10¹⁰ cfus, about 10⁸ cfus to about 10¹⁰ cfus, about 10⁹ cfus to about 10¹⁰ cfus, about 10³ cfus to about 10⁹ cfus, about 10⁶ cfus to about 10⁹ cfus, about 10⁷ cfus to about 10⁹ cfus, about 10⁸ cfus to about 10⁹ cfus, about 10³ cfus to about 10⁸ cfus, about 10⁶ cfus to about 10⁸ cfus, about 10⁷ cfus to about 10⁸ cfus, about 10³ cfus to about 10⁷ cfus, about 10⁶ cfus to about 10⁷ cfus, or about 10³ cfus to about 10⁶ cfus of each bacterial strain, or may include about 10³ cfus, about 10⁶ cfus, about 10⁷ cfus, about 10⁸ cfus, about 10⁹ cfus, about 10¹⁰ cfus, about 10¹¹ cfus, or about 10¹² cfus of a bacterial strain in the composition.

[0110] In certain embodiments, a provided pharmaceutical unit comprises at least 1×10³ colony forming units of each bacterial strain (e.g., vegetative bacterial strain), or, at least 1×10⁴ colony forming units of bacterial strain (e.g., vegetative bacterial strain), or, at least 1×10⁵ colony forming units of bacterial strain (e.g., vegetative bacterial strain), or, at least 1×10⁶ colony forming units of each bacterial strain (e.g., vegetative bacterial strain), or, at least 1×10⁷ colony forming units of each bacterial strain (e.g., vegetative bacterial strain), or, at least 1×10⁸ colony forming units of each bacterial strain (e.g., vegetative bacterial strain), or, at least 1×10⁹ colony forming units of each bacterial strain (e.g., vegetative bacterial strain).

[0111] For example, disclosed compositions (e.g., a pharmaceutical unit such as e.g., a capsule) can include about 1 mg to about 5 mg (e.g., 2 mg to about 4 mg) of a bacterial strain, which can each be present in the unit, e.g., within about 5 mg to about 50 mg of a lyophilized powder form of the bacterial strain. For example, a pharmaceutical unit may comprise a total of about 30 mg to about 70 mg, about 30 mg to about 60 mg, about 30 mg to about 50 mg, about 30 mg to about 40 mg, about 40 mg to about 70 mg, about 40 mg to about 60 mg, about 40 mg to about 50 mg, about 50 mg to about 70 mg, about 50 mg to about 60 mg, about 80 mg to about 100 mg, about 90 mg to about 110 mg, about 100 mg to about 120 mg, or about 110 mg to about 150 mg of lyophilized powder forms of the bacterial strain. In certain embodiments, the pharmaceutical unit comprises a total of about 30 mg, 40 mg, 50 mg, 60 mg, 70 mg, 100 mg, 120 mg, 130 mg, 140 mg, or 150 mg of lyophilized powder form of the bacterial strain.

[0112] In certain embodiments, a disclosed composition such as a disclosed pharmaceutical unit may include about 5 to about 50 mg of each lyophilized powder form of a bacterial strain, for example, about 5 to about 45 mg, about 5 to about 40 mg, about 5 to about 35 mg, about 5 to about 30 mg, about 5 to about 25 mg, about 5 to about 15 mg, about 5 to about 10 mg, about 10 to about 50 mg, about 10 to about 35 mg of each lyophilized powder form of a bacterial strain (e.g., a vegetative bacterial strain), about 10 to about 20 mg, about 10 to about 15 mg, or about 15 to about 45 mg of each lyophilized powder form of a bacterial strain (e.g., a vegetative bacterial strain). In certain embodiments, a disclosed pharmaceutical unit comprises about 5, about 10, about 15, about 20, about 25, or about 30 mg of each lyophilized powder form of a bacterial strain (e.g., a vegetative bacterial strain). In certain embodiments, a disclosed pharmaceutical unit includes about 25 to about 50 mg of a lyophilized powder form of one bacterial strain (e.g., vegetative bacterial strain) and about 5 mg to about 10 mg of the remaining lyophilized powder forms of bacterial strains (e.g., vegetative bacterial strains), or about 5 to about 15 mg of one lyophilized powder form of bacterial strain (e.g., vegetative bacterial strain) and about 5 to 10 mg of the remaining lyophilized powder forms of bacterial strains (e.g., vegetative bacterial strains), for example, about 15 mg of one lyophilized powder form of bacterial strain (e.g., vegetative bacterial strain) and about 5 mg of the remaining lyophilized powder forms of bacterial strains (e.g., vegetative bacterial strains), or about 15 mg to about 25 mg of each of two lyophilized powder forms of bacterial strains (e.g., vegetative bacterial strains) and about 5 mg to 10 mg of the remaining lyophilized powder forms of bacterial strains (e.g., vegetative bacterial strains).

[0113] In certain embodiments a pharmaceutical composition or unit may include, or may be administered in combination with a prebiotic, i.e., a compound or composition which modifies the growth, maintenance, activity and/or balance of the intestinal micro flora (e.g., can allow for specific changes in the composition and/or activity of the microbiome). Exemplary prebiotics include complex carbohydrates, complex sugars, resistant dextrins, resistant starch, amino acids, peptides, nutritional compounds, biotin, polydextrose, fructooligosaccharide (FOS), galactooligosaccharides (GOS), inulin, lignin, psyllium, chitin, chitosan, chitosanoligosaccharides, lacitol, gums (e.g., guar gum), high amylose cornstarch (HAS), cellulose, β-glucans, hemi-celluloses, lactulose, mannooligosaccharides, mannan oligosaccharides (MOS), oligofructose-enriched inulin, oligofructose, oligodextrose, tagatose, trans-galactooligosaccharide, pectin, resistant starch, isomaltoligosaccharides, and xylooligosaccharides (XOS). Prebiotics can be found in foods (e.g., acacia gum, guar seeds, brown rice, rice bran, barley hulls, chicory root, Jerusalem artichoke, dandelion greens, garlic, leek, onion, asparagus, wheat bran, oat bran, baked beans, whole wheat flour, and banana), and breast milk. Prebiotics can also be administered in other forms (e.g., a capsule or dietary supplement).

### III. Therapeutic Uses

[0114] Compositions and methods disclosed herein can be used to treat various forms of inflammatory disorders, gastrointestinal disorders, and/or dysbiosis in a subject. The disclosure provides a method of treating a gastrointestinal disorder, inflammatory disorder, and/or dysbiosis in a subject. A contemplated method comprises administering to the subject an effective amount of a pharmaceutical composition and/or pharmaceutical unit comprising a Butyricimonas bacterial strain disclosed herein (and optionally one or more additional bacterial strains), either alone or in a combination with another therapeutic agent to treat the gastrointestinal disorder, inflammatory disorder, and/or dysbiosis in the subject.

[0115] As used herein, “treat”, “treating” and “treatment” mean the treatment of a disease in a subject, e.g., in a human. This includes: (a) inhibiting the disease, i.e., arresting its development; and (b) relieving the disease, i.e., causing regression of the disease state. As used herein, the terms “subject” and “patient” refer to an organism to be treated by the methods and compositions described herein. Such organisms preferably include, but are not limited to, mammals, e.g., human, a companion animal (e.g., dog, cat, or rabbit), or a livestock animal (for example, cow, sheep, pig, goat, horse, donkey, and mule, buffalo, oxen, or camel)).

[0116] It will be appreciated that the exact dosage of a pharmaceutical unit, pharmaceutical composition, or bacterial strain is chosen by an individual physician in view of the patient to be treated, in general, dosage and administration are adjusted to provide an effective amount of the bacterial agent to the patient being treated. As used herein, the “effective amount” refers to the amount necessary to elicit a beneficial or desired biological response. An effective amount can be administered in one or more administrations, applications or dosages and is not intended to be limited to a particular formulation or administration route. As will be appreciated by those of ordinary skill in this art, the effective amount of a pharmaceutical unit, pharmaceutical composition, or bacterial strain may vary depending on such factors as the desired biological endpoint, the drug to be delivered, the target tissue, the route of administration, etc. Additional factors which may be taken into account include the severity of the disease state; age, weight and gender of the patient being treated; diet, time and frequency of administration; drug combinations; reaction sensitivities; and tolerance/response to therapy.

[0117] It is understood that a disclosed bacterial strain, bacterial strain mixture, or composition may not require colonization of the gut, e.g., an intestine, of the subject and/or persistence in the subject in order elicit a beneficial or desired biological response. For example, in certain embodiments, a bacterial strain, bacterial strain mixture, or composition colonizes or partially colonizes the gut of the subject and/or persists in the subject after administration. In certain embodiments, a bacterial strain, bacterial strain mixture, or composition does not colonize the gut of the subject and/or persist in the subject after administration.

[0118] Compositions and methods disclosed herein can also be used to treat cancer in a subject. A contemplated method comprises administering to the subject an effective amount of a pharmaceutical composition and/or pharmaceutical unit comprising a Butyricimonas bacterial strain disclosed herein (and optionally one or more additional bacterial strains), either alone or in a combination with another therapeutic agent to treat the cancer in the subject. Examples of cancers include solid tumors, soft tissue tumors, hematopoietic tumors and metastatic lesions. Examples of hematopoietic tumors include, leukemia, acute leukemia, acute lymphoblastic leukemia (ALL), B-cell, T-cell or FAB ALL, acute myeloid leukemia (AML), chronic myelocytic leukemia (CML), chronic lymphocytic leukemia (CLL), e.g., transformed CLL, diffuse large B-cell lymphomas (DLBCL), follicular lymphoma, hairy cell leukemia, myelodyplastic syndrome (MDS), a lymphoma, Hodgkin's disease, a malignant lymphoma, non-Hodgkin's lymphoma, Burkitt's lymphoma, multiple myeloma, or Richter's Syndrome (Richter's Transformation). Examples of solid tumors include malignancies, e.g., sarcomas, adenocarcinomas, and carcinomas, of the various organ systems, such as those affecting head and neck (including pharynx), thyroid, lung (small cell or non-small cell lung carcinoma (NSCLC)), breast, lymphoid, gastrointestinal (e.g., oral, esophageal, stomach, liver, pancreas, small intestine, colon and rectum, anal canal), genitals and genitourinary tract (e.g., renal, urothelial, bladder, ovarian, uterine, cervical, endometrial, prostate, testicular), CNS (e.g., neural or glial cells, e.g., neuroblastoma or glioma), or skin (e.g., melanoma). In certain embodiments, the cancer is colorectal cancer (CRC).

[0119] In other embodiments, the compositions and methods disclosed herein may also be useful for preventing one or more of the above diseases or conditions, when administered as vaccine compositions. In certain such embodiments, the bacterial strains provided herein are viable. In certain such embodiments, the bacterial strains are capable of at least partially or totally colonizing the gastrointestinal tract, e.g., the intestine. In certain such embodiments, the bacterial strains of the invention are viable and capable of at least partially or totally colonizing the gastrointestinal tract, e.g., the intestine. In other certain such embodiments, the bacterial strains of the invention may be killed, inactivated or attenuated. In certain such embodiments, the compositions may comprise a vaccine adjuvant. In certain embodiments, the compositions are for administration via injection, such as via subcutaneous injection.

### IV. Combination Therapy

[0120] The methods and compositions described herein can be used alone or in combination with other therapeutic agents and/or modalities. The term administered “in combination,” as used herein, is understood to mean that two (or more) different treatments are delivered to the subject during the course of the subject's affliction with the disorder, such that the effects of the treatments on the patient overlap at a point in time. In certain embodiments, the delivery of one treatment is still occurring when the delivery of the second begins, so that there is overlap in terms of administration. This is sometimes referred to herein as “simultaneous” or “concurrent delivery.” In other embodiments, the delivery of one treatment ends before the delivery of the other treatment begins. In certain embodiments of either case, the treatment is more effective because of combined administration. For example, the second treatment is more effective, e.g., an equivalent effect is seen with less of the second treatment, or the second treatment reduces symptoms to a greater extent, than would be seen if the second treatment were administered in the absence of the first treatment, or the analogous situation is seen with the first treatment. In certain embodiments, delivery is such that the reduction in a symptom, or other parameter related to the disorder is greater than what would be observed with one treatment delivered in the absence of the other. The effect of the two treatments can be partially additive, wholly additive, or greater than additive. The delivery can be such that an effect of the first treatment delivered is still detectable when the second is delivered. In certain embodiments, a side effect of a first and/or second treatment is reduced because of combined administration.

[0121] In certain embodiments, a pharmaceutical composition or unit may include, or be administered in combination with, chemotherapy, e.g., a cytotoxic agent. Exemplary cytotoxic agents include, for example, antimicrotubule agents, topoisomerase inhibitors, antimetabolites, protein synthesis and degradation inhibitors, mitotic inhibitors, alkylating agents, platinating agents, inhibitors of nucleic acid synthesis, histone deacetylase inhibitors (HDAC inhibitors, e.g., vorinostat (SAHA, MK0683), entinostat (MS-275), panobinostat (LBH589), trichostatin A (TSA), mocetinostat (MGCD0103), belinostat (PXD101), romidepsin (FK228, depsipeptide)), DNA methyltransferase inhibitors, nitrogen mustards, nitrosoureas, ethylenimines, alkyl sulfonates, triazenes, folate analogs, nucleoside analogs, ribonucleotide reductase inhibitors, vinca alkaloids, taxanes, epothilones, intercalating agents, agents capable of interfering with a signal transduction pathway, agents that promote apoptosis and radiation, or antibody molecule conjugates that bind surface proteins to deliver a toxic agent. In certain embodiments, the cytotoxic agent is a platinum-based agent (such as cisplatin), cyclophosphamide, dacarbazine, methotrexate, fluorouracil, gemcitabine, capecitabine, hydroxyurea, topotecan, irinotecan, azacytidine, vorinostat, ixabepilone, bortezomib, taxanes (e.g., paclitaxel or docetaxel), cytochalasin B, gramicidin D, ethidium bromide, emetine, mitomycin, etoposide, tenoposide, vincristine, vinblastine, vinorelbine, colchicin, anthracyclines (e.g., doxorubicin or epirubicin) daunorubicin, dihydroxy anthracin dione, mitoxantrone, mithramycin, actinomycin D, adriamycin, 1-dehydrotestosterone, glucocorticoids, procaine, tetracaine, lidocaine, propranolol, puromycin, ricin, or maytansinoids.

[0122] In certain embodiments, a pharmaceutical composition or unit may include, or be administered in combination with, a targeted therapy, e.g. a tyrosine kinase inhibitor, a proteasome inhibitor, or a protease inhibitor. In certain embodiments, a pharmaceutical composition or unit may include, or be administered in combination with, an anti-inflammatory, anti-angiogenic, anti-fibrotic, or anti-proliferative compound, e.g., a steroid, a biologic immunomodulator, a monoclonal antibody, an antibody fragment, an aptamer, an siRNA, an antisense molecule, a fusion protein, a cytokine, a cytokine receptor, a bronchodialator, a statin, an anti-inflammatory agent (e.g. methotrexate), or an NSAID. In certain embodiments, a pharmaceutical composition or unit may be administered in combination with surgery or radiation therapy.

[0123] In certain embodiments, a pharmaceutical composition or unit may include, or be administered in combination with, a checkpoint inhibitor. The checkpoint inhibitor may, for example, be selected from a PD-1 antagonist, PD-L1 antagonist, CTLA-4 antagonist, adenosine A2A receptor antagonist, B7-H3 antagonist, B7-H4 antagonist, BTLA antagonist, KIR antagonist, LAG3 antagonist, TIM-3 antagonist, VISTA antagonist or TIGIT antagonist.

[0124] In certain embodiments, the checkpoint inhibitor is a PD-1 or PD-L1 inhibitor. Exemplary PD-1/PD-L1 based immune checkpoint inhibitors include antibody based therapeutics. Exemplary treatment methods that employ PD-1/PD-L1 based immune checkpoint inhibition are described in U.S. Pat. Nos. 8,728,474 and 9,073,994, and EP Patent No. 1537878B1, and, for example, include the use of anti-PD-1 antibodies. Exemplary anti-PD-1 antibodies are described, for example, in U.S. Pat. Nos. 8,952,136, 8,779,105, 8,008,449, 8,741,295, 9,205,148, 9,181,342, 9,102,728, 9,102,727, 8,952,136, 8,927,697, 8,900,587, 8,735,553, and 7,488,802. Exemplary anti-PD-1 antibodies include nivolumab (OPDIVO®, Bristol-Myers Squibb), pembrolizumab (KEYTRUDA®, Merck), cemiplimab (LIBTAYO®, Regeneron/Sanofi), spartalizumab (PDR001), MEDI0680 (AMP-514), and pidilizumab (CT-011). Exemplary anti-PD-L1 antibodies are described, for example, in U.S. Pat. Nos. 9,273,135, 7,943,743, 9,175,082, 8,741,295, 8,552,154, and 8,217,149. Exemplary anti-PD-L1 antibodies include avelumab (BAVENCIO®, EMD Serono/Pfizer), atezolizumab (TECENTRIQ®, Genentech), durvalumab (IMFINZI®, Medimmune/AstraZeneca), and BMS 936559 (Bristol Myers Squibb Co.).

[0125] In certain embodiments, the checkpoint inhibitor is a CTLA-4 inhibitor. Exemplary CTLA-4 based immune checkpoint inhibition methods are described in U.S. Pat. Nos. 5,811,097, 5,855,887, 6,051,227. Exemplary anti-CTLA-4 antibodies are described in U.S. Pat. Nos. 6,984,720, 6,682,736, 7,311,910; 7,307,064, 7,109,003, 7,132,281, 6,207,156, 7,807,797, 7,824,679, 8,143,379, 8,263,073, 8,318,916, 8,017,114, 8,784,815, and 8,883,984, International (PCT) Publication Nos. WO98/42752, WO00/37504, and WO01/14424, and European Patent No. EP 1212422 B1. Exemplary CTLA-4 antibodies include ipilimumab or tremelimumab.

[0126] In certain embodiments, a pharmaceutical composition or unit may include, or be administered in combination with, an anti-bacterial agent, e.g., an antibiotic. A disclosed method may comprise pretreatment with an antibiotic, e.g., administration of an antibiotic to a subject prior to administration of a disclosed pharmaceutical composition or unit. Exemplary antibiotics for use in combination therapy include vancomycin, metronidazole, gentamicin, colistin, fidaxomicin, telavancin, oritavancin, dalbavancin, daptomycin, cephalexin, cefuroxime, cefadroxil, cefazolin, cephalothin, cefaclor, cefamandole, cefoxitin, cefprozil, ceftobiprole, cipro, Levaquin, floxin, tequin, avelox, norflox, tetracycline, minocycline, oxytetracycline, doxycycline, amoxicillin, ampicillin, penicillin V, dicloxacillin, carbenicillin, methicillin, ertapenem, doripenem, imipenem/cilastatin, meropenem, amikacin, kanamycin, neomycin, netilmicin, tobramycin, paromomycin, cefixime, cefdinir, cefditoren, cefoperazone, cefotaxime, ceftazidime, ceftibuten, ceftizoxime, ceftriaxone, cefoxotin, and/or streptomycin.

[0127] In certain embodiments, a pharmaceutical composition or unit may include, or be administered in combination with, an anti-fungal or anti-viral agents. Exemplary anti-viral agents include abacavir, acyclovir, adefovir, amprenavir, atazanavir, cidofovir, darunavir, delavirdine, didanosine, docosanol, efavirenz, elvitegravir, emtricitabine, enfuvirtide, etravirine, famciclovir, foscarnet, fomivirsen, ganciclovir, indinavir, idoxuridine, lamivudine, lopinavir, maraviroc, MK-2048, nelfinavir, nevirapine, penciclovir, raltegravir, rilpivirine, ritonavir, saquinavir, stavudine, tenofovir trifluridine, valaciclovir, valganciclovir, vidarabine, ibacitabine, amantadine, oseltamivir, rimantidine, tipranavir, zalcitabine, zanamivir and zidovudine. Exemplary anti-fungal agents include natamycin, rimocidin, filipin, nystatin, amphotericin B, candicin, and hamycin, miconazole, ketoconazole, clotrimazole, econazole, omoconazole, bifonazole, butoconazole, fenticonazole, isoconazole, oxiconazole, sertaconazole, sulconazole, tioconazole, fluconazole, itraconazole, isavuconazole, ravuconazole, posaconazole, voriconazole, terconazole, and albaconazole, abafungin, terbinafine, naftifine, butenafine, anidulafungin, caspofungin, micafungin, polygodial, benzoic acid, ciclopirox, tolnaftate, undecylenic acid, flucytosine or 5-fluorocytosine, griseofulvin, and haloprogin.

[0128] In certain embodiments, a pharmaceutical composition or unit may include, or be administered in combination with, at least one or more additional strains or species of bacteria. In some embodiments, the at least one additional strain or species of bacteria in the composition is a bacterial strain of the genus Butyricimonas. For example, a pharmaceutical composition or unit may include, or be administered in combination with, an additional strain of Butyricimonas faecihominis and/or one or more strains of a Butyricimonas species that is not Butyricimonas faecihominis. Exemplary additional Butyricimonas species include Butyricimonas synergistica, Butyricimonas faecalis, Butyricimonas virosa and Butyricimonas paravirosa. In other embodiments, a pharmaceutical composition or unit may include, or be administered in combination with, one or more non-Butyricimonas bacterial species. In some embodiments, the one or more non-Butyricimonas bacterial species includes Collinsella ASMB P121-D5a. In some embodiments, the one or more non-Butyricimonas bacterial species includes an Alistipes species, for example, Alistipes senegalensis. In a particular embodiment, the Alistipes senegalensis is Alistipes senegalensis strain P150-D12a. In some embodiments, the one or more non-Butyricimonas bacterial species includes (i) a member of the genus Collinsella, for example, Collinsella ASMB P121-D5a, and (ii) a member of the genus Alistipes, for example, Alistipes senegalensis, for example, Alistipes senegalensis strain P150-D12a. In yet other embodiments, a pharmaceutical composition or unit may include, or be administered in combination with, a Butyricimonas strain selected from Butyricimonas synergistica, Butyricimonas faecalis, Butyricimonas virosa and Butyricimonas paravirosa, and one or more non-Butyricimonas bacterial species.

[0129] Throughout the description, where compositions are described as having, including, or comprising specific components, or where processes and methods are described as having, including, or comprising specific steps, it is contemplated that, additionally, there are compositions of the present disclosure that consist essentially of, or consist of, the recited components, and that there are processes and methods according to the present disclosure that consist essentially of, or consist of, the recited processing steps.

[0130] In the application, where an element or component is said to be included in and/or selected from a list of recited elements or components, it should be understood that the element or component can be any one of the recited elements or components, or the element or component can be selected from a group consisting of two or more of the recited elements or components.

[0131] Further, it should be understood that elements and/or features of a composition or a method described herein can be combined in a variety of ways without departing from the spirit and scope of the present disclosure, whether explicit or implicit herein. For example, where reference is made to a particular compound, that compound can be used in various embodiments of compositions of the present disclosure and/or in methods of the present disclosure, unless otherwise understood from the context. In other words, within this application, embodiments have been described and depicted in a way that enables a clear and concise application to be written and drawn, but it is intended and will be appreciated that embodiments may be variously combined or separated without parting from the present teachings and disclosure. For example, it will be appreciated that all features described and depicted herein can be applicable to all aspects of the disclosure described and depicted herein.

[0132] It should be understood that the expression “at least one of” includes individually each of the recited objects after the expression and the various combinations of two or more of the recited objects unless otherwise understood from the context and use. The expression “and/or” in connection with three or more recited objects should be understood to have the same meaning unless otherwise understood from the context.

[0133] The use of the term “include,” “includes,” “including,” “have,” “has,” “having,” “contain,” “contains,” or “containing,” including grammatical equivalents thereof, should be understood generally as open-ended and non-limiting, for example, not excluding additional unrecited elements or steps, unless otherwise specifically stated or understood from the context.

[0134] Where the use of the term “about” is before a quantitative value, the present disclosure also includes the specific quantitative value itself, unless specifically stated otherwise. As used herein, the term “about” refers to a ±10% variation from the nominal value unless otherwise indicated or inferred.

[0135] It should be understood that the order of steps or order for performing certain actions is immaterial so long as the present disclosure remains operable. Moreover, two or more steps or actions may be conducted simultaneously.

[0136] The use of any and all examples, or exemplary language herein, for example, “such as” or “including,” is intended merely to illustrate better the present disclosure and does not pose a limitation on the scope of the disclosure unless claimed. No language in the specification should be construed as indicating any non-claimed element as essential to the practice of the present disclosure.

### EXAMPLES

[0137] The following Examples are merely illustrative and are not intended to limit the scope or content of the disclosure in any way.

### Example 1—Isolation and Purification of Butyricimonas faecihominis

[0138] 1.1 Source. Isolate P40-F2a was isolated from the stool sample of a healthy human donor. The donor underwent comprehensive clinical and laboratory testing to confirm healthy status including screening for infectious agents to minimize risk of transmissible infection. Serology screening included HIV-1/HIV-2 (IgG and EIA), HTLV-I and HTLV-II (Ab), Hepatitis A virus (IgM), Hepatitis B virus (HBSAg, anti-HBc IgG and IgM), Hepatitis C virus (anti-HCV IgG), Treponema pallidum (EIA, or RPR if EIA is positive), Strongyloides stercoralis Ab, CMV Viral Load, and EBV Viral Load. Stool screening included Clostridium difficile toxin A/B (PCR), routine bacterial culture for enteric pathogens (with enrichment) including H. pylori EIA, Salmonella, Shigella, Yersinia, Campylobacter, and Vibrio, E. coli 0157 (perform E. coli 0157 culture, if stx1/2 EIA +ve), Shiga-like toxins stx1/2 (Shigella) EIA, Culture-based assays for vancomycin-resistant Enterococcus (VRE), extended spectrum beta-lactamase (ESBL) producers, carbapenem-resistant Enterobacteriaceae (CRE), and methicillin-resistant Staphylococcus aureus (MRSA), Giardia antigen (EIA), Cryptosporidium antigen (EIA), Cyclospora, Isospora, and Microsporidia (Microscopic observation with acid fast stain), Ova and Parasites (Microscopic observation), Rotavirus (EIA), Norovirus GI/GII (RT-PCR), and Adenovirus 40,41 EIA.

[0139] 1.2 Isolation and Purification. Dilutions of donor samples were plated on isolation media at 37° C. Colonies were picked from isolation media agar plates (YCFAC, BHI supplemented with Vitamin K and Hemin) into a 96-well microtiter plate containing 200 μl of BHI+Hemin+Vitamin K. Once growth was observed visually in the 96-well microtiter plate, 20 μl of culture from each well of the 96-well microtiter plate was transferred into a 96-well Deep-Well plate containing 1 ml isolation media, followed by incubation at 37° C. After visually detecting growth, 1 ml of 50% glycerol was added to each well, and 600 μl of the mix was transferred into a Thermo Fisher Matrix tube plate. Individual cultures were subsequently plated on isolation media for conformation of colony morphology uniformity. Individual colonies were picked for identification by 16S sequencing and replated on YCFAC.

### Example 2—Taxonomic Characterization of Isolate P40-F2a

[0140] 2.1 16S Sequencing and Phylogenetic Analysis.

[0141] A taxonomic characterization of purified isolate P40-F2a was performed using full length 16S rRNA gene sequencing data. Homology searches were performed against existing publicly available strains present in the National Center for Biotechnology Information (NCBI) taxonomy database.

[0142] 2.1.1 16S rRNA gene sequencing. 50 μl of a liquid culture of isolate P40-F2a was denatured at 95° C. for 10 minutes. The denatured sample was utilized as a template to PCR amplify the 16S gene by using 16S rRNA primers 27F and 1492R. Sanger sequencing was performed (Elim Biopharm, Hayward, Calif.) using a set of 4 primers (27F, 1492R, 515F and 907R) to recover a near full length 16S rRNA gene fragment (SEQ ID NO: 846). The four amplicons were assembled into a single contiguous sequence using DNAbaser (Heracle BioSoft S. R. L., Arges, Romania) which was then searched against the NCBI database using BLASTn.

[0143] 2.1.2 Phylogenetic analysis. A search with SEQ ID NO: 846 against the 16S rRNA gene database on NCBI yielded a closest match of 99.2% over 100% of the sequence length of 1415 bps (SEQ ID NO: 846). This match was from the species Butyricimonas faecihominis strain 180-3 (accession no. NR 126194.1). The next closest match over the entire length was of 97.39% identity from the species Butyricimonas paravirosa strain 214-4 (accession no. NR 126195.1).

[0144] A summary of the taxonomic identification results is provided in Table 1.

TABLE 1
Taxonomic Identification Result Summary

| | Isolate 16S sequence | Percent |
|---|---|---|
| Database match | coverage | Identity |
| Butyricimonas faecihominis strain 180-3 | 100% | 99.22% |
| Butyricimonas paravirosa strain 214-4 | 100% | 97.39% |
| Butyricimonas virosa strain MT12 | 100% | 96.79% |
| Butyricimonas synergistica strain MT01 | 100% | 94.07% |

[0145] 2.2 Whole Genome Sequencing and Analysis.

[0146] 2.2.1 Sequencing. DNA extraction, sequencing, quality filtering, assembly and annotation was performed by Corebiome, Inc. (Minneapolis, Minn.). DNA was extracted from isolate P40-F2a with MO Bio PowerFecal (Qiagen) automated for high throughput on QiaCube (Qiagen), with bead beating in 0.1 mm glass bead plates. Samples were quantified with Qiant-iT Picogreen dsDNA Assay (Invitrogen). Libraries were prepared with a proprietary procedure adapted for the Nextera Library Prep kit (Illumina) and sequenced on an Illumina NextSeq using single-end 1×150 reads with a NextSeq 500/550 High Output v2 kit (Illumina). DNA sequences were filtered for low quality (Q-Score <20) and length (<50), and adapter sequences were trimmed using cutadapt v.1.15 (Martin, EMBnet Journal, [Si], v. 17, n. 1, p. pp. 10-12, (2011)).

[0147] 2.2.2 Assembly and Annotation. Sequences were assembled using SPAdes v3.11.0 (Bankevich et al., J Comput Biol. 19(5):455-477 (2012)). Protein annotation was performed with Prokka v 1.12 (Seemann, Bioinformatics 30(14):2068-2069 (2014)) on contigs over 1,000 bases in length.

[0148] 2.2.3 Quality Assessment. Sequencing quality was determined by inspecting quality scores generated by FASTQC, with bases of low quality indicated by scores less than 20. Assembly quality metrics were generated by QUAST v.4.5 (Gurevich et al., Bioinformatics 29(8):1072-1075 (2013)).

[0149] 2.2.4 Taxonomy. Taxonomic identities were made using appropriate score cut-offs on average nucleotide identity and alignment fraction scores.

[0150] 2.2.5 Genome Characteristics. Intrinsic properties of the isolate P40-F2a genome assembly are summarized in Table 2 below.

TABLE 2
Characteristics of P40-F2a PI assemblies.

| | |
|---|---|
| Genome Size (Mb) | 4.85 |
| Contigs | 845 |
| G + C Content | 43.47% |
| # CDS | 3904 |
| # tRNA | 49 |

PI = primary isolate;
Mb = megabase pairs;
CDS = coding sequence,
tRNA = transfer ribonucleic acid

[0151] 2.2.6 Genome wide similarity across P40-F2a and other members of Butyricimonas. The PI genome was compared against other strains of Butyricimonas faecihominis to measure the extent of genomic similarity, in particular, average nucleotide identity (ANI). The results, determined using FastANI (Jain et al., Nat Commun. 9(1):5114 (2018), are summarized in Table 3 below.

TABLE 3
Average Nucleotide Identity (ANI) of P40-F2a compared
to other strains of Butyricimonas faecihominis.

| Isolate | | ANI | ANI |
|---|---|---|---|
| ID (S) | Reference Species (R) | S → R | R → S |
| P40-F2a | Butyricimonas faecihominis strain CCUG | 99.89 | 99.51 |
| | 65562 (RefSeq assembly accession: | | |
| | GCF_008830385.1) | | |
| P40-F2a | Butyricimonas faecihominis strain 30A1 | 99.58 | 99.40 |
| | (RefSeq assembly accession: | | |
| | GCF_003851945.2) | | |

[0152] 2.2.7 Physiological and Metabolic Characteristics of P40-F2a

[0153] P40-F2a cells are obligate anaerobes, non-motile, non-spore forming, and appear as short rods. P40-F2a was evaluated for its ability to utilize 190 different carbon sources using Phenotypic Microarrays (Biolog, Hayward, Calif.). The carbon sources utilized by P40-F2a include α-D-Glucose, D-Mannose, α-D-Lactose, Glycerol, D-Galactose, N-Acetyl-D-glucosamine, D,L-α-Glycerol-Phosphate, D-Glucosamine, N-Acetyl-D-Galactosamine, N-Acetyl-Neuraminic Acid, α-Keto-Valeric Acid, and Melibionic Acid.

### Example 3—In vitro Functional Activity of Butyricimonas faecihominis P40-F2a

[0154] This example describes studies of the activity of Butyricimonas faecihominis P40-F2a in in vitro human epithelial, macrophage, monocyte and dendritic cell models.

### Example 3.1—Preparation of Freshly Cultured Bacterial Strains for Cell Culture Assays

[0155] Freshly cultured bacteria from overnight cultures of the Butyricimonas faecihominis P40-F2a strain and a negative control strain previously confirmed to have anti-inflammatory properties were prepared in anaerobic conditions. Bacteria were centrifuged at 4300×g for four minutes. Bacteria were washed once with pre-reduced anaerobic PBS (Gibco). Working stock solutions were prepared by resuspending washed bacteria with anaerobic PBS to the total surface area of ˜1×10\hat{ }10 μm². Total surface area was calculated by determining the number of particles (bacterial cells) in solution, then multiplying the total number of particles by the Average surface area (μm²) of each particle, as measured by a particle counter (Beckman Coulter Counter). 10-fold serial dilutions were made using anaerobic PBS for specific assays.

### Example 3.2—Human Monocyte-Derived Dendritic Cell (moDC) In Vitro Cytokine Assay

[0156] Cryopreserved PBMC were thawed in a 37° C. water bath, diluted in warm RPMI 1640 supplemented with 10% heat-inactivated FBS and L-glutamine, and centrifuged (515×g; four minutes). Cells were resuspended in PBS buffer containing 0.5% bovine serum albumin (BSA) and 2 mM EDTA and CD14+ monocyte cells were isolated by selection using Miltenyi CD14 Microbeads according to manufacturer's directions. Isolated CD14+ monocytes were cultured in RPMI 1640 supplemented with 10% heat-inactivated FBS, L-glutamine, penicillin/streptomycin antibiotic, 50 ng/mL recombinant human IL-4 (R&D Systems), and 100 ng/mL recombinant human GM-CSF (Biolegend). Media was replenished on days 3 and 6. On day 7 after isolation, cells were diluted to 5×10⁵ cells/mL in RPMI 1640 containing L-glutamine (Corning) supplemented with 10% heat-inactivated FBS (Tissue Culture Biologicals) and 0.292 mg/mL L-glutamine (Corning). A 100 μL aliquot of the 5×10⁵ cells/mL cell suspension was added to each well within a flat-well 96 well plate and cultured for 24 hours at 37° C. and 5% CO₂ before addition of test articles.

[0157] Bacterial test articles (P40-F2a and negative control strains) were prepared to a total surface area of 1×10\hat{ }8 μm² and 1×10\hat{ }7 μm², respectively. The test articles, vehicle (PBS) control and moDCs were co-incubated for 3 hours in 37° C. and 5% CO₂. The plates were then centrifuged (515×g; four minutes), media removed, and replaced with RPMI 1640 supplemented with 10% heat-inactivated FBS, L-glutamine, and penicillin/streptomycin antibiotic. Culture plates were then incubated for an additional 15 h at 37° C. and 5% CO₂. The plates were centrifuged (515×g; four minutes), and supernatant was collected and analyzed by a custom U-plex multiplex kit from Meso Scale Discovery according to manufacturer's instructions. Results were averaged from 4 human donors with two experimental replicates from each donor.

[0158] As shown in FIG. 1, Butyricimonas faecihominis P40-F2a induced significant, dose-dependent increases in the production of: (A) IL-27, (B) TRAIL, (C) IL-6 and (D) IFN-β by human monocyte-derived dendritic cells (moDCs), in comparison to production of these pro-inflammatory cytokines induced by the anti-inflammatory strain control and vehicle (PBS). As shown in FIG. 2, Butyricimonas faecihominis P40-F2a induced similar significant, dose-dependent increases in the production of: (A) IL-12p70, (B) IL-1β, and (C) IL-23, in human moDCs, in comparison to production of these pro-inflammatory cytokines induced by the anti-inflammatory strain control and vehicle (PBS).

### Example 3.3—Human PBMC In vitro Cytokine Assay

[0159] Trima residual blood product containing concentrated blood mononuclear cells was obtained from anonymous donors through Blood Centers of the Pacific (San Francisco, Calif.) and processed within 24 hours of collection. Blood samples were tested negative for HIV, HBV, HCV, HTLV, Syphilis, West Nile Virus and Zika Virus. PBMC were isolated using a ficoll gradient as described previously (Sim et al., J. Vis. Exp. (112), e54128 2016). Briefly, 50 mL of Trima residual was diluted with 50 mL of sterile PBS (Gibco) and 25 mL was overlaid on 15 mL Ficoll-Paque Plus (GE Healthcare) in 50 mL conical tubes. The samples were centrifuged at 450×g for 30 min at room temperature and allowed to stop without brake. The PBMC interphase was collected, washed with PBS and resuspended in RPMI 1640 containing 2.05 mM L-glutamine (Corning) supplemented with 10% heat-inactivated FBS (Tissue Culture Biologicals) and 0.292 mg/mL L-glutamine (Corning). The cells were maintained by incubation in 37° C. and 5% CO₂ and used for assay evaluation within 24 h or frozen for later use. Cells were cryopreserved in RPMI 1640 supplemented with 50% FBS and 10% DMSO (Sigma Aldrich) at a concentration of 5×10⁷ cells/mL and stored in liquid nitrogen until ready for use.

[0160] Human PBMCs, used immediately after isolation or thawed from cryo-storage, were diluted to 5×10⁶ cells/mL in RPMI 1640 containing L-glutamine (Corning) supplemented with 10% heat-inactivated FBS (Tissue Culture Biologicals) and 0.292 mg/mL L-glutamine (Corning). A 100 μL aliquot of the 5×10⁶ cells/mL cell suspension was added to each well within a round-bottom 96 well plate and cultured for 24 hours at 37° C. and 5% CO₂ before addition of test articles.

[0161] Test articles were prepared and added to the PBMCs as described above for the moDC assay. After 3 hours of incubation in 37° C. with 5% CO₂, the plates containing cocultures were centrifuged (515×g; four minutes), media removed, and replaced with RPMI 1640 supplemented with 10% heat-inactivated FBS, L-glutamine, and penicillin/streptomycin antibiotic. Culture plates were then incubated for an additional 15 h at 37° C. and 5% CO₂. The plates were centrifuged (515×g; four minutes) and supernatant was collected and analyzed by a custom U-plex multiplex kit from Meso Scale Discovery according to manufacturer's instructions. Results were averaged from 4 human donors with two experimental replicates from each donor.

[0162] As shown in FIG. 3, Butyricimonas faecihominis P40-F2a induced significant, dose-dependent increases in the production of: (A) IFN-γ, (B) IL-1β, (C) IL-6, (D) TRAIL, and (E) TNF by human PBMCs, in comparison to production of these pro-inflammatory cytokines induced by the anti-inflammatory strain control and vehicle (PBS).

### Example 3.4—Human Macrophage and Monocyte In Vitro Cytokine and Chemokine Assay

[0163] The THP-1 human monocyte cell line (ATCC cat # TIB-202) was cultured in 37° C. and 5% CO₂ using RPMI 1640 containing 2.05 mM L-glutamine (Corning) supplemented with 10% heat-inactivated FBS (Corning), 100 I.U/mL Penicillin, 100 μg/mL Streptomycin and 0.292 mg/mL L-glutamine (Corning). Passage number was restricted to 8 passages. The THP-1 human monocyte cell line was grown until 70-80% confluent. Cells were counted and resuspended in culture media. 100,000 cells were plated per well onto 96 well plates. THP-1 human M2 macrophages were made by culturing the THP-1 human monocyte cells with 10 ng/mL phorbol 12-myristate 13-acetate (PMA) (InvivoGen) for 24 hours followed by 20 ng/mL IL-4 (R&D Systems) and 20 ng/mL IL-13 (R&D Systems) for 48 hours in 37° C. and 5% CO₂ as described previously (Genin et al., BMC Cancer 15:577 (2015)). One day before the experiment, cells were washed and resuspended in RPMI culture media without antibiotics containing 20 ng/mL IL-4 and 20 ng/mL IL-13.

[0164] Bacterial test articles (P40-F2a and negative control strains) were prepared to a total surface area of 1×10\hat{ }8 μm², 1×10\hat{ }7 μm², and 1×10\hat{ }6 μm² respectively. The test articles and vehicle (PBS) control were added onto THP-1 macrophages at 10% v/v and centrifuged down onto the THP-1 cells at 515×g for four minutes. The test articles, control and THP-1 macrophages were co-incubated for 3 hours in 37° C. and 5% CO₂. The co-incubation media was then replaced with fresh RPMI culture media supplemented with antibiotics to limit excess bacteria growth. THP-1 cells were incubated after culture media replacement for 15 hours in 37° C. and 5% CO₂. THP-1 cell supernatants were collected and analyzed by ELISA. Levels of selected cytokines in culture supernatants were quantified by using commercial enzyme-linked immunosorbent assay (ELISA) kits from Biolegend or R&D Systems with TMB detection according to manufacturer's specifications.

[0165] As shown in FIG. 4, Butyricimonas faecihominis P40-F2a induced significant, dose-dependent increases in the production of: (A) IL-1β, (B) IL-12p40, and (C) TNF by THP-1 M2 macrophages, in comparison to production of these pro-inflammatory cytokines induced by the anti-inflammatory strain control and vehicle (PBS). By contrast, Butyricimonas faecihominis P40-F2a did not significantly induce production of the anti-inflammatory cytokines (D) CCL-18 and (E) IL-10 in THP-1 M2 macrophages.

### Example 5—In Vivo Functional Activity of Butyricimonas faecihominis P40-F2a

[0166] Butyricimonas faecihominis P40-F2a was tested for efficacy in two different well-validated mouse tumor models: (1) a subcutaneous B16F10 syngeneic melanoma model and (2) a subcutaneous CT26 syngeneic colon carcinoma model.

[0167] 5.1 B16F10 Syngeneic Melanoma Model

[0168] B16F10 cells were thawed from low passage number stock, expanded using standard tissue culture technique, and maintained in DMEM with 10% fetal bovine plasma (FBS) in a 37° C. incubator with 5% CO₂. Cells growing in logarithmic phase (50-60% confluency) were harvested, and 1×10⁵ cells per animal were implanted subcutaneously into female C57BL/6 mice (Taconic) in the right lower flank. Upon tumors reaching an average size of 100 mm³ in volume, animals were stratified into experimental, negative control or positive control groups. Experimental and negative control groups received oral administrations of test article (Butyricimonas faecihominis P40-F2a) and vehicle, respectively, once daily for the duration of the study. The positive control group received anti-PD-L1 antibody (200 via intraperitoneal route) every 4 days for the duration of the study. Tumor volume and body weights were assessed 3 times a week, and tumor weights were assessed at the end of the study.

[0169] As shown in FIG. 5 and FIG. 6, administration of Butyricimonas faecihominis P40-F2a led to a significant reduction in tumor volume (displayed as fold-change in FIG. 5A and in mm³ in FIG. 6A), comparable to the reduction in tumor volume observed for animals receiving anti-PD-L1 antibody (displayed as fold-change in FIG. 5B and in mm³ in FIG. 6B). Tumor weights for animals administered Butyricimonas faecihominis P40-F2a were also reduced relative to both vehicle control and positive control groups (FIG. 6C). No changes in body weight were observed in animals receiving P40-F2a compared to those receiving vehicle and positive control antibody (FIGS. 7A and B).

[0170] 5.2 CT26 Colon Carcinoma Model

[0171] 5.2.1 Tumor model. CT-26 cells were thawed from low passage number stock, expanded using standard tissue culture technique, and maintained in DMEM with 10% fetal bovine plasma (FBS) in a 37° C. incubator with 5% CO₂. Cells growing in logarithmic phase (50-60% confluency) were harvested, and 1×10⁵ cells per animal were implanted subcutaneously into female BALB/c mice (Taconic) in the right lower flank. Upon tumors reaching an average size of 100 mm³ in volume, animals were stratified into experimental, negative control or positive control groups.

[0172] 5.2.2 Butyricimonas faecihominis P40-F2a efficacy. In a first CT26 study, the positive control group received anti-PD-1 antibody (10 mg/kg, in 100 μl, via intraperitoneal route) every 3 days for the duration of the study. Experimental and negative control groups received oral administrations of test article (Butyricimonas faecihominis P40-F2a) and vehicle, respectively, once daily for the duration of the study. The positive control group received anti-PD-1 antibody (10 mg/kg, in 100 μl, via intraperitoneal route) every 3 days for the duration of the study. Tumor volume and body weights were assessed 3 times a week, and tumor weights were assessed at the end of the study.

[0173] As shown in FIG. 8 and FIG. 9, administration of Butyricimonas faecihominis P40-F2a led to a reduction in tumor volume (displayed as fold-change in FIG. 8A and in mm³ in FIG. 9A), comparable to the reduction in tumor volume observed for animals receiving anti-PD-1 antibody (displayed as fold-change in FIG. 8B and in mm³ in FIG. 9B). Tumor weights for animals administered Butyricimonas faecihominis P40-F2a were also reduced relative to the vehicle control group (FIG. 9C). Inhibition of body weight reduction was observed in animals receiving P40-F2a compared to those receiving vehicle (FIG. 10A), which inhibition was improved relative to that observed in animals receiving anti-PD-1 antibody (FIG. 10B).

[0174] 5.2.3 Butyricimonas faecihominis P40-F2a combined with Collinsella ASMB P121-D5a. In a second CT-26 study, tumor reduction was assessed in animals administered the combination of Butyricimonas faecihominis (P40-F2a) plus a Collinsella strain, Collinsella ASMB P121-D5a strain, in equal amounts (once daily). Single strain test groups were administered either Collinsella ASMB P121-D5a alone or Butyricimonas faecihominis P40-F2a alone, once daily for the duration of the study. The negative control group received vehicle only once daily for the duration of the study. As shown in FIG. 11A, administration of Collinsella ASMB P121-D5a alone resulted in a reduction of tumor growth compared to administration of vehicle only (displayed in mm³ in the left graph and as fold-change in the right graph). As shown in FIG. 11B, administration Butyricimonas faecihominis P40-F2a alone did not result in a significant reduction of tumor growth compared to administration of vehicle only (displayed in mm³ in the left graph and as fold-change in the right graph). However, as shown in FIG. 11C, administration of the combination of Collinsella ASMB P121-D5a plus Butyricimonas faecihominis P40-F2a resulted in significant tumor reduction which exceeded the tumor reduction observed for either strain alone (tumor volume versus vehicle only displayed in mm³ in the left graph and as fold-change in the right graph).

[0175] 5.2.4 Butyricimonas faecihominis P40-F2a combined with Collinsella ASMB P121-D5a and anti-PD-1 antibody. In a third CT-26 study, the effects on tumor burden were assessed for animals receiving as test articles: Collinsella ASMB P121-D5a alone; Butyricimonas faecihominis P40-F2a alone; anti-PD-1 antibody alone; the combination of Collinsella ASMB P121-D5a plus Butyricimonas faecihominis P40-F2a; and the combination of Collinsella ASMB P121-D5a plus Butyricimonas faecihominis P40-F2a plus anti-PD-1 antibody. Animals in groups receiving bacterial test articles were administered once daily bacteria as single strains (mixed in equal volumes with vehicle), bacteria as 2-strain combinations (Collinsella ASMB P121-D5a strain and Butyricimonas faecihominis P40-F2a in equal amounts), or bacteria as 2-strain combinations (Collinsella ASMB P121-D5a strain and Butyricimonas faecihominis P40-F2a in equal amounts) plus anti-PD-1 antibody. Anti-PD-1 antibody was administered (alone as positive control or with a 2-strain combination) in an amount of 10 mg/kg, in 100 μl, via intraperitoneal route every 3 days for the duration of the study.

[0176] FIG. 12 provides tumor volume (mm³; left column) and tumor volume change (fold-change; right column) in animals treated with test articles (bacteria and/or antibody) versus animals treated with vehicle only. As shown, tumor reduction, when compared to administration of vehicle only, was observed in groups administered: Collinsella ASMB P121-D5a alone (FIG. 12A); Butyricimonas faecihominis P40-F2a alone (FIG. 12B); anti-PD-1 antibody alone (FIG. 12C); and the combination of Collinsella ASMB P121-D5a plus Butyricimonas faecihominis P40-F2a (FIG. 12D). However, the most significant tumor reduction was observed when animals received the combination of Collinsella ASMB P121-D5a plus Butyricimonas faecihominis P40-F2a plus anti-PD-1 antibody (FIG. 12E), which tumor reduction exceeded either of the single strain administrations, anti-PD-1 antibody only, and the two-strain combination without antibody.

[0177] The combination of Collinsella ASMB P121-D5a and Butyricimonas faecihominis P40-F2a strains plus an anti-PD-1 antibody also increased tumor infiltration of T cells relative to administration with vehicle, the two-strain combination alone, and the anti-PD-1 antibody alone. FIG. 14 provides representative immunohistochemistry staining for CD8+ T cells in formalin-fixed paraffin-embedded (FFPE) tumor sections following treatment with (FIG. 14A) Collinsella ASMB P121-D5a+Butyricimonas faecihominis P40-F2a (Ca+Bf); (FIG. 14B) Collinsella ASMB P121-D5a+Butyricimonas faecihominis P40-F2a+α-PD-1 (Ca+Bf+α-PD-1); (FIG. 14C) Vehicle; or (FIG. 14D) α-PD-1. Tumor infiltration of T cells was also determined by Nanostring RNA-based cell type profiling. RNA was extracted and purified from tumor samples and analyzed using the Mouse PanCancer TO 360 Panel. T cell designation was based on expression of Cd3d, Cd3e, Cd3g, Cd6, Sh2d1a and Trat1. As shown in FIG. 16, each of anti-PD-1 antibody alone (α-PD-1), the combination of Collinsella ASMB P121-D5a and Butyricimonas faecihominis P40-F2a (Ca+Bf) strains, and the combination of Collinsella ASMB P121-D5a and Butyricimonas faecihominis P40-F2a strains and anti-PD-1 antibody (Ca+Bf+α-PD-1) increased tumor-infiltrating T cells relative to administration of vehicle only, with the highest T cell score observed for the combination of Ca+Bf+α-PD-1.

[0178] IFN-γ concentrations were also assessed in tumor samples by Meso Scale Discovery (MSD) analysis of tumor tissue homogenate and normalized to homogenate protein concentration. As shown in FIG. 19, each of anti-PD-1 antibody alone (α-PD-1), the combination of Collinsella ASMB P121-D5a and Butyricimonas faecihominis P40-F2a (Ca+Bf) strains, and the combination of Collinsella ASMB P121-D5a and Butyricimonas faecihominis P40-F2a strains and anti-PD-1 antibody (Ca+Bf+α-PD-1) increased IFN-γ concentrations in tumors relative to administration of vehicle alone.

[0179] 5.2.5 Butyricimonas faecihominis P40-F2a combined with Alistipes senegalensis and anti-PD-1 antibody. Also in the third CT-26 study, the effects on tumor burden were assessed for animals receiving as test articles: Butyricimonas faecihominis (P40-F2a) alone; an isolated and purified strain of Alistipes, Alistipes senegalensis P150-D12a, alone; anti-PD-1 antibody alone; the combination of Alistipes senegalensis P150-D12a plus Butyricimonas faecihominis P40-F2a; and the combination of Alistipes senegalensis P150-D12a plus Butyricimonas faecihominis P40-F2a plus anti-PD-1 antibody. Animals in groups receiving bacterial test articles were administered once daily bacteria as single strains (mixed in equal volumes with vehicle), bacteria as 2-strain combinations (Alistipes senegalensis P150-D12a strain and Butyricimonas faecihominis P40-F2a in equal amounts), or bacteria as 2-strain combinations (Alistipes senegalensis P150-D12a strain and Butyricimonas faecihominis P40-F2a in equal amounts) plus anti-PD-1 antibody. Anti-PD-1 antibody was administered (alone as positive control or with a 2-strain combination) in an amount of 10 mg/kg, in 100 μl, via intraperitoneal route every 3 days for the duration of the study.

[0180] FIG. 13 provides tumor volume (mm³; left column) and tumor volume change (fold-change; right column) in animals treated with test articles (bacteria and/or antibody) versus animals treated with vehicle only. As shown, tumor reduction, when compared to administration of vehicle only, was observed in groups administered: Alistipes senegalensis P150-D12a alone (FIG. 13A); Butyricimonas faecihominis P40-F2a alone (FIG. 13B); anti-PD-1 antibody alone (FIG. 13C); and the combination of Alistipes senegalensis P150-D12a plus Butyricimonas faecihominis P40-F2a (FIG. 13D). However, the most significant tumor reduction was observed when animals received the combination of Alistipes senegalensis P150-D12a plus Butyricimonas faecihominis P40-F2a plus anti-PD-1 antibody (FIG. 13E), which tumor reduction exceeded either of the single strain administrations, anti-PD-1 antibody only, and the two-strain combination without antibody.

[0181] The combination of Alistipes senegalensis P150-D12a and Butyricimonas faecihominis P40-F2a strains plus an anti-PD-1 antibody also increased tumor infiltration of T cells relative to administration with vehicle, the two-strain combination alone, and the anti-PD-1 antibody alone. FIG. 15 provides representative immunohistochemistry staining for CD8+ T cells in formalin-fixed paraffin-embedded (FFPE) tumor sections following treatment with (FIG. 15A) Alistipes senegalensis P150-D12a+Butyricimonas faecihominis P40-F2a (As+Bf); (FIG. 15B) Alistipes senegalensis P150-D12a+Butyricimonas faecihominis P40-F2a+α-PD-1 (As+Bf+α-PD-1); (FIG. 15C) Vehicle; or (FIG. 15D) α-PD-1. Tumor infiltration of T cells was also determined by Nanostring RNA-based cell type profiling. RNA was extracted and purified from tumor samples and analyzed using the Mouse PanCancer TO 360 Panel. T cell designation was based on expression of Cd3d, Cd3e, Cd3g, Cd6, Sh2d1a and Trat1. As shown in FIG. 17, each of anti-PD-1 antibody alone (α-PD-1) and the combination of Alistipes senegalensis P150-D12a and Butyricimonas faecihominis P40-F2a strains and anti-PD-1 antibody (As+Bf+α-PD-1) increased tumor-infiltrating T cells relative to administration of vehicle only, with the highest T cell score observed for the combination of As+Bf+α-PD-1. T-cell infiltration was also determined by flow cytometry analysis of fresh tumor tissue. CD8⁺ T cells were identified by gating CD8⁺ CD4⁻ CD3⁺ CD45⁺ lymphocytes and quantified as percentage of live cells. As shown in FIG. 18, the combination of Alistipes senegalensis P150-D12a and Butyricimonas faecihominis P40-F2a strains plus an anti-PD-1 antibody (As+Bf+α-PD-1) increased tumor-infiltrating CD8⁺ T cells, relative to administration with vehicle or antibody alone.

[0182] IFN-γ concentrations were also assessed in tumor samples by Meso Scale Discovery (MSD) analysis of tumor tissue homogenate and normalized to homogenate protein concentration. As shown in FIG. 20, each of anti-PD-1 antibody alone (α-PD-1), and the combination of Alistipes senegalensis P150-D12a and Butyricimonas faecihominis P40-F2a strains and anti-PD-1 antibody (As+Bf+α-PD-1) significantly increased IFN-γ concentrations in tumors relative to administration of vehicle only.

### Example 6—In Vivo Functional Activity of Bacterial Consortia Comprising Butyricimonas faecihominis and Lactobacillus ruminis

[0183] 6.1 Efficacy of Lactobacillus ruminis in B16F10 Melanoma and CT26 Colon Carcinoma Models

[0184] Lactobacillus ruminis strain P167-B1a was tested for efficacy in two different well-validated mouse tumor models: (1) a subcutaneous B16F10 syngeneic melanoma model and (2) a subcutaneous CT26 syngeneic colon carcinoma model. Studies were conducted as described above (Section 5.1: B16F10 syngeneic melanoma model; Section 5.2.1: CT26 colon carcinoma model).

[0185] As shown in FIG. 21A, administration of Lactobacillus ruminis strain P167-B1a (Lr) led to a significant reduction in B16F10 tumor volume (displayed as fold-change in right panel and in mm³ in left panel), comparable to the reduction in tumor volume observed for animals receiving anti-PD-L1 antibody. As shown in FIG. 21B, immunohistochemistry (IHC) analysis of CD3⁺ cells in fixed tumor sections showed that administration of Lr led to a modest but non-significant increase in CD3⁺ cells, as a percent of non-necrotic cells.

[0186] As shown in FIG. 22A, administration of Lr also led to a significant reduction in CT26 tumor volume (displayed as fold-change in right panel and in mm³ in left panel). As shown in FIG. 22B, administration of Lr in combination with an anti-PD-1 antibody did not significantly improve the anti-tumor effect of the Lr strain when administered alone, nor the anti-PD-1 antibody when administered alone.

[0187] 6.2 Butyricimonas faecihominis combined with Lactobacillus ruminis and anti-PD-1 antibody. In an additional CT-26 study, the effects on tumor burden were assessed for animals receiving as test articles: Lactobacillus ruminis strain P167-B1a (Lr) alone; the combination of Lr plus anti-PD-1 antibody; the combination of Butyricimonas faecihominis P40-F2a (Bf) plus anti-PD-1 antibody; and the combination of Lr plus Bf plus anti-PD-1 antibody. Animals in groups receiving bacterial test articles were administered once daily bacteria as single strains (mixed in equal volumes with vehicle), bacteria as 2-strain combinations (Lr and Bf in equal amounts), or bacteria as 2-strain combinations (Lr and Bf in equal amounts) plus anti-PD-1 antibody. Anti-PD-1 antibody was administered (alone as positive control or with a 2-strain combination) in an amount of 10 mg/kg, in 100 μl, via intraperitoneal route every 3 days for the duration of the study.

[0188] FIG. 22 provides tumor volume (mm³; left column) and tumor volume change (fold-change; right column) in animals treated with test articles (bacteria and/or antibody) versus animals treated with vehicle only. Tumor reduction, when compared to administration of vehicle only, was observed in groups administered: Lr alone (FIG. 22A); Lr plus anti-PD-1 antibody (FIG. 22B); Bf plus anti-PD-1 antibody (FIG. 22C); and the combination of Lr plus Bf plus anti-PD-1 antibody (FIG. 22D). The most significant tumor reduction was observed when animals received the combination of Lr plus Bf plus anti-PD-1 antibody (FIG. 22D), which tumor reduction exceeded that of Lr alone, Lr plus antibody and Bf plus antibody. These results suggest that Lactobacillus ruminis and Butyricimonas faecihominis can synergize to potentiate the anti-tumor effect of checkpoint inhibitors such as anti-PD-1.

[0189] FIG. 23 depicts the effects of administration of a combination of Lactobacillus ruminis P167-B1a (Lr)+Butyricimonas faecihominis P40-F2a (Bf)+anti-PD-1 antibody on tumor infiltrating cells, compared to administration of anti-PD-1 antibody alone, as shown by immunohistochemistry (IHC) and flow cytometry (FC). FIG. 23A, B: CD4⁺ T cells; FIG. 23C, D: natural killer (NK) cells; FIG. 23E: dendritic cells (DC); and FIG. 23F: CD45⁺ leukocytes. Consistent with the potentiation of tumor reduction by the combination of Lr and Bf, this combination also appears to potentiate anti-PD-1 induced infiltration of immune cells into tumors.

[0190] The results shown in FIG. 22D and FIG. 23 were corroborated and extended in an additional CT26 study. As shown in FIG. 24E, administration of Lr plus Bf plus anti-PD-1 antibody resulted in significantly enhanced tumor reduction compared to administration of anti-PD-1 alone. FIGS. 27A-D depict the corresponding effects of the Lr+Bf combination plus anti-PD-1 antibody on tumor-infiltrating immune cell populations, as a frequency of non-necrotic cells in fixed tumor sections by immunohistochemistry (IHC). Administration of the 2-strain combination plus anti-PD-1 antibody increased tumor infiltration of the following cell types: (FIG. 27A) CD3⁺ T cells; (FIG. 27B) CD4⁺ T cells; (FIG. 27C) CD8⁺ T cells; and (FIG. 27D) NK cells. Tumor-infiltrating immune cells were also scored by targeted gene expression using Nanostring platform from RNA extracted from frozen tumor pieces. As shown in FIGS. 27E-L, administration of the 2-strain combination plus anti-PD-1 antibody increased tumor infiltration relative to antibody alone for the following cell types: (E) T cells based on expression of: Cd3d, Cd3e, Cd3g, Cd6, Sh2d1a and Trat1; (F) Th1 cells based on expression of Tbx21; (G) exhausted CD8 T cells based on expression of: Cd244, Eomes, Lag3, and Ptger4; (H) NK CD56dim cells based on expression of: Il21r, Kir3d11, and Kir3d12; (I) CD45⁺ cells based on expression of Ptprc; (J) neutrophils based on expression of: Ceacam3, Csf3r, Fcgr4 and Fpr1; (K) cytotoxic T cells based on expression of: Ctsw, Gzma, Gzmb, Klrb1, Klrd1, Klrk1, Nkg7, and Prf1; and (L) CD8⁺ cells based on expression of Cd8a and Cd8b1.

[0191] 6.3 Butyricimonas faecihominis Combined with Lactobacillus ruminis, Alistipes Senegalensis and Anti-PD-1 Antibody.

[0192] In an additional CT-26 study, the combination of Butyricimonas faecihominis P40-F2a (Bf), Lactobacillus ruminis strain P167-B1a (Lr) and Alistipes senegalensis P150-D12a (As) was administered to tumor-bearing mice, with and without co-administration of anti-PD-1 antibody. Additional test articles included Vehicle only and anti-PD-1 antibody alone. Animals in groups receiving bacterial test articles were administered once daily the 3-strain combination (Lr, Bf and As in equal amounts), or 3-strain combination plus anti-PD-1 antibody. Anti-PD-1 antibody was administered (alone as positive control or with the 3-strain combination) in an amount of 10 mg/kg, in 100 μl, via intraperitoneal route every 3 days for the duration of the study.

[0193] As shown in FIG. 24A, the combination of Lr+As+Bf induced a reduction in tumor volume comparable to anti-PD-1 antibody alone. Co-administration of anti-PD-1 antibody with the 3-strain combination greatly potentiated the anti-tumor effect relative to the anti-PD-1 alone and this 3-strain combination without antibody (FIG. 24B), suggesting a synergistic effect between the 3-strain combination and checkpoint inhibitor. FIGS. 25A-D depict the corresponding effects of the Lr+As+Bf combination plus anti-PD-1 antibody on tumor-infiltrating immune cell populations, as a frequency of non-necrotic cells in fixed tumor sections by immunohistochemistry (IHC). Administration of the 3-strain combination plus anti-PD-1 antibody increased tumor infiltration of the following cell types: (FIG. 25A) CD3⁺ T cells; (FIG. 25B) CD4⁺ T cells; and (FIG. 25C) CD8⁺ T cells. Increases were relative to administration of anti-PD-1 antibody only and the 3-strain combination without antibody, which supports the synergy between the 3-strain combination and checkpoint inhibitor.

[0194] Tumor-infiltrating immune cells were also scored by targeted gene expression using Nanostring platform from RNA extracted from frozen tumor pieces. As shown in FIGS. 25E-J, administration of the 3-strain combination plus anti-PD-1 antibody increased tumor infiltration relative to antibody alone for the following cell types: (E) T cells based on expression of the following genes: Cd3d, Cd3e, Cd3g, Cd6, Sh2d1a and Trat1; (F) Th1 cells based on expression of Tbx21; (G) Exhausted CD8 T cells based on expression of the following genes: Cd244, Eomes, Lag3 and Ptger4; (H) NK CD56dim cells based on expression of: Il21r, Kir3d11 and Kir3d12; (I) Cytotoxic T cells based on expression of: Ctsw, Gzma, Gzmb, Klrb1, Klrd1, Klrk1, Nkg7 and Prf1; and (J) CD45⁺ cells based on expression of Ptprc.

[0195] 6.4 Butyricimonas faecihominis Combined with Lactobacillus ruminis, Collinsella ASMB and Anti-PD-1 Antibody.

[0196] The combination of Butyricimonas faecihominis P40-F2a (Bf), Lactobacillus ruminis strain P167-B1a (Lr) and Collinsella ASMB P121-D5a (Ca) was administered to CT26 tumor-bearing mice, with and without co-administration of anti-PD-1 antibody. Additional test articles included Vehicle only and anti-PD-1 antibody alone. Animals in groups receiving bacterial test articles were administered once daily the 3-strain combination (Lr, Bf and Ca in equal amounts), or 3-strain combination plus anti-PD-1 antibody. Anti-PD-1 antibody was administered (alone as positive control or with the 3-strain combination) in an amount of 10 mg/kg, in 100 μl, via intraperitoneal route every 3 days for the duration of the study.

[0197] As shown in FIG. 24C, the combination of Ca+Lr+Bf induced a reduction in tumor volume comparable to anti-PD-1 antibody alone. Co-administration of Anti-PD-1 antibody with the 3-strain combination greatly potentiated the anti-tumor effect relative to the anti-PD-1 alone and the 3-strain combination without antibody (FIG. 24D), suggesting a synergistic effect between this 3-strain combination and checkpoint inhibitor. FIGS. 26A-D depict the effects of the Ca+Lr+Bf combination plus anti-PD-1 antibody on tumor-infiltrating immune cell populations, as a frequency of non-necrotic cells in fixed tumor sections by immunohistochemistry (IHC). A trend of increased CD8+ T cell infiltration was observed with administration of the 3-strain combination with and without anti-PD-1 antibody, relative to anti-PD-1 antibody alone (FIG. 26C). Tumor-infiltrating immune cells were also scored by targeted gene expression using Nanostring platform from RNA extracted from frozen tumor pieces. As shown in FIGS. 26E-J, administration of the 3-strain combination plus anti-PD-1 antibody increased tumor infiltration relative to antibody alone for the following cell types: (E) T cells based on expression of the following genes: Cd3d, Cd3e, Cd3g, Cd6, Sh2d1a and Trat1; (F) Th1 cells based on expression of Tbx21; (G) exhausted CD8 T cells based on expression of: Cd244, Eomes, Lag3 and Ptger4; (H) NK CD56dim cells based on expression of: Il21r, Kir3d11, and Kir3d12; (I) CD45⁺ cells score based on expression of Ptprc; (J) neutrophils based on expression of: Ceacam3, Csf3r, Fcgr4 and Fpr1; (K) cytotoxic T cells based on expression of: Ctsw, Gzma, Gzmb, Klrb1, Klrd1, Klrk1, Nkg7 and Prf1; and (L) dendritic cells based on expression of: Ccl2, Cd209e and Hsd11b1.

[0198] 6.5 Lyophilized Formulations of Butyricimonas faecihominis and Lactobacillus ruminis.

[0199] Butyricimonas faecihominis P40-F2a (Bf) and Lactobacillus ruminis P167-B1a (Lr) strains were lyophilized and assessed for anti-tumor efficacy in combination with anti-PD-1 antibody in the CT26 tumor model. As shown in FIG. 28, co-administration of anti-PD-1 antibody plus a combination of Lr and Bf strains reconstituted from lyophilized bacterial stocks (Lr (lyo)+Bf (lyo)+α-PD-1) retained strong anti-tumor efficacy. For reference, strong anti-tumor efficacy was also observed with co-administration of anti-PD-1 antibody plus a combination of Lr and Bf strains reconstituted from frozen bacterial stocks ((Lr (fr)+Bf (fr)+α-PD-1).

### Example 7—In Vivo Functional Activity of Bacterial Consortia Comprising Butyricimonas faecihominis and Other Strains

[0200] Combinations of Butyricimonas faecihominis P40-F2a (Bf) and other bacterial strains (Alistipes indistinctus, Bacteroides thetaiotaomicron and Intestinimonas butyriciproducens,) were assessed in the CT26 tumor model for their ability to potentiate the anti-tumor activity of checkpoint inhibitor antibody. Animals in groups receiving bacterial test articles were administered once daily bacteria as 2-strain combinations (Bf and the second strain in equal amounts) plus anti-PD-1 antibody. Anti-PD-1 antibody was administered (alone as positive control or with a 2-strain combination) in an amount of 10 mg/kg, in 100 μl, via intraperitoneal route every 3 days for the duration of the study. FIG. 29 depicts administration of an anti-PD-1 antibody alone compared to: (A) a combination of Alistipes indistinctus and Butyricimonas faecihominis P40-F2a (Bf) strains and an anti-PD-1 antibody; (B) a combination of Bacteroides thetaiotaomicron and Bf strains and an anti-PD-1 antibody; and (C) a combination of Intestinimonas butyriciproducens and Bf strains and an anti-PD-1 antibody. None of the 2-strain combinations plus anti-PD-1 antibody significantly increased tumor reduction compared to anti-PD-1 alone.

### INCORPORATION BY REFERENCE

[0201] The entire disclosure of each of the patent and scientific documents referred to herein is incorporated by reference for all purposes.

### EQUIVALENTS

[0202] The disclosure may be embodied in other specific forms without departing from the spirit or essential characteristics thereof. The foregoing embodiments are therefore to be considered in all respects illustrative rather than limiting on the disclosure described herein. Scope of the disclosure is thus indicated by the appended claims rather than by the foregoing description, and all changes that come within the meaning and range of equivalency of the claims are intended to be embraced therein.

What is claimed is:

1. A composition comprising:
a bacterial strain of the genus Butyricimonas that comprises a 16s rRNA gene sequence with at least about 98% sequence identity to the polynucleotide sequence of SEQ ID NO: 846; and
an excipient, diluent and/or carrier;
wherein the bacterial strain is lyophilized, freeze dried or spray dried.

2. The composition of claim 1, wherein the bacterial strain is capable of increasing production of one or more pro-inflammatory cytokines by a human macrophage, monocyte, peripheral blood mononuclear cell or monocyte-derived dendritic cell in vitro.

3. The composition of claim 1, wherein the pro-inflammatory cytokine is selected from the group consisting of interferon gamma (IFN-γ), interleukin 1 beta (IL-1β), interleukin 6 (IL-6), interleukin 12 (IL-12, e.g., IL-12p40, IL-12p70), interleukin 23 (IL-23), interleukin 27 (IL-27), tumor necrosis factor (TNF), and/or TNF-related apoptosis inducing ligand (TRAIL).

4. The composition of any one of claims 1 to 3, wherein the composition comprising a bacterial strain of the genus Butyricimonas is capable of increasing infiltration of T cells into a tumor.

5. The composition of any one of claims 1 to 4, wherein the bacterial strain comprises a 16s rRNA gene sequence with at least about 98.5%, 99% or 99.5% sequence identity to the polynucleotide sequence of SEQ ID NO: 846.

6. The composition of any one of claims 1 to 5, wherein the bacterial strain shares at least 70% DNA-DNA hybridization with strain Butyricimonas faecihominis P40-F2a, having the deposit accession number DSM 33411.

7. The composition of any one of claims 1 to 6, wherein the bacterial strain comprises a nucleotide sequence having at least about 70% identity to any one of SEQ ID NOs: 1-845.

8. The composition of any one of claims 1 to 7, wherein the bacterial strain comprises a genome having at least 95% average nucleotide identity (ANI) with the genome of Butyricimonas faecihominis strain P40-F2a, having the deposit accession number DSM 33411.

9. The composition of any one of claims 1 to 8, wherein the bacterial strain comprises a genome having at least 96.5% average nucleotide identity (ANI) and at least 60% alignment fraction (AF) with the genome of Butyricimonas faecihominis strain P40-F2a, having the deposit accession number DSM 33411.

10. The composition of any one of claims 1 to 9, wherein the bacterial strain is Butyricimonas faecihominis P40-F2a, having the deposit accession number DSM 33411.

11. The composition of any one of claims 1 to 10, wherein the composition is formulated as an enteric formulation.

12. The composition of claim 11, wherein the enteric formulation is formulated as a capsule, tablet, caplet, pill, troche, lozenge, powder, or granule.

13. The composition of any one of claims 1 to 12, wherein the composition is formulated as a suppository, suspension, emulsion, or gel.

14. The composition of any one of claims 1 to 13, wherein the composition comprises at least 1×10³ CFU of the bacterial strain.

15. The composition of any one of claims 1 to 14, wherein the composition comprises a therapeutically effective amount of the bacterial strain sufficient to prevent or treat a disorder when administered to a subject in need thereof.

16. The composition of claim 15, wherein the disorder is cancer.

17. The composition of claim 16, wherein the cancer comprises a solid tumor, soft tissue tumor, hematopoietic tumor or metastatic lesion.

18. The composition of claim 16, wherein the cancer is selected from the group consisting of leukemia, acute leukemia, acute lymphoblastic leukemia (ALL), B-cell, T-cell or FAB ALL, acute myeloid leukemia (AML), chronic myelocytic leukemia (CML), chronic lymphocytic leukemia (CLL), e.g., transformed CLL, diffuse large B-cell lymphomas (DLBCL), follicular lymphoma, hairy cell leukemia, myelodyplastic syndrome (MDS), a lymphoma, Hodgkin's disease, a malignant lymphoma, non-Hodgkin's lymphoma, Burkitt's lymphoma, multiple myeloma, and Richter's Syndrome (Richter's Transformation).

19. The composition of claim 16, wherein the cancer is selected from the group consisting of a sarcoma, adenocarcinoma, and carcinoma.

20. The composition of claim 16, wherein the cancer is selected from the group consisting of head and neck cancer (including pharynx), thyroid cancer, lung cancer (small cell or non-small cell lung carcinoma (NSCLC)), breast cancer, lymphoid cancer, gastrointestinal cancer (e.g., oral, esophageal, stomach, liver, pancreas, small intestine, colon and rectum, anal canal), genital cancer, genitourinary tract cancer (e.g., renal, urothelial, bladder, ovarian, uterine, cervical, endometrial, prostate, testicular), CNS cancer (e.g., neural or glial cells, e.g., neuroblastoma or glioma), skin cancer (e.g., melanoma) and colorectal cancer (CRC).

21. The composition of any one of claims 1 to 20, wherein the excipient is selected from the group consisting of a filler, a binder, a disintegrant, and any combination(s) thereof.

22. The composition of any one of claims 1 to 20, wherein the excipient is selected from the group consisting of cellulose, polyvinyl pyrrolidone, silicon dioxide, stearyl fumarate or a pharmaceutically acceptable salt thereof, and any combination(s) thereof.

23. The composition of any one of claims 1 to 22, wherein the composition further comprises a cryoprotectant.

24. The composition of claim 23, wherein the cryoprotectant is selected from the group consisting of a fructoligosaccharide, trehalose, and a combination thereof.

25. The composition of claim 24, wherein the fructoligosaccharide is Raftilose®.

26. The composition of any one of claims 1 to 25, wherein the composition is suitable for bolus administration or bolus release.

27. The composition of any one of claims 1 to 26, wherein the bacterial strain is capable of at least partially colonizing an intestine of a human subject.

28. The composition of any one of claims 1 to 27, wherein the composition is suitable for oral delivery to a subject.

29. The composition of any one of claims 1 to 28, wherein the bacterial strain is viable.

30. The composition of any one of claims 1 to 29, wherein the composition comprises at least one more additional bacterial strain(s).

31. The composition of any one of claims 1 to 30, wherein upon storage for 6 months at 4° C., the composition loses at most 3 log colony forming units (cfus) of the bacterial strain.

32. The composition of any one of claims 1 to 31, wherein the composition further comprises one more additional bacterial strains.

33. The composition of claim 32, wherein the one or more additional bacterial strains is selected from the group consisting of a strain from the genus Collinsella, a strain from the genus Alistipes, and a strain from the genus Lactobacillus, and any combinations thereof.

34. The composition of claim 33, wherein the strain from the genus Collinsella is a strain of Collinsella ASMB.

35. The composition of claim 34, wherein the strain of Collinsella ASMB is Collinsella ASMB P121-D5a, deposited under accession number DSM 33276.

36. The composition of any one of claims 32-35, wherein the strain from the genus Alistipes is a strain of Alistipes senegalensis.

37. The composition of claim 36, wherein the strain of Alistipes senegalensis is Alistipes senegalensis strain P150-D12a, deposited under accession number DSM 33382.

38. The composition of any one of claims 32-37, wherein the strain from the genus Lactobacillus is a strain of Lactobacillus ruminis.

39. The composition of claim 38, wherein the strain of Lactobacillus ruminis is Lactobacillus ruminis strain P167-B1a, deposited under accession number DSM 33536.

40. A food product comprising the composition of any one of claims 1 to 39.

41. A method of treating cancer in a subject in need thereof, the method comprising administering a therapeutically effective amount of the composition of any one of claims 1-39 to the subject.

42. The method of claim 41, wherein the cancer comprises a solid tumor, soft tissue tumor, hematopoietic tumor or metastatic lesion.

43. The method of claim 41, wherein the cancer is selected from the group consisting of leukemia, acute leukemia, acute lymphoblastic leukemia (ALL), B-cell, T-cell or FAB ALL, acute myeloid leukemia (AML), chronic myelocytic leukemia (CIVIL), chronic lymphocytic leukemia (CLL), e.g., transformed CLL, diffuse large B-cell lymphomas (DLBCL), follicular lymphoma, hairy cell leukemia, myelodyplastic syndrome (MDS), a lymphoma, Hodgkin's disease, a malignant lymphoma, non-Hodgkin's lymphoma, Burkitt's lymphoma, multiple myeloma, and Richter's Syndrome (Richter's Transformation).

44. The method of claim 41, wherein the cancer is selected from the group consisting of a sarcoma, adenocarcinoma, and carcinoma.

45. The method of claim 41, wherein the cancer is selected from the group consisting of head and neck cancer (including pharynx), thyroid cancer, lung cancer (small cell or non-small cell lung carcinoma (NSCLC)), breast cancer, lymphoid cancer, gastrointestinal cancer (e.g., oral, esophageal, stomach, liver, pancreas, small intestine, colon and rectum, anal canal), genital cancer, genitourinary tract cancer (e.g., renal, urothelial, bladder, ovarian, uterine, cervical, endometrial, prostate, testicular), CNS cancer (e.g., neural or glial cells, e.g., neuroblastoma or glioma), skin cancer (e.g., melanoma) and colorectal cancer (CRC).

46. A method of modifying a gut microbiome in a subject, the method comprising administering a therapeutically effective amount of the composition of any one of claims 1 to 39 to the subject.

47. A method of treating a dysbiosis in a subject in need thereof, the method comprising administering a therapeutically effective amount of the composition of any one of claims 1 to 39 to the subject.

48. The method of any one of claims 41-47, further comprising administering a prebiotic to the subject.

49. The method of any one of claims 41-48, wherein the subject is selected from the group consisting of a human, a companion animal, or a livestock animal.

50. The method of any one of claims 41-49, wherein the method further comprises administering an immune checkpoint inhibitor to the subject.

51. The method of claim 50, wherein the immune checkpoint inhibitor is selected from the group consisting of PD-1 antagonist, PD-L1 antagonist, CTLA-4 antagonist, adenosine A2A receptor antagonist, B7-H3 antagonist, B7-H4 antagonist, BTLA antagonist, KIR antagonist, LAG3 antagonist, TIM-3 antagonist, VISTA antagonist and TIGIT antagonist.

52. The method of claim 50, wherein the immune checkpoint inhibitor is a PD-1 or PD-L1 inhibitor.

53. The method of claim 52, wherein the PD-1 inhibitor is an anti-PD-1 antibody.

54. The method of claim 52, wherein the PD-L1 inhibitor is an anti-PD-L1 antibody.

The application's sequence listing, which the Patent Office published only in electronic form, follows.

SEQUENCE LISTING (847 sequences)

SEQ ID NO: 1 - DNA, 77037 bp, Butyricimonas faecihominis
gggttaagtagtactatatcaggtttaaagcaaatcaatcggattataaaacggataattaaaaatggataaaatatattacgccaaggcttacgaccgaaataaaaatattcaatattttctttccaatactctttaatccctaaataataattagttactcctccatatccggatttagtgggaacagttattaataccctcattgttagtgtttcaattgatatgattaaaataattaagaacattgaacatcaacggttaatctattttcgttttctgatgttatgcctttttggttgttcgtattggtagctatccatagaccatacatcagcacgatgagaaattcagattacaaaatttttcatcatgaacatagattactaaaccataagtttagttggaacaacatgtgcctctgttcaactaatggtgtaacaatgaaatacaataccggtataattgtaaccatagttattagtagctgggacttaaaactcaatttggattgaatatccataacccacatatatgtaaaaacatataagaatagcacggcaagtttgaagaatctatcataaaaagtcaaactgacatatccgaaattggcaaaagacaataggagaatacagaacccccagaatttgacattctgctcccaaaattctttccctatttttttatatagtatatagatcacagccaagacaccgaaaacggcaattgtttcacgaagcaaatagaactgattaccatactcgcgtatttcctctgcatactttccaacagactgtatgatattttgattcctaacgctctctttgacgtagttttcaaatatgccaaattgtgcgatattagtgacaaacgcgattttcgcaaagcgaacgatgaatgatacgataagaattaaatagtacactttaaacctatatcgcaagagtaggtttaatacagccgcgacacataaggcgagtagtgaatagtgaaaacaaatacataacgcagataaccaaaggtacttaacggctcctgaattaaggtatctcaaatagaagccagtaaaaacaaatgctccgctccaaaagcgaaaaccgagaaaccaatagtattctacagtaaaaatcactcccaggaagagtagccatgcaggaattgacattttctgcatatataatggctggagtggttttacgactccaaatataaatagagaagtatataccacacacgcacaagcagagaaaaaattccggttatcagcaattaaaccaatgaaatatttaaataatacaggatatatttctttgccatattttgatgttccagagtccatccattgctcaaccaatgatttgtcggcaatacgatgaaaatgctcataatgaaccaacaaatccatttgtggctcataaaaccaaccaaaatagaaagaaaagataataaatagaatgggggcaaacctttgtctgaaaaacattaatgacaaacacagtcctacaaaaggaataaatgtcattattacagacaagattacaattaaggctaaagaaatagcccaatgtcgagaattagtatctatattgtatatcctattgtttatcaacattaccaactcttactttattggctaaatataggcgcaaaaccaaacatcccacgttcgctataatcaaagcccaaataacacttcctatgctaatactgtgagtaagaatcaagacaaggacaacaatgatgtatatgattgcagaataaatggttgtcatatttacctcattgatttttccaagtacgcccaaataagggaaaccgaacatgtcagctggcacactaatcgccaataaaagcaagaataggttgaaatacgtggttatacttgctgtttcagtcttaataaaaatcggtataagatacggtgataagaaatatatacaagctaaagcgattgtattggcaatacataaaagcaataccatcttagtcgctctacccatattttttatccttgtgaaatatgggtaaaatatctgagataaaagcggagaaacaaatgatgaatacgcattatgaagtttttccgcagctgtatataatccgactgcaaaatctccaagaataaagccaagcactaaggtattcattgttttataggctctcatcaaaaaagttgatgagaaaaacggaatactatccttaagataaaatttcacttcttgtgccgagactatttgaagtttgatcccgtatcttttttgggcaatgaataaagcgacaatacctgaaacaaatgtttcaagagcatagcacaacatcaccaatgcataatcatcagtagacttaacgattaaaaaaataggcaatatacataatagctttattggcacgctgatacgtgttatatatttaatgtcctccattgaacggaaaagccaatagggagcaatgacaacccctatcaaacgaataaaggctaatatataaagcgtgagttcattccttagtgaaggaatcaaccctacaactaaaatataaacaaatagagaacagagtatgagaaaaaacttacattgcagaatagaagaaactatccttcccaatttttcttgattgtctctattattgacgacatgcctgacattagataaatcgaaaccgaactcattgaatatctgaaagtaaaagctaaatataatggcaaaatttacaagaccgtatttttctactcctataacgttcaacaaatatggaattagtagaattggtataatgctactgaaaccataaaggagaaactgattccaaatatttgacaacaatcttgatttgaaaacttggcttaatgtcatcttcttaaagcaatagattttctgtaaatctgcaatcagtatatgtgtacgtttattgggagggtaagtcttggtaaacttaatgattgtctacctctattgcttaaatattccacagaaatcaagtatcactttatcatctttccacggtagttctttgaaaggtgtatgggctgtaaggaacacaacaatatcggctttgtcataagcctctttatagtctgtcaacttgaacacgttatgttctttcacatttggctctaccactaaaatgttggcattattacatccttgcattactttagttgtgatatattttgctggagattcacgcaaatcgtcaatgtccggtttgaatgccaaccccatcattgctaccacaggcttacagtgatttttcagttcaaattcaaacatggcgttctttactttttcagcacaatagaacgatttataattgttgatttcgcgtgctgtagaaattatgcgactttcaaccggaaaatccgctgtaatgaaatatggatcgatagcaatacaatgacctccgactccacagccaggttgcaggatatttacgcgcggatgtttgttggcaagcctgataagttcccaaacattaatccctgccttgtcgcaaatcaatgaaagttcattggcaaaagctatctgcacgtcacgactgctgttctcagtcagtttgcacatttcagcggtcttgcaattagtccgatgcagcgtcccctgtacgaactgcgagtagaactcgattgcttttgttgtactttcttcgttcataccgccaatgacacggtcgttatgtaccaactcataaatcacattgcccggaagtacacgctcggggcaataggcgatataaattttaccttccaattcaggacgctcagcgaaaattaagtcacgcattttatcagtcgtaccaacgggtgatgtgctttcaattacatataagtcaccttccttgagaaaaggaagtacagcacgagttgccgcctctacatacgaaatatcaggctcatgattacctttgaacggggtgggaacaaccataaagtaagcgtcacttgtctccggcttcgtgcttgcgtgcaatgtcccgtttttcacaacttcttgcagcatttcttccatccccggttcaatgatgtggagcttaccttgattggtcagctctacaactttggggttgatgtcaacacccgttacctgtactccgtgctttgctgcgataatggctgtaggcaatccgatatagcccaagcccataaaacatgctttcataaaattgagtttaattgaaattcttttgattggtcattcatacttttgaacagttcatccagctttttcacaaaattgtctttttggctatcggaaagttccttatcttttaactgctctataatggaatgataaagagccttttctccgcttgtcatcttgttgtttattaataggaatttttgttatagcttggctatccatagccgcaataatcttgactataaatcaagcagtttttgtacgtttcttgtaacgcttgtacaaatgaacttttgaaatatactgtaactgtgaatatctgtccctatataagcaatagcctgttctctcataagaaacatggcctttttcttaatccggttgccatacatacccgctattgatggaagattaatctggaatttcacacccatgtcttttagctgtcggtaatccgattcatccatataagcataacgctccggatgggcgagaacagggtggtatcctttagatttgatgcgaagcaggatatttttcaagcccatcggaggactgaaataagaggtttccaccagcaggtggtcgccattctcgcctaaaggtagcaggtcattctttcccagccgttcctcaaagagattgtcaagcatgttttccgctgcaaggtgcagttgtacgccacctgtgtaagcagcctgcaattctgcaaaacggtcgcgaagatgggcagtcgtattgggaatgtcttccatgatgtgcggtgtgagccatacggatttgatcccttgctcctcatacaaacgtagaatttccaaagattcgtccatcgtttgtacaccgtcatccacgcccggaagaatatgcgaatgatagtctgtaaaaccgattagctttattatattttgtttttccctttttttaaaaaaccacatataatgacataaaactttttaatcattcccgattccacatgacatatatgcggaatccgggaatgaattgattgtcccggtgataaacttcaccaccagtttcgcttgccgaaatgatttatcaacccggccccaacacaagctaaaccgatacagatagccgcaggaggacagataaatccaccagccaatactccggcttttgttgcggcaaccactccgactcctttggtaatcaatgctgttttaccaaatacacctacagtaaccatacccgcaccgaataaggtcgctttgtcttctgtaaaatcgttctgtgccatagttgtgatttttagtgaaacaatagggaaatcaaatttacattcttactccgtatttaattgcttgataatcaacgatttactctatatatttttcatcggaaccatagtgatattccgaaccgtaaccatagtgataaccataccgatagccataacggtatccgtagcgaccaccgcttccctcggttccattcaggatcagggacatgttcttgtattttttctccccgtagattttctccagttcagcaagcatactcagttcaagcaatcctgcacgaaccacgaaaatagtacggtcagccagcttctcgattatctgcgtgtcggccaccagttcgatgggcggacagtcaatcagcacatattcgtattgttcccttacggtatctattacctgtttcagccggtcgtcgaacaacagttcggtggggttgggaggtatggtgccgacaggaaggatgtccagatatttctgtttcggattggtgacaattatttcattgagattgtcaatcctgccgccaagatagtcgctcaaccccttggtaggagagtcgatataggatgacgcagagccgtgacgcaggtcaccgtcgattaccaacactttcttccctttaatggcaaagctcacggcgatattcatggtcaggaacgacttgccgctgcccggattgaacgaggtcacgatgatgacattcgatgccttatccttgccagtcatgaactccaagttggtacgcaatacacggaatgcctcgttgatgatgtcacggctgccctccttgacaacaatggccctgacttcctgtggtttctttctgaatattcctttcttctttcttgtgaacagcggaatttcaccgatgaacggtacggttacgctttccagatcttttcttccccgtacacgggtattcatgttctcacatataaagataatgactaccggaataagcagtcccaaagcacacgcgaccattaagatgtttttgcgcacgggtgacatcggcaacatgctaccgtggggcggggcaacaatacgggtattgtaggccgtaaatgcctgtgagagttcgttctcctcacgcttttgcagtaagaacaaataaagagcctcctttaccttctgctggcgttccaccgagagcaggtatttggcttgtgtagggttagctgctatacgtgatgttgtctgttgctccgtctgccgcaaactttttatctgcgaattcaaggttactatctgattgtcgatagacctgattatcgccccacgcatggatgccagggcctgatccatatcaacgaccagcggattttccgtactactgttcgcaaccaggctgttgcgctgcaacagttgtttgttgtattcggcaatctgcgattcaatattggcgctttcaatgccggaattggccggaagcagttgggtacggttggcgtcattggacaaatagttccggatgtagcgggtcatgtagagctggttgttcaaagccagaatctgcgcattcgtctggctgctctgcgccatatacatgctcgaagccgcctgcacgtcgggtaacagatgttcggacttgtaggatgaaatgtcctcgtccacgttgcccagttcctgttcgattacgcccaaacgctcgttgatgaacatcgaggtgctgatagcgatctggttcttgtccttcacccagttctcattataaacggaaatcaacatgctcaatacatcctccgcccgttgtacagaattatccctgaatgacaggtcgataactgacgctttctcattattcaatgaaacggacagattggacgagcaggagtttacagcatcatacaaactggatttacctacatacaatgtgtatgtctcgcctttcacataattgggggttgcatggataatgattttccctaatggcgtagtgatggagtcgagcaagcggccctttatatcctttccgtcgagctccgtcccgttacgtgtaaagtcggataagagtaatgtgctgtctggctgtacttccaatgtaaacccagccgattcgttttcaggaaagtcacttatcgttacatccactggtaatgtcagtccataggccacctgacggtggaatttccccggaacgaagtaattcatatccaaacgaaatcgtttaactacctcggtcattaaagccggcgactgaaaggtgatgagttcgttatttacattggtgctggactggaacaacccaaactccgaaaaggattccagatccggggaaaccgacttgcctttggaatcctccttgatcaacaccgaagcagtgcgtgtatatacggcaggggtacacagcagatagacagcagcaacacctgtcgttatcgccaaagacaggacgaaccacttccacctcgcgaggcacaggtacaacagatcctgtatccgcaggaaatcatccggctgtcccggttttgtattcttttgatttacggccatatcagattctatatttatttcacgatcaacacggtaatggtggtcagcagcgaggccaacgataaccaaaaagaggtagaccgcacgttgttcccattgactgtcgattgtcttgccctgaccgagttaggttcgacataaacaatatcgttctgttgcaggtagtacacgggagaagcataaaggtcatatcccgaattcagattgacccggtacagggtctttttgccgttttcctcccgctgtaccagcacgttctcccgtttcccgtagacggtaaggtccccggccatgcttaaagcgtccaggagcgtcagcctgtccttgtcgatattgaaacgtccggggttggcgacctcacccaacacggaaacggtcaggttcatgaattccactgttactaccggatcttttacgaggtttttcgagatcaactcttcttttatgcacaaggcaatctcctcgcgtgtcattcccgccacatggatatgccccagcacgggaaaatcgatatttccatccttgtttatcgtgtatcctgacattccttgattgttggatgcttctgatcttataccgatttgtcgggatataatcggaaggttgaaaaggtccatcaacaaagggtctttgctgttgaccaatatggaaatcttgtcttcgggacgtaccctgatttccaatggattaagaacctgctctgccatacccggtttcaggtccgtaaaataagcgactttcggcgcggcacatgatcctagcagggaagccacggtcaataagagtaaaatgtatctgattttcatatttcattgatttttatttgttggttgcctgtctcgactgaagctgtccgatacgtttcgtcagtcggatattggtgaaagtccatatcaggatatcgactagtacgatccagtttacattcagataaagggagagaagaatattaaacagtatgaatacggtcgatacggatatgacgataatcatgacacttcgctgctgcattccgacagcaagtagtttatggtggatatggttcttatccggcaagaacgggttctttccgttgcgtacccgatgcagataaacccggaccacatcacagcaaggaatcagcagcggggagaatgccagcaccatcggatttatatgtaccgtattatcatctgtcccacacatagtcaacttgagactgagaagacagagcatcatgccaacggtcaggctgcctgtgtcacccatgaaaatcttttttccgtgctcggcattcccgaaaacattgtaataaaagaacggcactaacacccctaatgtggcgaacgccagcatggcatatatatactggtgaaacataagaaaagtcaacccataaagcaaacaggcaatactgcatagcccggaagccagtccgtcaatgccatcgatcaggttgatggcattgatgatgaagaccacgaacagaatggtcagaggataccccagccataatggaaccgaatgaatgcctagaatgccgtacaggttatcgatatatataccaccggcgataagcatcatgccgcacagaatctggataacgaacttggctcgataacggataccgatcaagtcatcggccatgccaaccagatacagaaccatgatggagcagaaggcgaaagccaagggccgaacatcgttctcgatttcggacaacatctccgaatgccccataaccatattgatccccagcaacaaggctacggtgaaaaacactaccggcttgaatgcgatgccgcccaaccggggcacggcacaatgatgaatcttccgttcgtcgggaaggtcgaataaccgcttgcggaaagcgatcaacaaaatctggggaatgatgatacccgcacagaacacacagatcaggaatgcaatactgcaattaactatccaaaaaatcatattatgtcagaatttgttctttacttgtgcaaagtcatggaagagaagagaatttcatcacctcttttttgtgccattccttgtaccgcttcatcgagattcctatcccaacaagttccctgtaccctgatactttctttctgaagatgtgatttttgccgtaagcctggagttcgtcatccgagatgctgaccattaaaacgggaaatgggtaaactttatgcctgagtacagttacatcgtgtgtcacgaacagctgactcaattggtaggcggattcttcgaatgcgtgccaatagtcacctgctccatacagacgaatgaatcgtccggttgtatcttctgtgtgaatgatgtcgaacaggcatgtttcgatgagttccatcaatggcatccagcaaggctcagttccggaattgtaaccattcattactttcaaaaatgtttcatccgttgtcgggaattagcgtatattcaattttacaaagccagaaatgcaggttttatcctcattgtaacatgcgccgggctgttctgtacagatgcatttgtcaaaacagataacagaaaccagtactcatcttgttccggagcataacctttcatatccgctgctcgtccaataggtcatgatcaatgcacaccgctttaactctggaccatataccatccaaaattgagtcgaccatacttacatatcattattttataatagcctgatatattcgggattgacttccactcctacggaaaagaactcgggcagctccactaacagacgtttcgttttcgacccgcgtacagtcagcaattttccttcataaccgtccaaaggaccgcctacaatacggatgtgccgtccgcacatagagggtgtcaattcgccaggaagataatatttcggatttttcgacacacttacagcatgtatgaaccgctccatgtccgcatcagcgacagtcatcggatttttgtaaccacctcccttctggaaacgatactgtatcgtgggatacttttccacaaacggatcaatagcttcctgggtatcatgaacaaaaagcaaatcctggataaagggaacttcttcccgagtccgtttgccgccatgaacactcaactgctctttcatgggagtgaacacctcgaaatgctcgttcaacagttgcttgtatgcgggcaacttggcattggcccgtttaaggtcgcgcatcacgtaccagcatgtctgtttttcaccttccgaagtagccatattttggatttaggacaattcttctaatcctgcaagattgtaaattatactacatatcaagcagttacaaacattcttttcaaaagctggagaataacttcccatgtcagtatatctgttcatgtttacaccataaaagattccgttatctcacacatgcacaaaatctctgaagccgtttccggctccatcttctgctacttctctccataagagaagtatttgaatataaaattggttgtaatcagctagtaaacaatatttgttttatttgcttggaagacgattcacttaacaactgttgagtaaaacctataacatctgtttgaaatgaggcactcggttgaaaattatatcatttttatattgttattttcagtgaattgtataattttgtatcccaaatacttctcttatggagagaacggaatttttgtcgaacaatctctctatataacttacactcagacttatttgtaacaaaaccttttttgcttcattattgttagtctgaacttatcggtcatacacttcccaataattagacgttttcatactatatattatgtaccactttacagcgcatgacgaggatacttgttttcatgccaaatttttgtcacttcatgctaagtaagtctaaacgggtttcaaatgggctacgttctgtagataaggagcaagttttcttttacccgcatttaattgcttatttcctctataaacagagaaaaaatttttgttttccccaacagatagtaagtaacttaactctatctgtttatagagaaagtatggcgaagttggaagaaagttggttgacagtaaattggtatatagattccttgtttttataaatcaaggtataatgctgggtccccaataacagtattttgagagaagatgtagtatttatctgtatttatcgcaaccggatattaaaaaatgtccatgatgcttgggggttcccaaaaagttgatagtcgattgaataagattgtcagctgcgttgaacctaaatcgttatccgatattatgcaacacttaggattaaaagacagaaaaaaaatgcgatgaatgtccatctaaccttgatgattattagagagagtgtattgaaaaatgacagaatcggataatcctgcaaatcattttgatagtaggtatcctaattgaattttgtcagactgtctatgacagcttatcttccgcaacggagcggcatacgaaagccggttatttattttgttttccttttttctggacgatttcgttgtgcttttcgaccagttcggggaaattccttctgatgaactgcccgaacgagcagtcgttgaacccgaaccgcctggccaacgacttcacgctttcggttgtcgtgccgtacaggtgcatggcctcgctgtatttctccatgctgcggcgggacaccgcgccgcccgtatccgtcctgaccattcccttccgggcatacagttccggctcgtgttccttcaggtagctgcggaacgcttcgggttgcagcccgaactcggcggcgacctgtgccgtcggcagcccgctttctttcagccggcggatggcttcggcatatttggcctttgtcgcggggttgtatttccggactttagaccagtccactagccgcccttcctcgtaggggatattcttccgcctgcataccaggtccagatgccacctttgcaggtgctcgtagaatcccttcttcgacactcccgtcttcccggctatccgtgcggccgacatgggtgtcgtggcatacagatgcaccgcttcggcatacttctccaccaactccggagagggggcgtgcacggtaccccgaccggtgatttcccctttccgctgccgtcggagagccttcttgcgtatcctgatgcgccgcttcaccagatccttatggtagaacaacaggtgctgttccagtccggtataggaaagcccgcaggagtcggcaacctccggcaccgtgacatacgagttaccctgcaagagcctgacggcctcagcatactattccttgcaggagcggcgcgtgccgcgcggcagcccgtcaccgatacccagccaatcgcgcaccttctcgcgccattcgattatctcggggtagtgcgtacacggctgcctgcccagattcgtgccttccaacccgaatttacgtgcaatccgatatgctccatgctcccgcacgcctcgatggtatccttgtatttgacacgggtagcgggcaactgtccccggagctgtcccaacttaatctgcccggcctcttctttgctgcacagtatagcgtaacgggccagcacgagttcacggtggtacttggtcaggtaacaccggaaacccgattctgtcacttcgcagatacggcatatctcacagccggaaagctccgtggaagcgtacatctcgatcgctcggcggtatttctcctccgtctccagcctgatgcccctgaaacggttgctctccttactgtcttttccggatgtcttcataggctttcatgaggcatctttcaggacaaccgttcttccacctgctcgaacgaagcgtccttgagtatcacccgtttttccgcatcgagcaggtaaagggtgggcatcgccttgaggtcgtacacctgttcgcgggtaagccgctgatcggcatcataaccatctatccaaccggcgggaaattccgccttttcccacgcgggggtcttgccctccacacacacggagaggagtttcagacggccggactccaacaggtcgttcacaaccggggacagggtgagcaattccttcacccggcggcagtcctcgcaatcggggtcgttgaagtaaaccagcacgtagtcggcctttatgccggagagctgcctgcgcctgccgtcccggcaagtgacggtgaaatccgccgccacgtctcccggacggttcttcatggctatttccaacaggtagcggggacgtatcttgtccgtatcggacaggcaggggttgtccagcagtgcccgcaatacgaggatatgcagttcctcgtcatgcatgggcgaattgggctcgtagaggtacttgtcactcagcccgatgaagtgatacagcatctcctgtccggttgcggcgcggcggaaaagagtatcgatggcagcctgtgcccggtcggtatagggcaggatgccgaggaaatcgacaaaggcctgctcggtgatttcaggacgggagatgagcgacgtatcggcaaaatcgaagtggtcccagtaatgcagggacaagtacgccgccctgtcttcaggcgccgtcagcgtgacaggcacgtcgggcagacggaattccttggttttctgctgttgggcatgtgaacaggaaacgagactcatgcccaaaagacaggcgaaaaaagtatgattcagcatcttcatatcttatgttgttaaaaaggcgccggatgtggaaacgtccggtgccgttgcatataccggttcggaaaatctcattcgccggcagacggttcaagtacgatgtgcggactggcaaacaggctggacaggctcgggtatgtcgcatgataaaccatgcctccgtcacctgtgtaatgcagttccacctcgtccgtgtaccagttaaactcatattccttgcgaagccgaagttcgtactggccgtcggctgttacgcttaccgacccgatacggcttccgttgcgggtacgctcgaaggatacgaaagcatccttcggtatgttttgcaccacgccggcggtatttttatattgaagcgtcccggcaatcgattggttcgacacacggaaagtcttggaataatacactacccggctttcatcggacgaaatcacgatgtccccggcacttacgacgctattcacaaggaacggcagggtcttgcgttccccacgctgactggaggcaatattgtccgtgttagcaatatcatccgtaccatatcgccgttccgtctcccgcttggcatccacggtatagacaaaacgcccgggaatcgtgggatgcgctttcagtttggttccgtccagtctgttttccgcaagacggccggcatcgattttcagcataggcgcgtcgatatagatttcgaacgcttggccgaaaggatccaccgacttgttgtcaaaaccggcaaagctcgtcacatcgatgccgatatccacccgctggtcgggttgatatgtccattccaacggggtgactttttccggtatgtctgccggtatggcaccggatgctaccgtgcggtcaggctcgtcggcctctccctgccagtcgttgttgccgtacttcacgcgggctccgaaccggaacggggtgtagttggccagctcgaaagtcgtactgcggtatgatcggccgccatatataccgggattatcctcgtttgcatcttccggcaataccggtccgagccggttgtcgttggaggcgatgtggatcacctcggcgctccgggcacggttggtcttcatgtagatggaatatcttccggtaccttgcgacgggctgctcaaaacttcagttctcggtttgaacatcagcatacggccgccttggggattgttggtctgccaccaattgttcgattcatcgggatagaatttgcaatcgaatgcagtcactccggcatcgggttcctcaccgtcctcgtaataatccaggtattgcgagtagagcaggaattcgtctttgccttgcgcattggcaggattgtcgttccctgtcccttgatcattgtcggacctctctgccagcagcatgtcaaactgcacgttggctccttttttctgtggaaccagacgatagtatatcacttcatcttgtacgcccgagcctacggcatcgtatttgttcagtccctgcaccgtgatggatacgagattggtggagtatttgaacttgcgccgcatcgtttcgaaatattcggcttcgatatagagcgtgccctcgtagccgttttcctgattcaatatgttctcgaaatagacacgctggacgccgggaccatcggccgtgtagacaaatttgtaatccggctctttgccttgatagacggaagagatttcaccgctgctgtaccagtcattgtccgcctcgcgcaccacgggcagttccatgcccgaagcgttgcggatatccagatcgccaacggaaaggtacacattcatcgggaacagctccttgggacagctttcgggtatggtgaacatggccgtaacatgggcacggttgttcttgttggcaccgttccctaaattaccgtatatttccgtcccgacccatgcaggcacgaaagactgcttcctgatcgtgatgaccttgattttgcgttgcagccgtcccttcttgacaagcagcgtaccttccagtttctcgttattttccaaacgaagcaggtgtatctggatatgtccctgtccgacaccgttcacgacctcgaatttcgtctcgaatgtctgcgtcgccaccccgttgtctatccaggagaccgttgcggcatcggcttcggtgatggctttgtcattttttcctttaatggtataattgagcgtgtagctgcctccgttttccgtaaagctctcgtccagtacgacaaaagtcttctctactgtcaggatatagtccgtatcttccacctcgttcacttcatcggaaatggaaatccatacgttgttcgtggctgccgcttccaacgcctcggcaaaggaggcctgaccgaaagatagcgcgccctcgatgtgaagcttgtaatggtggttccggcgcacgaggagctgctcgcccttgtcgtcaaccagcaggacacggtagtatttctcttcgtcctgatccggaagatgtccccgaagaattacgctgacaggggcatcggcactgttctcgcactcgaagacatactggttcatgctggatgtcacgtccgtaatatcgctcatcttggcatcgttcacgggaagcgtgacgaaggggtcgtcgctggaaggccacgtgaaatcaaagcctttcttcgggtggtgcggggccaccgttccgaaagcgttggtgttgcagaccgcaaagcccgtaatcacgatatgcccgttattgtccgggttgtcgacggagattctcgcgtggttgcggatcagtttgacggaattgcccgaggtggccatctgttcggctatattgctgtcgtttcctgcatcgcaggcgaaacggccccaatagatcatgcgtccggacgagccctccaacactgccatgacctcggactccgacttgttgcggaaactgtcctccttgaattcatccatattctggttggccaggaaatggatggtccgggtattttcgggcacctcagccttgaatgtgccctccatctcccccgggccgggcttctgcaccgtgacaccggccttgacggtagagatgaaaagcccgtaactgtcaaagcagaaaagtgtcatatcttgcactccgccaccgtcagggtctaccgcacgggtgacgacttcctgcatcgcaggaatttccgtcttgaaattcagcatgatgtagccgtcgcgtgcctcggtctgcggattctgccacaactcgctttcgctgcacgaagcgagcagggccgataccgcaagcagggcgacaagcttgtctattatttcctttatcatatttcgtttctttttgacaggtttctacgtttattcctttttaccgtaggcatcgcgtacacaggccactccggtaccgctaacggtgtatttctcattataaaatcttccgcttgcgctgtaatagtactgtccgttcaagcggtagtctatggcgtctgcatcctggtctttcgagccctggaatttaaaaatgattttaagttcggcttctgtgggcaggcgccagtcatccaaggtaaccgtcctatcggttttcgggtctttatacgtttctacataatgcgcgcagtgctcgcgtgcaacgcggacactgttgtcactcccgtccagcttcaggtttcctcctccaacttggaattcgcctacacaggaacctatcatgaatgacggcgagaccaattgggcattgtcctgtcccggatccgtaaccataagttccggatggtatgtatcctggaccatacgtggacggccaagagtatattcactggatgtccctgtcaatacaatggtgtacattctgccgttaatttcgctatagcgggattcccgaagtctgtttgagtttgatgtgtaatagtattcatataaatcagactgtccgcttccatcattcctcaattttgctacttttgaaacgaagaatccgtccggaggacctccaaataaaccatctgtccccgttaggtatctatattctccgttccaactggagatatttctggtggcaagggcgattccggtaattttatcacctacatattcataggtagtcgggttaggatctgaattcttgaaatcatcgcggtacgagtaccacccctggatattcgtgatatattccaacggatactgctcaatggttacggtacgttcgttgccgtcctcatttgttacccggacttcgatataacgtatcgtattgttcctggggaggtcgctgtgtacatccagcttgccgttgagccccttgtcgggagtaatgaggatgttgccatggctgcgccatctgtatccggtactcactccccattcgttatcgtttggattatcggggtatcttttctccaagttctgttcccttccgaacttgtctatatagtaaacccgggtaatctgtgccgtcacttccgacgaggaggtgaagatcaggctggtgcggtcgtcctccttgttgtgcatttccaggtcgtaccggttgagcacaaggaaagtcgggcggtccccgcctccgacatttaccgtctcgtctatccaattctccacggtatatttcaaatccgtcaactgcaccggtgtggagggattttccgctccgggggcattgaccgttgccgttaccctgtagcaggtgttgcggttcagggccttgccgttacagacaggaatctggtagtagttatcgggacgcagttgcgggtcggtatccttctggtaagtcagggggatgttcatcaccaggcgcacttcctgctccatggaacttccattgtcccaggcatgggcatacatgtaagccgttacggtaattttgttcgccgtccactcaagatagccgccggaggtctgggcggtattcctcagctttgccgcaccgtccgcacccgccactaccgatgtggtatagggcatattgcgcaggtagtaacctatgcctttggaatcaaaagtcacgtcttggcctttgttgatggtcaccacgacttttgccgctgccctgcgcagcgtgaccgccagccgcgtgtcattcccttgcgagccgtcgtagaggacgaccggagcagcaaccgccggttcatcgttcccttcgggataggctatgccgtccatgaggaatgttcccgggacaccttcaatgtctttccctgtcaggtgaatgttctcgtcctcctgcgtcatcgccttcaaggcgttcaggttcgcgaggttttcaaaatccttttccgggtgggtgctgttggcgatcagatacacccaatacctctcattttccgtaaaagacgaccgttttacgggcagtgtaatccgtcccgtttcattggctgacgcgttcacccggtcgctccacaccttcgttttctcgtcggtatcgttgaaaatcagcacgtcgatatggctcactgcgacctccgccccttcggccggtacggtagcacgactcaccggcaacgctcccgacgagatgtcgaggataatgctgttgccgttacctcctgtctgcccgccggggagatcgtcatctttgctgcaagcggcaagaagccatgccgccgcacaacaaatcatcatattgtatataatccgtctcatcgcttgttagtttgtaggtatgtcaacctgtttgattacaatcttctcggtgctctcgcttcctgtccagttcgtggctccgctctgcatgttgatcagcaggagcgagcttcccgaaggatcccacttcggggtataggcgatgcccaacgagaactgcttgtccacgttctcgcctttcagtgcccttacccggatttcgtacgctgtatcggaagccacataaggcggtgtcacgagtgtgttgacaccatccacgttttgatataccgtcagttcatagtctgcggctgtggcatcaaacagcgtgggctgccattcctgtctcacaggacctgtgatggtgaacctaaaagagtaggttcccgctgtcgatgatgcgccgccattgtagtaaaccgtcggctgcgcgtagggggcggtccctccaccgaaaggttgcagcagttcataggaagggtaatcgaactccaactgataatctccaccgtcctcccagtcggccacatcgtatgcgacagttatcttgccgctgttgtgcatcaggcagcataccgcataatacttgttcctttcaatgcgtggcatatagaccagaccttcgcgcggctcgctgtcgaacgtgtagccgattttgaggatgtttccatgctcatcacccggtgtgttccacgaatcgctgccccaagggttctcgaaaggataaaaaggagcccccagtacaggcgtgtagttttcggggttctgcctctcttcgggcgtgatattcgtggccagcgtcttcgttaccggtgctgaagaggggacgagtgaaaactcgccggtaccagtggcgcctgccagtttcagcgtttcgtcggtctgtggcatcaggtaattatacgcacgcgttccggcttccagcaaggtcaggtccgttacacacagctctcctgcctcacctgcttctttggccgcgaacacgcccaacttgcctatgggacgcttcagttggaacgtcaagacatcttccagcggtgtatgccccgaatggccggggtcgatcggctgacggttagaaagtttcgagaagtcgattgttttggattccttgccgaacattggaagtccgtaggcttggacatctcgtgtcagcgtggtaaacgtgaaatcatttagttccgcttccgtagtattttccgtaaaggttttctcggcacctggggtactcatggccttctcgttcgcgatgatgtagaagtctaccgtttcggtagtcagggaagtcatcgtcagatccatccagaatgtagccggagtctccatgtctccgctccggaactcgtggcccgccagttgtccttttacaaaggcatagacacgaagcgagtgaatggccgattcttcgccggtcggtgtgccgtcggtttcgccgacagcgcatgtccctacgttgagccgcactgccacatcgtgccgttccccgagcgatgcggcatcttccttgacgcacccgcacggcaacaggccacagcacactgctgtaactgcccagtataatatttttcttgtattcagcatattcttttcggttcggtctaaaactcaggtttcacttgttcgatgtaccattcgggtacgcttaccgtgatttctcccgacttgaactcgatgcgtatcgggatgagcacttcatgtttggaacagtctataataggattgtcggcaaggaacctggcgaggttgacttcggccagcggttccccgttcggggcggcgctcaggcggatgttcacgttctcgtggttcttgtgacgcattatgttggtacgggccgtgagcaacgcttttccggcttcgtattcggtttcaagcaaatagtcggttgcctccccacaggcccgattctcaaaatcggtacagggcgagactccgcatatctcaagcacaggcagcgagcctgcgcgggttcccggggcgggaactccggccacttccaccgacagatcgtagtgagagctggcgaactctatggttttggtctggtttgcctcttcatcaccgctgtaaggcagtacggtataagaggtcgtagcatagtaaagtgaatcgttgccggcaacctgtttctcgtcgaaataatccccggcggcaaagagcatccggccgaaatcgcccgtggcgatgccatcgaccttcgtgtggtgggtgttccccaggcagacaatccggtagtctccggcagcgagcgggggaagcgtagccgtgcggtccttgacctgttcctctggtaagatactcgaattgacgcatcgattttctgcatcgaatacgaacatctccacccggcagatcttgtcggggaatatctccgtggtgccgtcgcccttgtagctgagcaacagcgtgttcgtgctcagacagtcgtccagatcctcacggatgcaggatgtggcggctccggcgagcaacgtcaggcagaaaacaatattcgtcaatttcatatatatgtgattgaagtgttaaaggatagacagggcggaactttcgccctgcctatcgggttatcaattaaaattcaggtgtgacaggaactacatcccagctcatgacgtcaacagttacctccacacatttttgaggattatccaaatcctcatcgctaaatgcaaagttcatgacgtaaatcttggcgaaatctgctgtaacagcaggagtgaatgtactggtagccaagtaaagaggaaccttagttccttcatttgttgtaccaatcaattttacaagaacttgaggatggttagtatttccaatattattatctttaggaaagaagtggtatgcaggacggacattgcctttctcgtaggaatgcttatactgtgtattttcatccaatgtaaccaaaggcaaggtggttgcaggactctctgttgaggtaaattcatcgttataccacgcatcagcagctgtctcgaaaaggccgaatatagaaccggggttaatatcggagttctgtatgtcactggctgttcctccctgacggtctgctttcccgaaatagttgttcaacatgacctgctgaacttcaatactcttgtacttacgctgaccttgagtaggagctgtatactcaaatttaccgatttcaattctggatacacgcggttcaagcactaccttcgctttgtaaagcgggtgtcctgcctcgtcttgaccggacacagaagtcaactcgacttctttataaaggtctagatcagtcggattttgctgttcggcgattatcaggtcttttttcaaatctacataagtagatgcatttatttgactaccgttgttacctacaacgattaccttgttcacctcagcaggtaaaaaatggaataccttatctgtgcggtcgtcaaaattacttttattgctgaagtagtgggttgcctcagttccttcgattgtttttcctttatacagggtagttccgtctgtaaagaatacctgtaaatctgtcaaagaaacctttgagttgtcttctacctcttgaccggcgcctctggttactggaatcacattagacaggtcaatgcttacactctttggggtgttgtccaactgtcccatttcatcgtctttgttgtcacatgcaacaaacgtcattgaagcagctaaagctgtcaataaaaaactcttgactttcatctttttgttatttaaaaattagtaaaaaggtttttataacttctcgcttatggattttgtctacaactggtcgatgacctgccgcacctcttcgaggttatgccgggcagtcgcggagcctgcctccgaagcacggcggaacacatcctccgccttgtcgtattgtccggccccggcgtatgccacaccgagggtggagagcagttctgccgaccgcgcggtgacttccgatttctcgagcagctccaccgccttggcatactcctcacgggagatggcgttcacggcattctcattgagtgcggagggcgaagcggggaaatagcgtaaggcggtggccatcaccttgtcgtacccgggcgtgcctttcccgtaggaatcggccaccttgtacatttccgacaggctcaggaggtcgggacgctcatcgaccatgcggcgagcctcttcgaggttaaagttgcgcacgttgtactcgatgcggtactcgttgcggcgcaacgcggggtatatctcggtgagcagcctgtggtaaatggtcggcggcacgagtttctggagttgcagctcgcagaaatcccgttcgtcggggtaacgttcgatgatttcatatacctcgtcgcgtttcagcaggttcgggaagtcgccgagcacacggacgaaaccttcccagtcctcacccttccagtccacgtggagcatctcgggagcgatagcgtcgtaacggcggatatagtcggccagcgccttggcgcggttctcggacaaggccatattgtgcgccatgctgccttcgggagaagcgtaaccggtgatgtagataccgataatcctgacgtcggtatttttctttaccagctcgatggagttggaaacggtgtccagttcggcacggttgttcttgaatccgggcaatatattataactgtcctgccggaactgcagccgggcggtgcgggtttcggcacgcactttcacgggttcaggttcaggggctatgctgtcgagcttgtaatcggggacataggcaggaagtatgcccgcccacaaggactgctccgccttgcccttgtcgcagttcacgcagccgtgtacctcttcgcggattttgatccgcccgtcgagcatccaacgctcgtagggcacggtggccgcataatcgtaatgctgccccttgctgctgtggcgtatgattacctgtgcggaatcattgtggaaagggggaagctccacgctttcgagccgctgcgcccgcaagtaaaccttgtggcgggtcttgccatcgatgactatcgggggaaaggtcacctcgcggctactgtccgccgacatgagtacgggtgtcagtgctacggtgtgctgcgtacggattttcgccttgctcaaatcgacggacatcgtcagctctaccgtgcggccctgcttgacgacccctccctgacgaatcccgatcagaggcaagtaactggtttcgttctcggcatgcaacatcatgggacaacatgccaatatcagcaataataggatgtatatgcgtctcatagtcattttcttgttatttgattatatatatcagggagatgcccgccttggtcgggccgaaataatgcttgtccttgttgcccttgaacttgccgcaagtggcacactcgtacttatcgtattgcgtgtagatgtaacccagaccgatcgtggcttcgaggttccagcgtttgcctaaaatccatgagtagccatacgacaatccgagacccgtagcccagccctgataacggtgatccttcgtggacttgctttggaacgggattctcacgccactgatgttgtagaacgcgtaaccgctgtgcaggccgaagaaatggccgttatagcgttcgcagagccagtaacggaactccggcattaccatccagtgtttgattttcttgttcttgtccttattcagcgtccacgggttgtaggcgcccgtgaggtcgagggtcgtgcgtttgcccagcccaaattccagactcaagttgggcgtggtacttgaccaatacaatagattggtctttactgcgatatcctgcgctttgacagtgcccgtgcaccaacaaaccgcaagaaaaacaccgaagatcaattttttcatattttccttattcttgttatctcattcgggccggaaaaccggcacgtcaactcccaaaccaatacttctctccgaaagagaagtggtagcgtataacattgatgataagtggctgaaaaacagattatgttcggttcgagcgactgggaatgcttaacattcattgaagtagaaccggtttagaactcggattgagacttaaaaaacaagctgtttatgccgttataatcaataaaatacgtatatttgcaccgtcaaatacttctctttcggagagaaacgggcaaatactcaacagtttatcgccttggcgggattttcccgcactatttcaacgacttgttttttaaactccaatggttgctctctgaagtttggcaaaacattttttcggttgcatgattcctgtcaaatcattccgtctcctgtctgtctctttttaagaaaaataccgttcaggaaaagacctggttttctactgtttattttttgaacggtaatttttactaaacaaatcgcaaatgcccgcttaacggctcatctgttttttcattctgacggacaataaatttcgttaatcgtgaagcgcttatttgatttttgcgtatctttgcacttgcaaaatacttctcttaaaaagagatgttttaaattgcacaacttttcagtttctatagccattttccgaatggcttttttgctgtccgtacggtgtgcgggtattatgcaaatctttctcccgattacagtgattttagaataaggctgttggccttgtccacgaccgatgtgtctaatgaggcaaggtagatacgcgtggtattctccgaatcgtgtcccatcgcttcgctgatggtggaaatcggaatgttcttgctctttgcgatggaagcccaggcgtggcgcgcgacatagcttgtcagcggtatggcaagccctaactgccggcctatttttttcagtttgtcattgacaagatgggcggcgttcttgtattgctttcgggcatccgtatccatatcccggatgatcggcagcagataaggagtcgcggacgtatcgtacttgccgacaatctcctgcatgggtttctcccacttgataaaaagctgctgtcccgtcttctggcggcgatagaccagaactccgttctgcaaatccttctttttcaggtaagccatatccacaaatgccattccccgggtgtagaatgaaaacatgaacagatctctcgcataatccagcacaggactgagcgtcaggtccagatcccgtatccggcggattactttcagcgggacggcacgtttcactgttttgtccacgcccgtatagacatgtttgaagggatagcgctgcacggtcagttccctttccaccgcacggttatagatggcgcgcaggttgcgcatgtaaaaagaggaggagttcgggcagacattgatgcctttcagaaaggtctcgtattccaccatcaggttggagtccacttcctcgaacagcaggtcccgttcgccccggaaacgcaaaaaactgttcaaggcggtcgtatatgtttcggccgtgcgccttttgcctatctttttcagttcctgtatgagttgtcgtgcaaaggaaaggaaaccgccacagtcggccggagaggagaacacttccaccaccttgtcggcggtatatcccgtgtcggaacgttcgagccgtgcgatgacgctccggagccgggacaggtcgtctgctatggcggtcttcatggagagcaggtaattcctgcgtccctcttctgtgccggaagccaccacgacctcggaaatgccggcatcccattccgaaggaaaaagcctgtagccggtatgcacttgtcttaccagacggttgtgaatcacttgatagtagagcgagccttccttcatctcgacggaagaggcccggaatttaacttttactgttgccatattacttaattttcaatgattgatattctgtcattaaagaatatggcaaacagtctggcaaggatgtagtccggaaaaatattactataataatgtttctcaatcgtaaaatgagagaaaatccaccttgcttaacatttctttacttcgatatggcggagacatgaaagaatgtcattattgcacggaacggaagaggtgcgcgcactgcatgcctctacctgttatggaatggaaagatatagaaatggtgcgcttgatgaaacggaaagccggtcccgccaatcttcatttaatatccggacatggccggataagtcatcggtaatgcagaattgttgcaatgtttcctgttcggcgcaggctgccggaaacaaccgtatagctgtacagatggcaggatttaccggcacaatgggtctggcggatgtcaaatctgtggattggatggttttccaaactactgttctggaccaggcccactcgtgcccgttataaatggccatatcaggcaacgggctaaaatattccggaccgggatgtatctgaaaccatcatttgagatacatcccggtccggagtaaatgtcgcttcaatcaacacaccctatccaacgcttgcagtccaccatcattttttgtctatctttatatattccgaatacctgatttccacatacgggttgttgctggatatggtctgacggatagctttgaccctcttccagaaccaccatcccttgtattccacccatacagcctggttaagcgtcacgggtatctttatgtcacctttgagacggttctcttcaatcagtccgctaaaatgtatatgcggcgtgaccatctccactttctgccgcagtagcgggacggtatcacggacaatgagcgtgtcgcggacggcggcgtctatcggtgctttcacctcgacctcatgccgggccgccgcttcgagattcctgattttcacgccgagccgcctgatggtttcggcatcctcggcacggaactcctcatactcgtctatggtcagccgcagtgccttggcatcgagggccatcgtcgctgaatcggtccgcatccgcttcacatcggaaagcagggctgtgctgttcatgcggaaacggtcgcgttcttccgtgaggcgtattgtccaccggtgctgcaaccagaggatgccgccgagcagcagcacggttatcagaagtgttttgtccagcctattcatatgtcacggatttttcgggaatgaaccagacaaactcatccatgtaggcctcttccaacagaaccagcccgcccttgtttttcctgtcttcaccggacaggtcctccacgaccagccctctccggccggccagtccgccaagcttcatgcgggaaagttccggagaagcgatgattttcacataagtattctttgtcataaccggcagtttaaaaatcgggttatttatgcaggttctggcatttcagcagctcccggatgtcggcccggatctcgtgcaggtcattctgcaccgtgttgagctgcatcatggtcgcctcgaacacggacttgtccagcttcatggcgttgatgcggtcatactggttcttgatttccacttccaaaccgatacatttggtctccagttctgcaatctgggccgtgttgttcacatgctgtatgtacagtgtcagcgagaacgaaagtaccacgacgataatcttgaagtacttcactacaaattccttgaattgttccatatcattattccattaaaagtgagaatgcctccctgatggcccttatcagaacctcagccgccgcgctgtcccggaatccgtagatgaccagcgcgaccattatcaccagatatatccaccaggcaatttcttccctggtgactttatgtttccttttcaccatctgtcatagggttttggggtacgatcacattgaagatgacattgccgtcactgccctcgatgcgcaggcggttctcctccttgtgcctgatggggaagatatccatcagcgccttggcggcattgaccgacacggccctgagcggcgcaggggaaagcggcactccgaaacggtcggtatagtccgaagtggccgtctcgtccatgacggccttgagggtctcggccacctgcagcttcacggccatcgtctccatctcgaaccgttccgaggagagcagcgccttgatatgcgccagcacatgcggtttgttcatcaggtaattggccgaagcgtacggattcttcaccgtatcctcaccgaatacctccacaaagcattttttcggccgtccggcatactccagcccgccgttcacatagaggttgcagaattgcagctcctgctccgtgagcggtttctcttccggcctatcctgcgtgttcgctatcttgtctgacatcgtttcttccttccttttctgaaagagtagcgggtttgtgtcccggaggttttacaaaacccgccttttcgttgcataacaattgttccattaatgcgtcatagaatacctgggccaacgcatcggcacacgcctccgcgtccgccagcgagttgatgagccgcaggttgaacttgatttccaggtcgtagcccgatatgaacgccatcagttcgttcccgtcatagcccagcgccccgtaggtcatccggtccgccgtgcggaatgtgatggtctcgggaatccgttcccggtcaatgcctggggcttccttattcgtgtccatactcatatcttgaaatatttacgggttttctctttcttctgcatggcggttgccgtcccttccgtctggcgcagacgggaggtatagacccccaggatgtcgagcgtggccgtcacgtcggcagccgcatcgtgggcatcgtccagttccacgcccaaccttgaggctaccagttccagtttgtacgaggtgacctccggatcggcggcaaaagccagccgccccaaggcaagcgtgtcgatgtagtgcggctggaagttgccgtaatagtccctgctcccggaaaaggtcttttcaaactcggcggccagtccggcatagttcaccagctgttgcaggaatccgatgtcgaaggcgatgttctgtccgaccagcacgggcttgcactggttgcccttcgagagggtggcgcgtttggcgaaggcgatgacttctccggccaccttcttcatgtccataccctgcgtgcgcagcatctccatggtaatggcggaatagtccaatgccgcctgttcgtacttcatcgggacatattcctgtcctttcgcctgctcatggcgggtacgcaacaccttgcgccggggaagtcccgcgtcctgtttcccgtagggggcgatatacgcctggtagcggtcgaatacctgccatgtgtcgaaacggacggcctgcagggcgatctgcgtgcaggcgcattcacggcagtccagccctccggtctcgaaatccagcccgatgcctacatatattttctgttcagtctgtggtgccatatcttctcaggattggatgaataacaatgagttcttataggtctgcaatgtattgcagccgttgtagtcgctgtaacggatgacggccgtgaggatgaccacccggtccttaagcgactggatctcggtgcggtgctccatgtaatagtcgttccagcacacgcactccgccaggcggttgttctgggagagtgtcagcctggcgaaacgcttccggcttcccgtctccctgtccttgtaggtatgctcggctacatccaccaccgtggcgcagacagccgcacgcctgccgtcattctcgtcccgtgccacctcgtccagggtcaggtaggaggcttttcccttgacctgcccgctggcttccgaattgtcgaagatgcggcggtagtcgatgctgccgatacccgacacggcaatctgctgctgcgaccagaagaaatgccgcccgcgcatgtcctgcgggaagtccttttcggaaagggagaatcccagttcacgtgcggcgcgttcgagcagcgcgcagcgttcggtaaccgccccgactttttcgatgcggtcgaagcatccggcaaggatcatgtgcttgacatgccgggcgttcacggggactttcacggcctcttccgcgttgtcgggatcgtcccagtaactgtatttcttgagcttgtaacggaatatgcggtggatgaagttctcgatacccgtatatgccccgccccggtcgcgttccgtgacgatgtattccactgtcctgaggccgacctgcttgattcgggtaagcgaccagaagatttcatcggtggcatagtcggtgaagaactccgtcccggagcggttgatgtccggcggcacgatcttggccggcgagcagcgttccatctccgccatcagcgaaggaatctccttgtcgtccgcccattgcaatgccacggtatagaacgccgacgggtaattggccttgagccatgccccgcaataggctgtaagggcgtatgccgcggcatgggagcggttgaacgaatatttcccggccacctctatcttgtgccagatttcctccgcctcatagtccgggcatccgttcccgacggctccggcaatgaaatccgccttcagcgtggccatcaggtcggctttcttctttcctatggccttgcgcaggaggtcggtcttcccgaggtcgaatcccccgagcgtatgggcgacggacatgaactgctcctggtagaccatgattccgaaagtgttcttcgtcgcttcataacagccgtagttatagaccggggccacctcgccacgcctgaaacggacataatcatcggtggcgccgatgtcgagcgtggcggggcggtacagggcattgacggcgatcaggtcctcgatacactccggctgtacatcctggataaaccgggtaatgcccggtgaagagaactggaacacattctgcgtgttaccgtccgagagcagtcggtaggtcttcccgtcttccagcatatcctgcgtgatacgcccgatggtgagttcctgcccgaaattccggttgaccaacgcgatgacggcactcagtttggcaagttcctttgtcgccagcacatcctccttcaacaatccgatctcatcgaccgaatagccgtcgaactccgataccagtgccccgtccatcttgcggaccggcaggaaatcgaagcattcggcgggcctgccgtcccgcgtgtccggtgtgacaacgatggccgaggcgtgtatggaggccgctttgggctgtccgagcaatccttgcacgtcctcgatgaccagcggataggtctggataaagtcccgaagttttctgttggaggcagcctgtctgaacagtcctgtccagtccgtgccgtcatctatcatggcggtaatatagttcacgatggagtgaggcacgcggtgtacgcgtgccacgtccttcaaggcggctttcagtttcatcgtggtaaaggtgccggcggaaaagacacgctggcggccgtccgcgttgtaccgttcttccaggtaatccttgatctcctgccgccggtcggaggcatagtcgacatctatatccgccttacgggagggcggaatgtccgccctccacaagtcctttccccacgaacgaatccattacggtgaatgcttcattcgcttttttaattgttacgtttgtcactttcattttttatactttttatagtggacgatatcgcatatcgtctgtttgcaaaccttgaattgttcagccagttcattttgcatgactcccgaccggtgtaaccgcctgatatgatccgcttgttcatttgtcagtttggcgttcacactgttctctccataatcatccctgagtttatgcaccatagaatgcatgacgttttcttgcctggtacacatttccaggttgtcacttcgattattgtgcttattgccatccttatgattaacctcctttgccgcattccaatcatcaagaaaatgttctgcgacaagtctatggattaattttttacatatttttccgtcagaggccaaagaaacattgtaatacggggatgtacccccgacccacggtttgatgatttgtccgttcctccaatattgggatgtggcattacggacatatcttccgacacttctaattctaccgcaggagcttacttgataaattccctcgtaatgatgaatatctttccaaatttcttcctcgtccattatcgtatatatttcttgtatcgtattatcgcgcttaccgtctggcggctgacgccgtactgttttgccaggctgttctgggaagcctggccggaagaatatctcacccgtatctcttccgcctgcccgttggtcagtttggcattcacgcttttttcgccgtaatcccgtttgaggccacccgctatggcatgttccatattccgctggtgcgtacacatctccaggttatccgcacggttgttgtcgcggttcccgtcgatatggttcacctccagtcccggattccagtcgggcaggaaatgctgtgctaccagacggtgcacggagaacttcttcccgacaccgcccttgtagagccggacacagtcatagagcgaagtcgtcccgcaccaatggcacataatgcgttcgggttgtatccaggtaatgccgtcatgcgaaacctgccgttccagactcttgacacgcccgaggttgctgatcctgtactttccttcatagttcttgatatccacccagatttcccgggtgtcagccatgggttatacggtttagtgctgtctgaaaaatttcccggtctatctccacgccgacgaaccggcgtcccgtattccggcaggccacggccgtgctgccgctgcccatcgcaaagtcgaggacgatgtccccttcatcggtgtaggtgcgtatcaggtattccagcagggcgacaggtttctgtgtcgcgtgcaggcaggagcgttgcttgtcggtcttgaacttcagcacgctgcgcggatagcgttccgtggatatgtaatcccggaaattgtcgtgcttccggtatatctcgccggcatcgcatttccgctggtgttcggccatcacgaccttgcgcctgtgcccgtccgtcttgatcggatgatacttcggcaacctgtcgtagaagaccagaatgtcctcgtgcgccttcatcggcatacgcccggcattcaggaagcctgtcgcctgcgtcttctcccatacccaggcataccgcagcctgcggagattggaactgcccagcaggctcgtaaaaggatgctggcagaacagcagtacgggagtgtcgggcctggatatgccctgtacggcattccacatcccggggatgtctatcacggcatcccaccggcagtgtgtcgtaccgtatggagggtctgacaataccatgtcggcggtgatgccttcttcagccagcaggggcagcacatcgagtgcatcgccccggtaaaggtcgcaaccgtcatagggacggtggtgttcgtaggtcggattcatgggtttcgagttcctttaggttccacaagcaatctcggcggtcaaaaaggatttcgtcgccacacatcaattcatctgcgtatatcgtccgctcttctccgttacggattacccgcatccgggcatccgtgcacagacggtaagtcttgccttcagattccatctccacatagcgttcgcccttgccgagtgtgatgtccggggcaagcaccgtcagttcgtctttccagctgagcccgcagcgttccggcacgaggaagcgcgagaagataaggtcgtatttcagcgggtcgatggaggttatgccaagcaagtaggaaaccagcgagcccccggcggaaccgcgacctataccagttgcgatgcctctccggtgcgcctcccgcaccatatcccactgcaccaggaaatagtccacattgtcggtcgattcaatgatatagacttcctcgtccagccgttcccgatagcgttcccgctccggttccggcactttccggtccagcccgtcgtcaagcagtcggaggaacatcgtacggcggtcaccataccgttcccgctcttccggtcgcatacggtattccggcatgaacattcgcccggtctcgaatgaggcgtccgcacgtccggcaatctccaccgtgggacggcacatgcgcctaaacagggaatcgaagtcccattgcccggagaacagaggacggagcgtgtcatacaattcatccgctgtcttgaaatactggtcatcgctctgttcatgggcggctcccgtggcaatcttgttcaccacgattctgtaccctgcatcgtccttgtccatgtagtagcagtccggaatcaggactggttctactgtaaatgaatccgtgtcggcatcataacagttgccgaaataatatttcagggcttctagttgctccctgtcgatgcggtccgccttgtattcgttggcgtcgacctggtaatagaccgcttcggcacctttccggatacgcttcacctgtttggggtgtccggccatccagtagacggaacggatggcgaaaaccaccacacaacctgcggcatacatcagcagctgttcatagcggagggtgttgtcttccgaatcgaccatgacggcccgttggatgcgcagcagattatgcagcccctcgttatccaaggcataaatcttcagcccgacacgttcttcttcgtgcatcattgtcagcgagtagccgaatatatgtttcagcccggtattggcgcactccttctgaaggttcagcgtggcggccattgtattgcggtcgcagatgccgacagccgtatgcccgagccatttcgccttgcggcacaaatcttccggcgagcagcaggcgttcagcagctcgtaggaggtatggatgccgaggttcacgaaaggtacatcatgtaccggaggcttgggccggccgatatatttcagcaggttgaaacggaattcttcccgcaggtcatagtagtaccagttcctgccgaacgggaaggccacatggaagattccttcttccatcagcacatccggactttccatcaggttgaacacgagcttgtccccgtcgccgcggaagatggattccactcccgacaggtcggccgtgaaaagccgcccgaagccgggaatatccaccacttccgtatcgaccgggatataggttatccgttgtgcatcgagccatgagaaaagttcctgtatcatctttcctgtacttttttgagtttgtattcaaggacggacagcaggcggcaggcgaaaatcccgtagatttccgcttccgtgagttcgtcccagtctttggcggcatcagcaatgtccgcgatgaaaacctcgaaatagggtttcagccgttcagccgtccgctttaccgactcgacggcatcaccatcgtaaccgatgactacggttctgacgcctttcgattgcagcttgtagatctgtacatcggatattttctttccgaaagtggccacggctgcgacatgggaattgtcatagagttcgagtctgcgggtcagggcgatgacatcgaaaataccttccgcgaggatgaccgtatcggtttcatccatacggacggcatcgtagttataaaggagtctggaaaagtcgttttccgtggagttccggtaacgcaggatcttgtacccgccgctatgtctggtcttgcggttgtgggcgtctatatcctctttcggccaggtatggcgggagacatagccgacaaccgtacagtcatcgatgaccggaaagacgacatagtccgcgtagcgcggattgagcctgccggttatcccgaccgggaaatactcgtaatcgtcgaaacagaagccgcgccgctgcaaatacggatgccggaaagtgcgcttgtaaaagtccggcaattcgaccggcaccagttcgtcgtctatttcttccgcctcgtccttctccagcaggtgcaggttcaacggtgcggcaatgtcagctgtctgcaaaaccatcaggtccatgcgaccgatagccgccagaagttgctccaatgtacgggtggatgccccgcaggagaagcagtgggccatgaaaggccggcggtgggcagtcgccttgccgatgtagataccgaacttaccgcccgactttccgcagaacgggcagcgcggaacgataaggttcttaccgctcccgtcccgtttggcacccgtctcgcgggttatctccgaaaccagatattgatattcctgtaccgacagttccatattaaggtatagtcgtgaccgctacaggttggtttgaaatgtttggaaaaagaatccggattagcccaataaaaatagaccggcagaatcatggaaggtctttccacccaaaggaaaagagaaattgtcttcccggctggacaaaaaatgactgcttttgtctaatcgataaaacaatatataaataaggagattgataatcagcattggctgattatcaggtgtagagatgtacttttctaaaatgatcactctctacataaaaaaagcgtattttttgtgcagtacaataaacatactgaatgaaaagtatcgttttccaattactacaaataacggatttgtatttgcgaggtcattcgaactttcctcgaacaaaggtcgtatgatatctcgaacgccaagacccgtgagcggaaactgaaagccttggaggcggcagaggaattgaaatgtgaaaacctgctgttgataacatggggaacggacgatatggcggaatacaaagggcatacaataaaaatcgtatctgtccggaattggttttacgcatgtaagctgccatatattctcaacattccagtcgttacaagtcaaaaagccaccgacacgccgcatccggatcgatggctttttattccctgttcagattcagtgtcctctgcccgtcatagaacacctcattgtcgtagtcggtggcaatcctgatagtgtctcctttctggaagaaccggcttttggccacgtgcaggcgcataacgttctcctttctttcagccgatgactggttgagcgaaacaaggtgcgtgcacgggcgggccagacctttggcctccgaacagttgtactcggtcagcacgttccgctcgtcattcagccactcccggtcttcgatggtagactggtaagtcaccaccatccataccttttcgtccgccgccaggtccttcaggtcattagccaccgcgatacgcttcgcccgttcatggtcggctccccatgaacggcggttggcatccgtcagcaagtccatcgaatccacaatcacgatgtccggattatatcctttgagcttcctgtattccgaaatgccgttcttgatgtcgagtgtcgagacctgggcattgaaacgcgggtaactgcgcaccgtgatgcttccggcatacgaggcgaccagtttttccagatgtctcatctccgtatccgaaatctttccccgctcgtaatagtaggcgttcctggaaatcagtccgccggaataggcgttcaacgcctcttcttccgaaccttccagctggaaatgcagcacatgcagcccgtcatcgatgtccgccctgacaccgatccatttggcgatgtgcgactttcccacgcctgtgctggccaggaaacaggtcagctgacctcgcaggttacgtccggcattgagcgcatccagatacgggatgtagaagcgggacacacgaggggcggtcgagcgttcctcttcctcctcgcgccggcggttcctctcgaaacgctccttgaaagtcgcggccacatcgacgaacgaggaactcttcagcgtgaaccctgccagccactcggcatattcccgaagagtcttctccgccttgtcctgtttgttctcgttatacagttttccgacctccgcatagaccgactgcaaccggacccccttgatgtaggactccagcatgtcggtcatcacctcggcactctgtccctcgtcatactcccggaaagtgtctatcagctcgatggcgtcgtaatcctcatggaaggtctgtgccagcacggcatacgacggcggtgtcttgtatgtcttgaagtgtacggctatcgcctcctgtacctgctggaacgaacggtccggcaggtattccttacgcatatgccgggctaggacagcacacaacggttcctgtctgagcgccgtggcatagagttcatacaggaactcggcactgagcggattgacggcactcatggcttcgcctcctttttccgccacgcctcacagcggatacggtacagttccggatagcgcgcctgtgtccttctgcggcatggctccgctttcgcacattttgagcatgacggggagaaaggcgtccacatcagcgtggagagcgcacagacgagatatcccgcttcggtggagagcagtcgccgcttggtcgtctcctcgtattccggataaataaaacgcccgaacggatggctgcggcggtcttccactgcccgcgccaaatcatgccgtgacagcccgaaactcttcagccaccggtcctcccggtagcggcgttcctttcccgagcggagatagcggccgatggctttctttccgaatgaatgggagacgttccatttcctgcgatacgcggtatcatatccggaaatggcatatgtctggcagatacagaagtcggacaggcgttccgcactgacggagacgacctcccggcacaagccgtcgaaacacatcccgagttgcctgtccgacttgccgccggtagggaacacaaaatccgcccacaccgtggtgcggaccagccgtgtaaagagcctccggcatccgtcaatccattcttttctctccatcgcgtgtcaatagtttgcgcagctgcgtcttggctaggaagatgcggctttttaccgtttctacgttcctggtctgcaaagtaccgttgttataggtgatttccatgatttccccgagtttgtaaccagcctgctgcaagagcagggcttcccggtaaatcggtttgagccggtccagtgcccagaggatgtcatcgttatagaactcgcggtagttgtccatccccatgctgtttcccgacggttcgtcctcatccgacagcgaagaggatatttccgaaatgtcgatattgtcgtccgggggcatgcggttcctgttgcggttgttcaggtccgccacaagccgtttggtcacggcatagatccaggtctttaccggacgggccgggtcataactgtccatatacttgaagaagttggccaacgcctcgaggtagttgtcctcgatgtcctcctggttataggtatatttgatacaaatgctgtatatcagattcttgtgcggcatcacatattttctgagaagttccgccctctgtctcgcggattcgtcttcaggctggagaaccgcaataaacacatctttcttttccacgtttccactgactgaaaaggttgataatgaatctcatgtcctaatctgtcagctaccgtgagcgtcaattgaaaaaacgggcggcagcattaccgccgcccggaaaaaatccaaaccgttgtcggcttgtcacagcctgtgcctgcggatgtaatagtagaagaggtggcaggcatccgccgcattgtcatccaccgggacaataccgtatctgtccttgcaggccgcgaccatctgcgtcttggtggcgtgtccgtctcccgtcgcccatttcttgaggacagccgggttgacgaactccggttccgggatatccagttcatcgcacacttcgagcaggatacccctgagttccgagagccgccgcatgtcgtagaaatggcggttcacgctcacatcctcggccacgacgcggcggatgccgtaacgacggagcagcgagagcagcgtagtcctgaaagcgccgtgcatcttgttgccgttgcgccgtttgctttcggtgaagttccatgtcccggcctcatgcagggagaagtatccggtatgcgtggcgatgtccagcgccagtacctgctcccgggtcagtacgctattctccgagtctcgattcgccattctctttcacgattaccagtttatgcggatacccttcagccacattcccgtgcgagactaccagcacggtaccgccgagcgagttcagcgcctcgaacatggaggccagccccgcttcatcgaccgcctcgagtatctcgtccagcacgagcagatccagtcccttgtccccgtcgcagttgctgttcacgagtttctgcatggcaaggatggtcgccaaattcacacgggcggcttcgcctgccgaaaacttgccgaacgagccgcagtccatgccgtcgcgcagcagtgagatggagattttctcccttaccttaccactcttgaggacggtatacccgtcgaagcggatacggatgtcgctgccgatgtcttgcaggaactcgttggtgatacggctgagcgcctcgattttcgtgttggccagataggtcttgaactgcacgaaccgttcccgctgtatctccagggcacggacccgggcatcgacggccgtcttgcgccctgccgcctcgttggacttcccgcgcgtttcacggagagtgtccttgagcgattgtatgaggtcgggtgaagccgcctcatccagctcccggatcgtggcctgcaaagtgtcgatggcgcaggccgcagcctgtatatcttccttgcctacccgtatgccgcggttcagtgcggcattgcgctcgtctatgaatccgaacacctcgtcgaataccttgcggcggacaccttcgatttcactttgcagggcggtaatttcggaagcgatgcgtttatgcccgctttccacctcttccacgtggcgggtggcattcctgatggcccgttcgtgcccggccagctgctcctcccatccggtgcgtctgccttccaatatccggcgctcatggttcagccggttctgctgcaactccacggcatccgtctcctcctgcttctcatcgatacggccgttgatttccgtgagctgccgttgacggagcttcagttccttcatgccggcctcgatgtcgaactgtggttctgccaccagaaactcatgcccgcagaaaggacaggtgatggagccggccagtttgttcgagaggccgtcaataccggcagaaacgatacgccgtttatgacgcagttcctcgatgctgccggacaggtcgcgcagacggatgtcgatttcccgcagtctctccgcagtcgtatcggactgatccctgtatgcctcacagaatgcggcatactccttcttgaactgttcccagccgtcagtcctgtttttcagttcctgttccgcctgcttcaagacggcatcgcaatccttcagccgctctgtggcggtctgtaaccgtcctttcttttcggcaatgaccttgtcccagtccgtctgccgggcatcgggaaagagggacatcatttccgctatcttttccagacatgcttccaatgcggtatctccggcttccagttcctgcaaagcctcgtccgcccgctgcactccggcaagctgttcctcaagcctgtccacgttctcgtgcccggtacggatctgctccctcttggccgctatggccgtttccagtcccatgatacgttccacacgggtacgcccccgctcggctccggcttcctcctccttgcgtatctgctcctgtaacatcccgatacgcccgtccaacccggccagttccagttccacctgccgtttcttttcagagagcggcacgatgtcttcctccactttggcgatggcttcatccaccaggataccgttggaaaagcggttgatgacctctttcttctccttgtccgatgacgagaggaaatcctcataccggtatttggaaaggatgaaattgttgagcagctcgtcgcgtgtgatacccagtttgtcaagaatataccggttataggcatccaccgaaggctgtaccgcttcatcggttaccacctgcttgccgccacggtaaagcgtacagctgacagaggaagcccccttgcgcgggatacggcggttgacgagcagttcctcggcggcggaatcgttgatgaaacgcaaagcgatacggcattcttccgctgcatcgttgataatctcctccgagcgtatctttctaagcgggctgcccgtgatacccacggcaatgcattccaacagggcagacttgccggccccgttcgactgctgggactcattgtcccggttatcgccgaaaatcaatgtcgtcacgccttgccgcagcatgtaggacagcgaacggaaggcgcagagattttcggcttctatcgtctttaatttccacatgatctgttttctattctagataaatactccaatcccatcgacacatcctcgatctgtttctcccggcagaagtcctcgtaggtttcccggatgcggcggctgtcgaatttctcgaagagcgaagaggataccgcctccggcagctgctcgtcatcggcaaccagttctaccttcgccgctccggcttccagcaaggcggctttgtccaccgatttcatcgcggcggcaggtgcatggacacgcaccttgaccttgtagcgaccatcggcctccatttcacgcagctcgtccatcaggtgcaacccggcacgttccgccggcatatccatgacacggtaccgcatgttcacgcggttcttgacaaactcgtacgtgccgtccgtatacagcaccgtgtatcctttctcctcgtcctccccgaagttatgctggcgcgaggaaccgatatattcgattcccgtccccggaatgacggtacggttgtggtaatggccgacaaagaccttgtcgaaaggagagaatatcctggcaggcagttccttttccgaaggctgtgccaatgccccgttgataccctcatggatgtagaggaagtgctccggttctccggaaagcgcttccgcagccaatcgtccgagcctttcggcaaaagagccgtcttccggaaaatagctcattacatggagcgcgaacttccattccgggcggcacagggtcaggtactcatccacgacagtcacattcggatgccggtcgaagacatgacaatatccgcgcagggattcctggttcaccttgtcgtggttcccttccgccagcgtgacatgaatgtcatggtccgcggcggatacaagcatatccctgacggccagcaggacatcgagtgtctgggcggcacgggaaaagaacaggtctcctccgacaaccacttcccggatatcccgttccctgcaaattcccatggcctcctgccagttggcctggaatgcagggatgttgtctttcgagatgtggatgtcattcaataacaaaaggcagggtttgttctctttcatactaagtgattgtgattaggacgggaggcccggatgcctcccgtcggattagaattcaagaacttgtgaaaggcttatctgcggtggcggggacgcccggcacgctcttccgtttcctccggctgctcttcttcctccccggggacatcctccggttcgtcactgggcttcggaccctccatctcgctttcgatcaggtcgagtagttcccggttgctcgtggagcgtgtgacacgcacggagagcccttcctgctcgatgtagccgcggatcatcgcacgcagctcctggccttcctcggtcttctcaccgagttcctgccgctgaagctcgtcataacgttcgaaaaggtcgtccagcgagatgcctccgccttcacgcccgttttctctgttatctttcgtacggcggtcgaacgagaacgcggatatatcctccttgggcagttcaccgtccagcgtgtcgatgaccgtcttcatttcatccgtctccatgagcgacatgccgtagataccgtcgcactgtttgaggaactcgacggtggctcccagatgataacgggtgtagcggtagatgatttccgggatacgcggcgcacccatcagggcggtcagctcctccttggtcaacggtaccggttccgattcgttgtcaatggaaatgacatactcggtcttggctccgttcttgcgcttttcaatctccaccggataggcgtcatacaccgaggaaatcgggcacgggtaagacggattcttggccagtttcttgctccacagcttgaacttcctctcatccagatccttgaactgggcatgggaaagggtcatcatctgcacgcctttggctcgttcacccaggtcgaatacatagagacagtggccgtaactgtatttcagaccgcctccgaacgagcccccggcaatcttttccgccagtttgtcgtccccgtcctcttttgcggcttcgacggccatgcggcggtaagtctcgatgggatcaacgctatatccggcatcggtagcgcgggtgacagtgacatacatcttctggggcttgttccccgtagcgggtttctccagctccagaagcagctggtggacgggatactcatagcccggacgtgtcggcgagccgtccggattgggagcgatgggcaggatacggagacggtaagtcccgaacttgtccatgcggaagaactccgtacgggcgaacgccctgttctcctcctgggcacgcaactgtgcctcctgataagattcctgaacgccgaggaacatttcctcgacagacatgccttccatgccgttgttcttttcttcttcttgcataaacgctttgttttatggatttaaaaatgcccgaagaatgcgacacggtatacccgcatcgcaaagaaactggtaacaggacggacgggttcggttgcaccgtccgcgttcaactgataaaattgggagaggatgtctcgctgaccgtatcccgaaagaggatactcatttgacaatatggaaaggtcttgcagcgaccgtggaatacaaaattaggcaaattacccggaacagccatacatgtacatgaatgtttctcaccggcattgtccttcagcgcattaccgtttcattttaagaatgcttttaatctctccgagcagtctgtcgccgcccggcgcgttccgcgcttcggcaagcagcctcctgcggttccggcggatatactcttctctcttgcggcggcatatgccttcatagtaggctttgcgctccggcgtgagccgtttcccgcgccggcaatagaccccgtcccggcggtactcgtccaggtagcggcggaacttcgccttgccgcaggaagggtctttcgatgcctccgccaccgaccgtatgacctgccagtccggctcgaagggctgctgcgtggcgcataacctgcggagcagatgatagactaccggcatctcataccggagcatgaagcctatccgtgtctcgtcgaaaggaaagcgcttaagcgtcccctgcggtcttccgtcttctcgctttcggggcttctgctgccggggagacggtttcttctgcggctgccgcctgattttcttctgtttcatgatgttgcggttgaatggtttgctgtacggtttcacggacgggaacgttcctgcgctccgcaatcctccggcggctttcaatatcgccgtttacattgagtttatgtttcatgactatacaaaataggtgaagttgagttctacattgacattgtacataccgcgctcgtaaagctgtatcctgcgcgaaccgccgtagatggtgaacgaggagccccggttgtacttgtggtcatcgttccagtcagcggcgctgcagcgcacgctgtatctcgggggctgtatcttgttcgggatgacggcaacgatgccgccccagttgctgccgtccctgcgtgcggtattgatatacccctgtatggacacgatattcccgatctggcggataaacagcccctgggtatctgttcccgagccgctgttctccatgtgcatccatcccgtatccgccagcaggggctggtattcttccgcataggcggctccgatagcgcggcaggcctgccgtttcgcctccgctgtcggcaaggacaggtcggaaagtttgccgtccttgcgcaggtagtccttgacgatttcgtctttggacagcacgtccaacttgttccgcaggagctgccgggcttccatgggggattttccttgcccggtcaaaaagtcgatgtaatcctggaacaggttttcaagcgcggcgaagcgggcgtccgccccggccttggtatacaggttcaggttggtggcgatggtatccttttcggaagcgttgtagccgcccatcagccgctccgcctttttcttgagttccctgacaacctgcgaggtcatcacgtatccctcgacctgcgcgtgcgaaatgccgccttcatctatgtaggcgaacgaaccggtcttgatttccagcagtttgtccctgagttcgggtgtgaagacaatgccctcgtaagcggagtcagtcccgagcttgccgtccatcatccggtctatctcggccgtggaatagacttcgaggttcttgcgtgccttgcccttgtccggaaggtcggacaggttcgaggtcttggccagtttcagctccccggtacctttcttttcggcatcgagggtatccctgacggccgcctgccgctttgctttcagttcggcggcttcctctgccgtcagcccgctgatctcgtccgccgtcaggcgcaccagctccttcaatccttcggagatttccagaaatacctccccggcttccgctttggaatagacatcgatattcttccgggcggcagccttgtccatgacatcggaaaggttcccgtcggcggagagtttcattttcaaagccgccgcgacggttcccgatgtgacataaccttcgccgccctccgtcagttctccggtagtgatagccgccagtttcttcctgtattcggtcgtgaagtcttcggtagagagctgtttgccttctaccacatccactttctttcccatcgcctccgtaaaggccctgacggtcacataggtgtcggacacggattttccgttgattttaagcgtaccgagcacatccaccgctcccaaaggggcaagcacgatgtcgcccagagcgttcctcagcgcaaaacggaaactgtcagcggtgtcgaagccgacggtggcgagcagcgcggcggcactgtcgcgccaggtaatcaggtttgtcagcctggcattgtctttcgtataggcggtattctgaatatcgataccccgtccggtgctttgcagggagagcagtccgccgacctgcagggtggcggtacgcccgatgactttcaaaacaggtgtggtgcaggcttttccgtcatgcacggcaaagtcacggtattttgttccgccgccctccgtgccgtggtaattgatacggatacaaccctcatccgtcacatccgaggtgttatagatgtcgtatcccttgatgcggacagccccgatccgggcgttttcattcagcgaagtaccgcaggatatgccgtcttccgtaaccctggccagttccttgccttgtttcatgaaactgaacgtgccgtccgtccggatgacaatctcgttgacaagcagaccgtgcaggtaggcaccgatggcggcatggccgtccgccttgacgatgcctttgagcatgtagccgttcccgccgctgacggagacggcggtcttggagctgatttctttctgcccggtgaacgttccggccagcaccagatccttcttgacggtctgccgggcaaaaggtgtatcgagcaggacagcatagcggccgaagaacttgtcgatgaaccggggtgcatagctctccgtcacctcgatggccgccggcagtttgtcagtaaccggatcgaccgtatccgggacagccttggctccggcacagagataacaggtacgcccgcgcttgttgacctcattggcgtagaccaccgattcatgccggttgatttcgtatatataatagggatagacagcatcggcgcagccgtcgaaacggcgtacctttccgccgagccagacataacccggggagacgcggggaccctcgatctcgcatccggagatgatgaagtccgagcagccgtcaaaaacggcactcatgctgagagccagttcctgcaagttcaggatatcgtccgagtaggtataccgtccgccggtttccgcaatatattctttcattgtcctgtattcttattgggggtgtattcgtcttcgtcgatcttgatcaggtaggtcttgcctgctgtcttataggtgttcaccacataggaaagcatatagaccagttcccgcggaggtatggtgacgggcgggacgcagaccatgaagctgaccttgttgatcagcttctcttccgccagcaggtagaacggacgggggcgttccgcctcattgtccgttgtaacctgttccccgttgtaccatacggtgaaaggacgctggtattccgccccttcgtggtacaggtccacaccgacactcgtgctgtccttgatgaagatgcggtccttgccgtccttgatgtatttaccgaaccggtagttcaggaaccactcgaaatagatgacctgtgaggtcatgcgcgcctcgatatgccgttcccgtgcaaacgtacggaaccgttcgttcaggctttgcaagggatagaggcagctctgcacgaagaggatgaaccgccgtcccgacaggtagtgcggcacgagccggttcaccgaacggtctatgggcagcttatatctcatggttttcgactttgagcgtgatggcttcccggaaggtcggcagttccgactcctcgtccttgcgcgaggactctttcaggtagcccgaggcggtgtatgtcatgcggccgacacgttgcaggggctggatttgcccgtccgtatcgtggcaagcaataaacacgccctgctcggggattgccgtctcgtcgatatagacgtctgtaacgtgttcggcacggcgtatggcatccgtcaggcgggagacatagaccgcagcgtcgaagtcgatgcccataatgtagtcccggatacgggtctcgatgctgtcgtacatctccgcctcgggaacggcaccatcgtagaagaccgtaagacgcggcaccagcacgtcgcctttggtcgagatgacctcgatgcgtgtgccggcgaatttcagcttgccgatataggcattgatgggcaccaggtcttcaggcggtatggcggaaaggttgcctttcgtgccggtagcgattttcagtaccagcttgctgtcgaggttgctgtcgtccgtgctctccacataggagacctgcgtaatgatgcgtttggtctcatcgacctgggcatacccgaaagccagtccgtcctcgcggacggtcagctcgtcgccctgctggtattgcagcagcgcattggcgtagtagtccggcgtgccgttgatccggttgttgatggcttccgagatatccaccgcgaagacatcaagcagcgtctcgaaactgtagatgacagcggctacggtccataggataccgttcatgacagacagcttcgagtcgctggcgaactccgtcagttccagccgccggttgcgttcctgcacggcttcattgtatatctccttaatcgtccggctcattccactgtataggttatatcgtcgataatgaatttccacgcgccaccctcattccaggcctcctcgtgcaggatgacccatacggcttccatgcccgaggcgatacggtagcgccccgtttcggtatcccggtccggctcccgataggttcccgtcggggctgtaggtaaaatgaccgtgcaattccgtcggtcgccgtaatgttccacaagggttgtcaggtaatgatctatgactgtcggtttcagtcgggcggcggagaggtcgagtgtcatcagttcccggcattcggcaagcggtgcaagatcggccaacgcgcaattcgacaggttcaggctgtaggttccggaaagcagccgcaggctctccaaggagagtgtggcgtgcgtgagcgtcagctcctccaccggcagtgtctgcaccagtaccaacgaccgcggtttgagcccgctccagtcgatactccggaagcaggcatcggtaaaccaacggatacgacgcctgtccctgactttgttgtcgaaggtatgggtgagcagctgcggcgtgtccgcgaggaggacggtctcggtgtcgctgttgtcgccccagtcgatttccagctgtcccgcaccggaaacggcacactgcacggtgatgatcccggcagcgagcgtgaggacgacagcaagcggcaaggtgaacgttttgggatagacatgccgttcaccgttagcggggacgatgccgtgcaacccgttataggcgactacatcggcgcggataacgaaatcgtccgtgtagacaagttcccggccggcagtcaatgtcgtggcgaaggagagatcggggttgttgatgagcaaatccacgactccctcgatgctgccgtacaggtacagggccacatcgtagatattctgtccggctacgaccctgtacttacccatcgttctcctccttttcctcggtttctaaaagcagctctcccgtggcagaatccatataggcattcttgatgacgaccttgtccgacaggaattccgactgcagtttggcggcaagaccgttgttttccagactcgaatgcaggtagtcgacgaggccgacacctgtcgtagaatgttggtagagatttccggctgaagctttcagcagaaacgtctcgttctgggctttggcggctcctatttcgaagtcggtctctgagccgctgtacacggcaaggtaaccgtcccgtgacagcaggttgtagactcccttctcattgagggagaaaaatgcggccagggcgatatcggccgtgccggcttccgtctccgccacgacgggaaaccaatgtttgcccgtcgcaggatttctcaggtactccgtgccgcccgaaccgctttccataaccagacggaccgtcaggcggcgcatgtcgggcgtatagggaatcctgacatggaaccctttgccgtcgttatacgtgtacacgaagccgacggggacggtaatctctccgtagcggaaggtgtcgttgtccgcacccgcgacggcatcgagcaggcggaagtcgtagaaactcttgccggcgatattgccggaagtctccacctcaccgtattcggcgtccattgttatgtcctgtcttgccatgaacgatacttcaacaaaaagcccgaccatacatcagagtacgaccgggcactcttttcaaaagagtagcggcagaaagaaaggatggtttacttctcctgaatgaaatcgtagatgcgcgacacggtagcccacatatcgtccggaagctcctcgtccgagatgcgttcgcaggctttccggagatactccatctcgtcccccgagaactccacggcaagcggtttctccttctccacatcccattcgatgcgcttgtcctcggcattctcgtgaagaccgatggctttgcgctcctcgtccggaatggcgatcttgcgcagaatctcttttttgaggttgaagtccttgaagttgccccgtgccggcaaaaaggacggcaggtaaaggcggtctttgactgacagttccatattatttatgcattttgtacgttactcttttttatttcgtcgatcatggtatcgaaatcatgaaacaggggtgcaagcggctctcccataggaatgttgcatgaaataacgccttgttccatgtagatgatacctatctgcggagcgttccccgagccatccgtatccttcttgcggatggaggcgtggacgcgggtcagcgcgtcattgacgatggaatattccaactggtagtcggcattctccgtgctctcttcggcaaccttggttaccgttacgttggtgatgttcataattcgcttctgtttttattaagtgtagggatattcccagcagaaaagtttttaataagagtgatttaatatctggtaatggaacgaggggtaattggcgcacaataccgtaatggagtctcccttggctaacgtgtaactggcaagatccccgttgtggttacggatattggtgaatacaaggctattcccccagttgtagttgtaaattagggtaaatatgcaggcgaagtccgacggcagagtcgagtaaccgaacatggtggccacggacgatgccgacggcagggtcacgctgtacttctggttggcataaacgaaaaagatgttgaactgcgagaaatcgatcgtgtaaccgctgcctgtgaaatagacattcttgatcttgttgccgatgcaggcaggggctataacagaggcattggaccatattccgtagttacggttaccgtttttgacatcgatataaagcccgtagttgttattaaagatgctgttcaccttgttgttcacaatacgtccggtggcacatgatccgccggcggatgccggtatggtgttgctgccgaacaggacatacgaaatggtgtcccccacgcggaacaggtcgtcgtagatggcaaggccgccgcctgagccggttcctgtcgccgtcgagccgatgcgcccctgaccgatgacgaatcccccgatggtgccggcattggcgttgatggtgcccgtcatcgtgacatttcccgaggcgtcccatttgatattctggttggccagataacccgatccgtcattggcaaaggagattttcccgcacccgaacgtggcggaaccgtccgtgttcagcgcccaatagtttactccggtggaagggttgtcgtggtaaatatatcctgaagcccccataacgatgcggtgccccgaggccggagccgaagcggtcagggcgcttgttccgagaatccagccgccgatcttgccgctcacggccgtgataccgttcctgtccagcgtgacctttacgctattgttcgcatccttgacggagatgctgccgttatagctgctccctccgacagtcagggcggaatccacgataatctggttggcgcgtacggttcccgtgtaaatgccgttggcatcgatggtggtcgtgtatttctccgtggaggtaaggtcgaagaccgtggcataggccacataccagatgacaggcgtatcggaagtcccctgcgtgccgtccacgtagaagaaatgggtgctggaaaaatcggcggtgccgcacacgaccttgtagacgtattctttccagtcgcccgtgccggcgttcgacgtaagccaccggtgcgaacctcccgtgccgacgctgttcgtcgcccaacagagatttctgccggcggggatcttggcgataatgcgggcgacgagcaccttgcggtaaccgcatttcgccccgaaatagaagcctccgttgcgagggctggcactgccgctggtctggattttcaggacatacttgctgtcattgggtgccgtggcatcctgctgccgggtaacggtcaccataccgttctgggagttgttgtaaaccacgacaccgttgtttccgttccagaaagtcgggtcgcggtagagcatcttcccgaacgccatggccgaagcgagttcctgcgccgtcgtgatgcccgtagtccactgggcggatacggatgcggcaaaggtaaccgtgccggcggcattccatgagatattacccgaggctatgtgcccagacccgtcgttgttcagactccatttcgtggagttggcgatagatccgtcgctgcccagcgagatgttgtttttccagatatggttgtggtcgaaggcccaccccgcgatacggttgtatacctccttgctgccgcttttggtatagttcaccgagaggcagaagtattccagattgtcccatgacatcatctgaagacctatgaatccggtcttgacactgttgccggatgccgccacctgcccgaggacgatatgccctgcattgctgctctgataccacgtaaggcatatacccagcggcttgtaggctcccgtgtaccagtaaccgctgcccgtggaggcggaacggatttgcaacgggatggcacccacagctccgacgttccctatggtcatgttgtcactgccgatggagaaaccgccgatcttgcccttcgtgaacgtgcagctgagaccgttgatgtaatcggtattgataatggacgacttgatacccacggcatcgagtttcgaggcgctgatgctgcccgcggcgatacggtctgccgaaagtgttcccgtcttgatactgccggcatcgatcgccacggcgttgacctgcgccgcggtaagggtgcccgtgtaaatccctgtcgagccgatataggtcagcgggtgcgccgcaagcgtgctgtccgtgctttgcgccagagcaatgaaccgatggcggcggatctcctcctcgacggcagccgtgagggtgcgcggcgcgggggcataggcttgtgtggaaccgctctggaagataaggtcgttgccgtaagcgatttgcggagctgccggaatcggcgaaggactataactgctgctctctatcggctggtcggagtagaggtggtacacggcacccgtatcgccgccgccacgcaggaagacggcgaacatgcagtagttgccgcacagctgcgccccggcgaacatccggcagtaggtctcggaaaggtcatagatatcccatgaataggcaatgccaccccaaccgccgaagttggttttgataagtacgatcagacctcctttgtgcgtggatgtgttccacgagaccggagcctgctcggcatatccccgacggacgagaatggtacgtttgatgttctggtcgccacctttgaaaacgactggataataggtcgcttcgtcgccgttgatgatgagtttcttgtaatatcgatagccgaagttcgtaaccttggccgcttcgatgtcgttcttccattgcagcgatacggaagccccgaacgtaacgttcccggcagtgtcccatgcaatgttgcccgaggcgatctgccccgaaccgtcgttgttcagtttccatttcgtggagttgatgatcgagccgtcgctgcccagcgacacgttgcccttgcgaatggaagtcgtgtcgatcgtccagccggctatgctgttgctcgaacccagctgtgccacgcagtaccctgcactgtccgtggtatagagcccgaagtccgtgtcgctgttgtagtagagctgcacccgctgcccgctagcgacacccgaattggccccgtacaccgcgatgcgtctgttgccgctgtctatcgagatatgcgtggcagtgagggccgaagccccgatcatccagccgccgatttttcctttggtgaaggtacagctcaggccgttgatatagtccgtgttgatgatggaggacctgatgctggcggcatcgagcttcgaggccgctatactgcctgccgctatgcggtcggcggagatggttcctgcggtaatctgcgaggcggtgatactgccggtatagattccgtcggccgtgatcttcgtcagcttgggatagccgctgccgcccaaagccgtggtgagggagccgataggtgccgtccacaaggcactgaccgtcgaggcgaacgtgacgttgcccgaagcgtcccacgcgatgttgccgcccgcgaccgctccggctcccgaggcatccagccgccatttatagccccggataccgttcgagccgagcgtaatgctacctgcggcagaggtgcagctccccacagtgttgttcttcgtaccccggtaaagggagtcggcatccaccgtccagccgccgattttcccttttgtaacgttcaaggtcagagcttcgatgtttccggcggtaatcaaggaggctttcaacgccgccgtgtcgatgcgtgccgcagcgataatccccgatgtgatctgggaagcactgatggaaatcgtcttaatcgtatcggccgagagtgttccggtaaagacgccgtccttgtcgatgtaggtcgcaccgacccagttcagactcactccgctgccgaactcgaccttgcctgtcgtggcgttatacctgacatactggtcgccataacccaactgggcgttaccgccgttatctacatagaaggttttgtagccatccctaaatccatagatgccgtttaccgcctctgcggcgatcgttcccgaggaggtcttcgtattgagtgtaaacgagcctatggctatcccggagacggtgccgtcgctgtttttcgtgcccgcaaagagtttgggggtgatgaccgtgttgccgttgatgagcgtcttacccgtattccactccttgacccagtcgagcatgtcggcatcgaccccgtccttgcccgggatacccgccttggctttcgaccagacgaacgacagatgatagacaataccggaaattgtcacgggaatatctattgttccgtggtcggcgagggtcgtcgtaccggcggtgataacgtaggttaaggtcttcgtgccgttattgacggtaacggatgagaatcccgccggcttacccaccgcaccgatggtaaaggccgtgagttcctcgtccccgcacatcacccgtacggtcgaggtgagagtgacggacgagagaatcttccccgtgtcatccgcggggaacacgtattcacccaaagactgggttatggtatacccgtccttctggacatagatggtcgcctgtccccgggcgatgagaatctttgccatgaaacctttttctgaaagtatagtgcggaatgattccggcaggttgcggattttttttcgtgtaaatgatattattataaaaaatatttgtatttttgtaattggaaatggttccgggcggttcgccgccacggatgaaaagggaatccggtgagaatccgggacagtacccgttgctgtaagtcccctcaaggttgccgcaacctgccactggtgtaatgctgggaaggcgcgacgactgggacgagtcagaagacctgccatgaccggaaaaggatttacacccgcgggagaaaatcgggttgcgatcagatacggaatgccgtaggagtcattctcatatttgaagacaaacataatcccgttcgtgtaaacctgcgcgaacgggattttttgtgtttgttaaaaatatgttttattaaaaaacaagtaagctatgaaaagaaatttacgctttctggcgggagctttcctgttgacggcaaccgccctgttcaccggctgtaattcagacgatgactttttgatgaatcctcaaactgattcagtaactcccgaaacccgagccaactttaatgatgatggcactacaaccattacattcgatgacttcgatgaaacattcatggcggtttcgcctaaagcagagaactactacacgctttatggatatactgcagagaaccaaatcagggaaatatacgatcccgattttgtgtttgtctccgacatgaatactgtaaccaattcttatggagcgtatactgaattttccagtggtgccattgcgttgtcgaaatacaattatcgttctgattctgctgccggcaagacttctggaactaattggtggtatacttgggagaatcaatgtagtgtctataatacagcatccacagatggggccaatacaggggcaggtcacagcggttccaattttgctgttgtatacggctactctgatttcggaaatacggagtggatggccaaacctgaattctattttgactcccctcgcaaattcaagggtttatggtattgtaacacagcatatacctatggtgtgattataaatggtaatcagttcggaacatcgggtgttgcaacaccgttgagtaatctgaaagattctgacggcaacaatataggatatttccaagtcaacatcgaatgttatgacgtagatggaaatttgatcaccactgtatcgaaattgttggccgactaccgatatgataaaccaacagtgtcccccgtaactacatggacatattgggatattaatgtagcggatgtgcaaagtgtaaaattcaattttgaaggatctgatgtcgatcctatatatggactcaatactccggcgtatctttgtatagacgacgttacaatagaataacaatttaatatagtttggcatagaactgatttcagttctatgccttttttattatgaaggctttcatatttagtattcttgtacttttgttttttattacaagctgtaataagaacgatgtaattactgaagaaataaaacaagctcctataattgaactcgatagtgagactggcatttacactatcaaagttgggcgtgaactgacaattgccccgacatataaatatgcgaataatgcactttatgcatggacagtagatggaaaacttctttcatctgaatcaatattgaagtatacatggaatcaggaacaacatctatatatcaaattgcgagttgatacaccagagggttatgcggaagaagagttaaaagtagaagtattggagttaactccacctacaatttcaatcataatcccctctaaaggattaaaagtgcctcaaaacacggattatattttatctccagatattcaacatgacgatcttgaaaattttagaattgaatgggtacgcgatggagaaatcgtcggaacagaaaaagcatatacgtttcacgaaaaagaactcggtacatattcgataacaatccgggcatccaatatagacggagaaacaatccgtgatttcgacgtagaagttgtggaaacaatgccttattccgtacggtttccgacaccatcctatacacaaacttctacggatcgttatacttttgcagggcgtcctgtatatttgcggcctttgctggaatatttcgattatccacagtatcaatggcaggtcaatggaaaaattatggaagccgctaccgacagggtttttaaattcacgccgacgactcctggagaatatttcgttgctgttactgttacagaaaaaatgcccaacacacagccactttcacgtaacataacacgtagtaatacttcaattacaacgacagttaaggttatttgtgaagaaaaaacggaacaagaacgctatcggcaagcgacagcgacaagttcaggtatttgggataaggtttatgaattcattcctgctcccggacagtttattaatgagttatcccaaaataccggatttataggaaatgaaacgacgccccaacaagccatagagtatgcaacgaaacgattgaacaaaaaagcgcatgtttcactgggatctttcggtggttatatcatcatcggttttgaccatagtattgctccgagtggccgagaatacgattttgcaatacaaggaaatgcttttaacagttcgagcggtggctcaaatgagccgggcattgtttgggtaatgcaagatataaatggcaatggccagccagacgatgaatggtatgaattaaaaggatctgaaaccggcatcgatggtacaatacaagactacgaagtaacttactatagacctgcacccagagcacatactccgtgggtagatagtgaaggtaattcaggttctgtcgatatgaatgcataccatggccaagaatattattatcccaattggattaaagaagatagctatacattatatgggacgcgtctgactcctcgcaacaatcaagatcccgttacaggatattgggcgaataacgcttatgagtgggggtatgtggataatatgggttcagataatctggtaggaggaaatgtcattgatggtagcggtcagcgcaacggattcaaaatagccaatgcaatatatcatgacgggactccagtaaaattgcaatatatagactttatcaaagttcagtgtggagtattatcgaaaagtggttggcttggagagatatccacagaagtattttcatttgaagacttatcaataactaataatcaataatatgagacagttttggcttttactattcattgccccatttctttttttatcatgttcagaagataatcagactccagaaagtcctgctgatgccgatgacaattttatcacatcagtcgtgatgactgtggcaagtcaatcctatacagcggaaataattgacaatataattaccataacagttccatatactgtttcgttaaataatgctcaagtcgaattcaaatacacatcctcggcaacaattattcccgatccggcaagcattactgactgggatacggaacgaacgtttcgtgtaacctcttacaatggagaagcgaatgattatacatataaagtcattaaagacgagattcgctatgaaggggatgtggaattgaagacaacagcggatgttacggctttcattgatacggacgtaacggttatcaaaggtgatttgattatcgggtcggatgctgaggatgcagaagaattgtcggatatcgccgcattaaaaatattgaaggaagtcgaaggaaacatcatcattcggaaaagttatgttggacaagatcttacgggacttgataatatcacttcaattggaggtttgcaaataggaactgaaactgcctttgcgaccaacagtaaattgcagatggtcagtatgagatctttgcagcatattactggcgacatcgttgtctgcaacaatcaagtagcatatgtgcaattcgacaaccttgaaacgattgatggaaatataatattcaggacttcatctctacaaagttttgaattccctaaattaaccactgtcgtaaaggattttgatctccagtgtctgacaagtgacggagaaccaggaggagaaatcacatctttgagaattcctgaattgacaaaagtaaacggtcgcttaggggttaataatttaggcaaaatgatttctttggaatttccgaaattacaagaagttggaagtgtggattttgcttctataccgattccgttggagaccctttcattgccggaattatcggtagtaaacggcgaccttaatctcgtttccagttatattgcgtccgatgcttttacatctacgggaaataataaattacaagaaatagatggactgtctaacttgtcgattgttaaaggcacattgacaatatctaaattccaagtcttgaaaaaattgccggattggagtaaattagaacaactcggaggactgaccttgctgcgtttattggagtgttctgatcgaattttagatttgagcaaagtaaattttgtaccttttgaggataacgaacctttaatttctattacagacgggactatattctcaaaaattatcacaaaagaggatatgtcgcaagttagcatgtttctagctccgagcggtattaccggttcaagtgttggaatagatccagaattgaattttaagagtattaagaattttaagtattctagcaatatgacaacagatcctgtattccaatttgaacgagtttacgggaatatggaaattataagaggttcaaaaaaaggcgtttcagcccctaacttggtaagtgtagatggatatttaagcatcgaaactacaatggcaaacaatatctcgttcccgaaattggaaattgtcggaggtcagttatgtattatcggtaatctgaacgctgtttctaactatgattatgattttacgaatttaaagtcagtcggttgttcaagcaatcctcaatatatcaaagaaggggtgattaataatattttatatggttctttagattttatggcatcaaataaagattttacatttccgtcattggaacatgtcgggggtgttggtatgactgttcgtaccgtaaaaactatttcatgccccaaattgcaggccattgatggaacactttgtgctgcaaatgcagcatcgcttacgactttcaatatgccaactttaacaaaactctcaggagttcgatttatccggttgacacggtttgttgattatacgttcttcaaatcttttgtagaagaagagcaaatcaagaaagaagactggcttgtaaccaattgcggttataaccccacctacgaggatatgcaagccggtcgctatacccagcagtaacacccattattttacaagggaacagggtactggccgaaagatcggtactctttcccgtttataacaagccaatgaaacatctgatacgacatatcattcttctatgcgggttgccgctgttgctggcgggctgcatggagtgggactacggagatgcggtggaagatttcaacgctaccggagccgggttgttcatcaccaacgagggcaacttccagtacggcaatgccacgttgtcgtactacgaccccgaaacccaacaggtgcagaatgaagtgttcttccgtgccaacggcatgaagctgggcgacgtggcgcaatcgatgtgcatccacgacaataagggctgggtcgtggtgaacaattcccacgtgattttcgccatcgacctcaatacgttcaaagaggtgggccgtatcacgaacctgacttcgccgcgctatatccatttcctcagcgacgagaaagcctatgtcacccaattgtgggacaaccgcatcttcatcatcaaccccaagaaatatgaaatcaccggttacatccaggtgccggacatgacgatggaaagcggctccacggagcagatggtgcagtatggcaaatatgtctattgcaactgctggtcgtaccaaaaccgcatcatcaagatcgataccgaaacggatcaggtggtagaagaactgaaagtcggcatccagcccacctcgctggtaatggacaagaaccacaagatgtggacgatcaccgacggtgggtacgagggttcgccctacggctacgaagccccgtctctctaccgcatcgatgccgagacgttcaccgtagagaagcagttcaagttcaagatgggcgactggccttcggaggtgcagctcaacggtacgggcgacaagctctactggatcaacaaggacatatggtcgatggacgtggatgcggaacgtgttcccgtgcgcccgttcctcgaatacagcggtacgatttattacggcctgaccgtcgaccccgtgcgtggcgatgtctacgtggccgatgccatcgactaccagcagcagggcattgtctaccgctactcgtccgaaggtgaactgatcgatgaattctatgtcgggataatccccggcgcattttgttggaagtgatgggcaggatacgacacctataccatctcatcttcgttaccaaaggacgcaagatgacgattccgacaacgggaaaaggattgatgctcgagcggatgacacggatttttacagggaaaggttgccgcgtacatgccgccaatgcctttctcaaccacgtgcatgtacttgtcgagattccgaattccggggatttcagcaagatcgtgaacaaggtgaaaggcgccacgggaacggtataccagaaaaccccggaatatgccgacttctccggttgggctgccggattcgactcgttcagcgtgtcgttcagcgaccttcaccggctcagacggcacatcgaggagcagcatacaatccatcaggagatctcgttcgaggaagaatacggacaactgcttgaagagaatgggttcgacccgcatcaaacgtccgtgccggcatcctccacggtacatttttccgcgaatacccaccctaaaaacggaatcaaatgatttatacgaaatacatacttttctcgctactgctcgtctgtccgtccgtattgtccgcgcagggaatcacacgacgcatccaccagatagacgaggtcacggtgtggggcaaacgcccgatgaaagaaatcggcgtgcagaagacgaagttcgactcgctcgcactgaaagagaacattgccttatcgatggccgacattctgacgttcaattcgtccgtgttcgtcaagagttacggacgcgccacgctctccaccgttgctttccgcggcacgtcgcccagccacacgcaggtgacgtggaacggcatgcgcatcaacaatcccatgctgggtatgaccgacttttccaccataccgtcctacttcatagatcaggcctcgctgcttcatggcacgtcgtcggtgaatgaaacgggcggcggactcggcggacttgtcaaactcggtactacgccgcaggtcggcgagggcttccatgcccaatacgtgcagggcatcgggtcgttccgcacgttcgacgagttcgcccgcttcacctacggcagcgaccgatggcaggtctcgacccgcgcggtctattcgtcgtcgcccaacgattacaagtacaccaaccacgacaagaagataaatatctacgacgaggagaagaacatcatcggacagtatcatcccaaggaacgcaaccgatcgggttcgttcaaggacctgcacctgttgcaggaggtatattacaacaccctgaaaggcgaccgtttcgggttgaacgcatggtatatcaactccaaccgggaactgccgatgctcacgaccgattacggcgatgagaccgccttcgagaaccgccagcgggagcagacgtttcgtggtgtcctgtcatgggaccatatcaaagagaaatggaaagtcggcgtgaaaggcggttatatccatacgtggatggcctacgactaccgtcgtgaggtggcgccggacaactgggcctccatgacccgttcgcggagcaagataaacacgttctacggacaggcggaagcggaatactcgcccggcaggaaatggttcttcacctcgaacgtatccgtgtaccagcatctcgtgcgcagcgaagacaagaacatcatccttcaggatggcaacaaagccgtcgtcggatatgacaaggggcgtgtcgagctctccggttctgtatcggccaaatggcagcctgtcgagccgttgggcttgtcgctggtcttgcgcgaggagatgtcgggcgacaaatgggctccgctcatcccggcattcttcatcgacggactgatttcgcgcaaagggaacgtgatggtgaaagcctccgtatcgcgcaactatcgttttccgactttgaacgacctctactttctgccgggcggcaaccccgaccttaaaaacgaacacggcttcagctatgacgccggagtgagtttcgatgtcggcaaaaagggggtatataaactgggcggcagcgcaagctggttcgactcctacatcgacgactggatcatctggctgccgacgaccaaggggttcttctcgccgcgcaacgtgaagaaagtccatgcctacggtgtcgaagtgaaggccaaccttgccgtgcagccggcaaaggactggctgatagacctgaacggttcctattcgtggaccccctccatcaacgagggcgaaaagatgtcgcccgccgaccagtcggtgggaaaacaactgccttacgtgccggagcactccgcctcgctgacaggacggctgtcatggcggacgtgggcgttcctctacaagtgggcttactactcggaacgtttcaccatgtcgagcaacgattacacgctgacaggccacctgccccggtatttcatgagcaatatctcactggagaaaatgctgtcgttcaaaccgctggatgtacagttgaaacttgccgtcaataacctgttcaacgaggactatctctcggtgctgtcgcgtcctatgcccggcatcaacttcgagttcttcatcggcatcaccccgaaattcgggaaaagcagaaaataatgtaaacgtaaataaggtaatgatatgaaagtattaaagaatttgagcctgatggtgctgcttgcgctggcatttgcaggctgtcgtggcaagagttcccaacttgccgatttcaacaaacagctttacgctcccgaatatgcctcgggattcaagattgaaagagcagacggcagacagagcgtgctggtttccgtcatgaatccgtggcagggcgcggatagcgtcaccacccggttgttcatctcccgtaacggggaacccgttcccgagggtttcgacgggcaggtcctcgaaggggatgcgcagcgcatcgtggcgatgtcctcgacccatatcgccatgctcgacgccatcggcgagacggcacgtgtggtcggcgtttcgggactcgactatatctccaatcccgacattcaggcacgccgcgacagcatcggcgacgtgggttacgagggaaatatcaattatgaacttctgttgtcgctcgaccctgaccttgtgctgcttttcggcgtgaacggggccagtgcgatggagagcaaactcaaggagctcggcatcccgttcatgtatgtcggcgattatctcgaagaatctccgctgggcaaagccgaatggctggtggcgctttcggaggtcgtcgggaaacgcgcgaagggcgaaaaggtattcgcggatattccgatccgatacaatgcgctgaaacagaaagtgtccggtgccgttctcgatgccccgtcggtcatgctcaatacgccctacggcgattcgtggttcatgccctcgacggaaaactatgccgtgcggctgattaccgacgccggaggcgactacatctacaagaagaacacgggcaactcttcgacgcctatcgacttggaggaggcatacctgctcgcttcggaggccgatatgtggctgaacgtcggcatggcgaacacactcgacgaactgaaagccgcctgcccgaagttcgccgatacccgctgcgtccgaaacggctatgtctataacaacaacgcccgcaccaatgccgccggaggcaacgactactacgaatcggccgtcgtgaatcccgaccttcttctgcgcgacctcgtgaagatattccaccccgagttggtcgaagaagatttcgtatactacaaacaactgaaatagatgcgttcacgccccgtcatcctgttcaccgcgttgtccgtgcttacggtcggcctcttcctgttggatttggctgtgggcgcggttcgcattcccgtcggcgacgtatgggcggccctgacgggcggcgactgcccgcggactacggcgaaaatcgtactgaacatacggctgataaaggcggttgtggctctgctggccggggcggcgctatcggtcagcggcttgcagatgcagacattgttccgcaatccgctggccggcccctacgtgctgggcatcagctcgggtgcaagcctcggcgtggcgctcgtggtgctggcaggcgtcggctcgtcgataggcatcgccggagcggcttggctgggtgcggccgtcgtgctgctcgtaatcgctgccgtcggacaccgcataaaggacattatggtgatattgattttgggtatgatgttctcgtcaggcgtgagcgctgtcgtgcagatattgcaatatctgagcaaagaggaggcgttaaaggcgttcgtcatctggacgatggggtcgctcggcgacgtgacggtgccgcagctcgccatcctccttccgtcggtcatcgtcgggttgctgctggccgtatggacgatcaaaccgctcaacctcctgctcttcggcgaggaatatgccgtaacgatgggactgaatatccgccgttcgcgcggtctgctgtttctctcgacgacgctgctggccggcacggtaacggctttctgcggcccgatcggcttcatcggtcttgccatgcctcacgtcgcgcggatgctcttccgcgaggccgaccaccgcgtgctcctgccgggaacccttctctcgggggcggcggtattgcttctttgcgatatcgtttccaaaatgttcactttgcccgtaaatgccattaccgcactgctgggaatcccgatagtcgtatgggtggttttacgcaataaatcgatgacggtatgatagaactgtgcgatttttccataggctacgcagagaagaggcttctcgataaggtcgatgcctctttcaaaagaggacagctgactgcccttattggcaggaacggcacggggaaatctacacttctccgtgccatagccggactgaatcataattattgcggtaaaatcctgctcgacggacattgtatcgcaaacatgagaactccggagaaggcaaggcaactggcatttgtcacgaccgagcgcacacgcatcgccaacctgcggtgcgaggatgtcgtggctatcggccgcgccccttacaccaactggatcggccgcatgcagcctcaagatagggaaatcgtcatgcggtcgctctcttcggtcggaatggaggcgtatgccggccgcacgatggataagatgtcggacggtgaatgccagcgcattatgatagcccgtgctctggctcaggaaacgcccgtcatcctgttggacgagccgacctcgtttcttgacatgcccaaccgttacgaattgtgttccctgctcgcacggttagcgcatgctgagggcaaatgcattctgttctccactcacgaactggatatagccctctcgctgagtgacagaatagcccttatcgatacgcccgtccttcactgtctgccgacctccgaaatgatccgcagcgggcatatcgagcggctgttcaacaatgccgccgtacaattcgaccccgtgagcgggatcgtgaaatccatgccaagagactgactttcctgtcgggaaacacgtcagacgcaatgagggtgtcccaaaaagtatttggcaccctcgtattcgttgtaagacatgtcgtttatttcgatacctcgcacatcagcacgcctttccccgtcacatcggctttcgagaccgtgatggattttcccgtgtaggtcttcacgacggaagtcccggcagagttccacagtttccatgtataggtataagctgtcccgcccgtgtcgatttcctcaccgcccctgtataacacggctttggcatccacgtcattgccgttgttcttgatggtgaaccccttctggctgaccagatcaaccgtgatggggtcggacatatccgtgaaggagatgatgtcgcagacgaccttgttcgccgaggcgttgcccgccgaggtgtccgtatccttgatggcgcacttgaaggtctcgaagttgagaacggcatctgccgtaatcgtgatttcgtttgtcgtccagcctgccgtcacgccccgaggattggtcgaggtaaggcatgcccagccggcacccagcatggagttgtagtagggacacgaaacggcggctcccgatgcggctgcggcactcagtgcggaggtcagcgtcacgaccttcgtggaggcgttgactgccgaaatggtgtactgtgccgatcctatggttatcctgcctcccgcctccatgttcattaccgaagcgaccgttatggtcgtggctccggctgccgcggcagctgtcagtgtcgtgcccgcgaataccgccgaatccttgatgccccacgcgtaggtgacgttcgtcgtgtcgatagaggctccgcgccacaggtcgcaatgcgccctgagcgtcgccacctcgtcgttcttgaatacgatgccgtcgggtgcatacgccacggcggcgatcatcgctccggcgttcaggtgctgcgtgaactgaatctccgcccggaacggaatctccagcccgttggcgtcgatgtaaaccgcctcgaaagtataacgcacttgcggagcggaaacggtcatgtggttggctttgacggtaagggcatacttggccgatgccgcgccgatggtgcagctgtcctgtccggagacgatcgccgtaccgttcttgtaccacttggccgagccgctcttcacgcctgccgtaagcgtcgcggcattgcctaccgaggtgatctggtcggtcgccgcctgaccgctgacgaagagcgaaggggtaagtaccagatagggagaagccgcccacgaaggggcataggcattgttgtctctgttgtacacctgtgtcaggggctgcgaggagccgatgaatgcctgcaacgataccgcgtcgttctggtcgatgatggtgacctgcccgcgggctacttttactgccataatagattatcggttatttgttatttccacttcgcaatcgaaaacggccttgcgccacacgtccccgccggttatctctatctccctgccgtaacgcggtgcggcgttccatatcctgtcactctccgtatcgcggctcgtccgtatccagcggaaattgccgtcgggaatgagcgatgtaatctcttcaccgcccctgtacaccctggcacggagtaccgtcgagacgattccgttgcggaatgtcgtgccgttttcagactccacataaacagtataggagggagatccgtcgtaaagtttgaaaaaggtatgggtcgcactgattttttcattacggtatgttgccgtgtagcggagggtcagcacgtcgcgcccttcccagccatgaaacgggggtgtcatttcaaatacggcggcattgcatccggcatctttccatatgccgtcaacggcaaggtattcccactgccgactttccggctcgaaattgtattcggtcgccacaagcgggatattctccggctcgcatgcgcctgaaagctcgtccttgaaatggaacgccgtgccgcctgtcagggagacggaacggggcttgagcagttcctgcgcctcctcatcgaggtcttcccagcggatggtcacatcgcgcagttcgatggtatccttgccccacttgaaccgtcccgaggcgaaatggcccgtcccgtccggatggatgacgaaagaaccgtcccgtgaaacgatcgagccgtcttcgttcagccgcaacaggggattctgtatggtacccccgatacctcccttattgaaccaggcaccgtaatcgtccgtgtaggacaaggcttcatcggtcgcctgatagggggtcacgttccttccggcctccaattgaggggcggacaacgacagggggacggaagcggcaatgccgagacacatgacgggggaatctgacccgcgtatgaggaacgggacattataacggacccatcctttaccggcagccaccgtccgatcaccgacaagatgttcatcctgatagaaccggatggctgccgtatcttccgcttttatccagactgagaaacaataacagactcctgtatgagcctcccgccaggcggcactttgcgcaccaagaagactgtctccggctatccgtacacaccgcccgagtccggcgggagatgtttcatccagctcttccgaatggctgaaccggcaggacaggctgtcgggtatgacattcttgtggattttgcccacataaaacgtgcttgaaaaaccgttctcgtctcccgcggtaagcgtgccggctatattgacattgcgtgtggcatagagattctggaaataggccccgtaaccatccaacatgccgaagaccggatcgatgatgccgctgacctttcccacacgggccttgctcgcctcgctgaaagcggatacggaggcaagacgaacaatgttcaggtcggcgacctcgcaccagtccccctcggaggccaggcttgatgtcaggtcaagaaacaggctccggctgtactgtgccgggtaatccacggtgatgacccataacttgtacttccattcccggccgatggagatttcatcttccgcatccgtcttttcacggttcgtatagccgaatcggatcggtacggaacctgatgttttggaagacctgaccttgaacgataccagcaggcgctccgggtatccgaccggttcttccaatgtcagcatcagcccgaaggaagcgtttcctgccggttccgcgttgcggataatgcggacaatgcgtgtcgcttccgaatcggcatccagatattccgtttgcagcatgctgccataaacggcgtacctggacttgtccggcactcccgccatgcctccgtccatgacgggatagcacagggagcgttcggtcgccatgccgtcgatgacatccatatagggtgaatcgctgtcagaagccgtcaggtacaaggcgccgctacgtgccgtatcgaacaggttggtaatccgcacgaagtccagcagttcaccgccctgcggttcgtccccgtccagcaatgccccgatgaaataaggggcgtccttgtctccgacaagctccgttccggtttctgtcacgcacatcagcgaatagacggtacgctcccgttcggcatattgcctgcggatgatatccccggcttgcagtccctgtgtcttctgcgagtcgggggcaatacggatcttgtatgtcggataacggaatacggacatggattatgacagtttttccacggtgtctcccgaacagctgtcgctgatccagaaggaaccgttggttaccgaagtcttttcgacctcgaactcataggcgcggaacttacggcgggccaccacctcgtcgaatgtggcggagacgcctcctgtcgtccggttccggcggacagcccatccgcttccggaaaggcccggggaaaagaactccgaagagagcgacccggtaaagacgctgtttccgtaatgccggataccgtcctccaccgcttgcaggcgtaacgcctctgtcaagtataggattctgtcagtaatccgggtgggcgacgcatggattccgatatgcccggctgcttccaacggaacagcgaccgtaacgaaatcggcatcggtgcggatatggaacgattcgctgtgacggttctgcggggcataacagctcacggacggacggtgtgaaaaatccgtgctgtgagggatagccgtccttacgtcctcttcctcgtagattacctcggaagaaagcgatacgcgctccctgtcgcctgtgaacataaatccctctgctgtgcccatccgcaagcgcttgtggataacgataccttcatcggaagtgtctacccggtatgaggagagcaggtcggcgccgtagttgtggcggacagtcagcgagcccggaaaacaagcctttccgtaaggggaaagcatcagacactcgccgtccacgtccgatatgccggagaacaggcgtatcttcggggtatggtcgccgcctaaaagaaggtcaccgccgatactcccgaactgtatcttgtccttgtcggtacagagcagtacgggaacatctccgatccggatgccgaatccgtccaggaacgagaggaacccgccgagcgcgacatcctcttccgaaaacgaaagcagacatttccctttgtcgcccagttccacgccttgcaaggctttcagtccgccatccatgaccgtactccctcgcaccgtcagattccgtctcaccatgccgtcccgcatcgtccaatccaccgtgtccgtattggcgttgccacgatgatagacatcctgcccgcccacggccagccgtgtcggggagatggatattcctgtatcctcgtccccgataatccatgcccctttggaatgtaccgtcgcatccagaaagtctatatgggaagcgttgattgtagcggtggccttgtccgcgtcgtaacggagcaactgcctgccgccgatatgcaggctgtcgcccccgactttcaggttgccggtaatcctgataccgtactcgatggcagttaccacaccttccggatcggtaatgtcctgcgaataggtttccaggatacgggtgtttccaatgccggcttcgaaaccgtaattggcactgagcttgccggtcatgtcaccgcccgatttcttcaggtaatccaacagcaagccaccgcttccggaaccgccttctcccgtaacggctccggcaatggcggatgcaaaaccgtaagcggtattcttcagtctcaggctggtctcgtcgccttcctcgatgccgtaaggatgctcgtcgtcctttttctgctgggcattgaaaaagttatggtacagctgtgcatagatggaatagcacaggctctccttgtcgagggtttctatatcgggatgcagttgtacgctcatttggtatagctggtcttggaaagaaatttctggatacgtgatgtcagcgagatgaagttcggcatattgatcggcgacatcgtgcccatcagtgtgggagtcatgattttcgaacattccgtcaggaagtcgagcatcagccgggcaagctcattacccagaaccagcggctcggtggcattctcgtcaccgagcgtcaccttgttgtcggcaacggcaacggtcgtggaattgaccttttgtaccactttatctgctgtctgtctgacttcagacttgtccaccgtatgcgtgatgctttccgcatcgataacggttgtcgcttccttgtccttgtcattcctaacggttgttgtgacggccgtcggcgtatagtgggtggaggtctcgttaccggtggtttccagttcgtcgtagtccggggaagagtcgttttccggatccagttcctccatttcggtcacgccgatgacggtttccgtgcgggcattgagccgcaggatatccacatgggagaagttaaccacataggcataacgggtggcggcatccatgaagatggtcacgtcggaaaaaagtgcggggacgatcaggaagccgccttcgctgttggtggcggccgagagcaacacgcctttatggataacaggttcggcggaggccgtctcgtccgggtactcgccgacatcaatggtaccgccgtagtcggaaaactcctcgtccgaggggttgtcgtgtatcttggcgacatagccgtgtatcatgcgggccgtaccgataccggacatgcctccgggagccagattgatacgctccatactccgtcccaaggctatcttgcggatagcctcacggataagcaactggttggatttgtctgaagacatgagttttttgaaagaataggaggagcatagtttattggttgccaattattttgtacttttgcaaagacaatgatattacttatgaaa

SEQ ID NO: 2 - DNA, 62108 bp, Butyricimonas faecihominis
aatcataatagataataaaatatttgaacgagccattttgagagatttgtggtaatgagtggatggtttgttgcgttgagtatgtttgcattataggagagtaacagctgagaaagggaaaaggaaaggctgaaaataggccataggacaataccgcaccagtgcgctcccaatgctccacccttggagaaacattggggtaaaatttgggttatgatggagagaaatggggtgagcctaatcttttctttttcatggattgttcacatctgaataaggggaaaattagctcgttaagtttgattatcaataagaatgtgtatgaaaatatatcgttgcccttttgggaaagctgagatttattatataccggattctttggaaaacaagtgataaaaaacgccgtcatctgctggacggcgttttttgttttatataaatttctcccggtttcgggtattattcagtccgaagatgataaagaggacagaggcgatcaacatgttcatccggcaatggaagaccgtgttgaagaatatctgcgggttcttgtcaatgggaacatcgtaaggatttaggaaaatgttccattggctgtctccgatagctccctgtatcatggagaataacagtccgataatgataatcaccacggaagttccgttcccgttcttgatcattgtgcttaacatgaaggaaagcgtgccgataaaaagagccgggaccatggcttgtagggtcagtcccatcgggggaaccgacacgatagccaaatccgttaatagagcaaggaaacaggtaatcacgaaacagatcacgtaagaaatgatgaggcgtaataaccagaccttataactatagttcgggattccgaaaataatttccacgatcttggcgtcctgatcgttctgtatgccgaaacacatcgggtagaaaaccaacagaatgctcggtaacatcaacatggagtaggctgttgcctgcgtgatctcgtcgtctcccagtaatttcacgatcaccgtgatcacgtagaaggcgagggcactcaacatgaagtacaggaatttattcccgaatataatcttgatgttatattgtaccagcttttgtagggttatccaaaattgcaccatagcgttaatgtaaaatgtaaaatttagaatttagaatcacgaaatcgtcaatcataaatcgctaaatctttttattgtgttataatttcttctttgttctcgatcttcacgcttctcaacagccacaagtaagagtcttccaaggccgggagaatcttctcggcggtctcggtgggcttatgctcgctgaggcaacgtaccttgatcatgtcgccttggcggatgtggtggacgatcagcatgtcggacggtaatttagcgaaatcccgtaccggcacctcgaaactccaggtaacatccttggcgatattagccatatcactcggtgttccgttgtatttcagaatacccttgttgatcacgccgacttggttacatgaactggcaatgtcctctataatgtgggtagagaaaatcacgatccggtttcgggacaattccacgagcaagtttctgaaacggattctttcccgcgggtccagaccggctgtcggctcatccaccacgagtatccggggcaggttcaacagggtttgcgcgataccgatacgttgtttcataccaccggagaaacctccgatcttcttgtccttattctcgtacatatgcacggcagaaagcacttcagcaatccggttatgacgtatctttttgttatatattcctttcaacagggcttggtactccaagaactcccatgccgtgaggttctcgtaggtcccgaattcctgcggtaaataaccgatcaaaccttgcaactcttcccgtttcttctgggtatcgatgccgttaatgaatatcttcccgtaactttgttcgaagaccccacagatgatacgcatcaacgtggttttaccggccccgttaggccccagcaaaccgaacattccggtatgtatctccatggaaacggaattcaacgccttgaacggttttttcttcaccccgataaacggggccttggaagccagacggaaaatagtctttttcagcatacggaaccgaccgtcgatcaagtcaatattgatattctccttgttgatcttgttggacaggtagcgagcggcaataccgagataccagaacataccgaggaagatcgctcccccgctgttctcgaatttcttgcttgcccaaatcaggattaccatcggaccggcataataaaagacgatagcaatgatccgtagaatcttggcaatgacggtctgtttccggttttcgcagaattcccggaagatattcatgatacttagcgtcatcgtccatgtaatgaaggcaaaaacaattgcccagaagaacagtacttggtagctaaacgtgaagtaatacatgaatcccagcacgggtaacgaccacaacagaggttgcatatcccgccattcgcgataatttccttgcaggccgagacgttcccgaatcttcaaaccggaagtccattcccggttgaaacgtgacgggcgtccgtacactttgacaagattgcatatcttgatttccagctcttcgtcagccgggatgatattactttgcgcccggcgtaaactgtcttccaagaaccaggtcactcccggtacgagaataaccgtcaggatcacgtatagaatccggtttaacagggtataggtccagaagtacacgcagattacggccacgacgaaaagcacgatttgcaatagtttcatgaaaaggctttgtgtgcgtaggcgatataaggcgtcttccattccggaatacaatgtcgggataatgaccagagtcaacagcgtactcatggtaagtcccccgatcacggtgatggcaaacggggctcccagtccggacacgtattctccttgccccatggctaagggaatcatggctacgatcgtcgtgatggccgtgatcagaatcggtcttaaacgggataacccggccgttatgatggcccgttgtttacggtttccagtccgacggagtaaagaagtgtagtcgataaggatgatactattatttaccacgataccgatgaggataatgaaacccacgaaaacattggcattcatcaatgaattgctcgtgaataataacgccagtaaagaaccgatggcggccagcgggatggtaaacatcaacacgatgggagccgtggttgattcaaatacggcagctaaaatcatgtaaatcaagatgaaggcggccaagattaggaatgtaaaatcgtccatttcattctcctcgtgtacgacttccacggcgatacccgtcgggacatccatactttgcaccagctcgtcaatctcctctcgtgcggcctccagcaaatcctttgattcgttgatgtcggaattgaacatatagacaaggttcacctccttttcttggttgatacgggtgatgtttcccttatcacgtcccaagttgatgcggctgaaacttctcaattgaatcaacccgttattcttgttcgtgacttctaaattgcgtaaatcttctagcgtccgggtttgtgtcttctgatcgtcctcgtcataattgatgtcccggatcagaatatcatattcctgattcccggctttgtatttaacttcagctttactctgaggctggaaattggaaagctcttggcttacattaccgggttcaacctcgttcattcccatgaggtactggtcaaagaatattttggagaccgtacttccttgggaaactgaaatgtgggaattggaaatgttatccagatcgtcaagttgatatttcaaatattcggcaaaatttgccatagactcgaaatcctgccccttgattatcactttttctgtttgactgcccatacccatcattctgagcaaggaactattgccaagcattccaccgccaccgctacttcctcggaagttctcgctactctcgctggcttccaaactgatttggttgatattgaccgtttcagccaaccggagtacttcggttttcagttggataagggattttttattgattttctggtaatcatctttcaaccggatcgtgagccggacatcctctttcattacgttggaagagaattcttttatttccggaacttcgagtaattcgtcctcgaaaaggcgaatcatctcgtcggttctttggagcgtgtagcccgttggcggggtgatatacacgttgaacgtgttcagttcaacctcccttagcgtgttcaacgttaaagaggtggataaaaccacggtaaccagtaaagcgacaagagcaataatgatcacttgtgccgggcggcgaagggacatctttaggatggcaacatatatctgcactagtctgttatggattgacaggttgctgaagttgacatcttccggagtcttgcgcaaaatagcgtttactgccatcgggatcaataacaaggccacgaccaacgatatggtaagcgttgccacgatagagattccgatatgttccccgatcagcttgatcaggtaattgtccgcgaaaaggaagggcaggaacacggtaatcgtggtgaccgtagccgccatgatagccttccatacttcggtagttcctcgaacgcaagcctcatcggtggaaattcccaatcctttcagccggtagatattctccatgacgacaatggagttgtccagcaacataccgacggcgagcgcgatacccgtgagagtcagcgtgttgattgttattccgaacagataaaagaaatagaatgacgagaacacggaaatcgggatggcaaaagccacgatagaaatgatccgtattttccggaggaataggaacaacacgaatatggccaatatagctcctgaaagtccgagatcaataatttggtcaatatttttgttcatcacctcggcggcatcatcctccacctcgatgagaacccctttagactctaattccccgtttaggcgatcaatttcctgccggactttttcggaaaggtcgatcacgttagccaacggtgatttggacaagatacaggaaatcacctctttcccgttggtacgtgcgtatgattcctcttccttcacgccgaattggatgtcagcgatgtctttcaactggatcggtccctcggcaaccacgatactccccaagtcttccgtggcaaggtattcggctgtcacgttgacgaaataacgtttgttgttctcgtaaaccgaaccggcgaaactcttttctgccagattgcttgaaatggctcgactgatcgttgatgtcgtgatgttcaatgccttgcatctttccggatcgacaataacctcgatgcttttttgccgtcctcccatgatggtgacgttagcgatcccgtcgatattttctaagtagggaacaatctctgaatcggcgatattacgcacgtagtcgatgtcgtcctccccgagaatccgtaggttcatgaacatatcactggcggaacccgaagaagatttgttcacgtttaacctgaaattatcaggcagattcggggtgatgctttttattttttcttccagttgtagaaaggtgtatttcagatcaacgtcctgtttgaaagagacggttacctgtcctcctctcgaataaatctgggtttctattttttcaaccccgttaagggcactgacggcaccttcgacgggaatagctacttgattctctatataggaagggtcggattccgtctcggagctaatgctcacgctcaacaccggcagttcggcattggggtataattccatgggaaggtgtttataggagaaaattcccataagtaccagcccgatgaaaagcatcgatacaagaacccttctttttataatcgtgttcatgatttctttctgtcaataacgtaatacacacacggaataacgatcagcgtcatgatggttgaggtcagtaaaccaccgatcacggcaagtgccatgggcgagcgcaatgaggctccttccccgaatccgaaacacatgggtagcaatgccagaatcgtggtggcactggtcatgatgatcggacgcacacgatgctgtgccgccattttgatagcctcttccaacgggtgtccctcttctttcagacgattgatcgcgtccacgagtatgatagaactgttcacggcaatacctgccagcataataataccgataaaggccatcatgttgagtgtttgtccggtgagcaggaatgccaaaatacatcccacgccggctaacggaatagtcagcaggatcgtgaacgggtggcgcaaagattcaaattgtgccgccattaccatatatactaatagaatagataaaaacagggcgaatcccaacccgctgaatgactcttgtcgcatctcttcctctcccgttattttagccgaatacttggccgggaattcaacctcggacaatttagctttaatagcaggggtaatatggcttagtgagtattgtttctcgatcatggcggtcacgatacccgtccggctttggttaacccggttaatttctttcggggctgacgtgatttcgatgtctgcaatttctccgagacgatatttcttctcgccttgtatgatttcaatatcgtaaatttcggaaagggtcacttcgggaaccttgatattgatgtcaatagtctcgccttgtgtttcgaaagttccggcatccttacctgccagtttctcgctgacttggttacttaccgtggcaacatcgatcccgtagattccacttttcaagcggtcaatcttgatattcacctccggggctcctttctccaaggaagatttgatatcgtatataccggggattccggtaatcttctcttttatctcggtacacaattcatccagcaattcaagttcttcccctttcacctcgattaccagtggtgcgccttctgttcctaggatgctttgtagggcagattcccctttctcgtaggagatttccacaccttccggcaaggggtaattctcgttaatattcgtgataaagtaatcagcatccaacttggaatctttctttatctttaccttgatttgggattgattctctgattccaacttacccccgctttgactttcaaggttggaagggccaaccagtgtgtattgccattcaatatcatcctgtcctagagtccggatggcatcttcaatggttcccacggcattatccgtactttttaaccttgttcccggttccatggtaacaagaattgagaactccttcgattctgttttaggcatgaactccatgccgattaacggtaacatcaagtaagaaacgatcatgagagctgtggcgatgccaatcaccaagtatttccttttaaggactttcccgacgaaatttccgaaacctttgatcgtgatggcgtgactggaaatgttgtctttcttccgcatgaatttcgatgccagcatcgggataaacaggatagaaacaaaaagggaggataacagcgagaaactaaccgtccacgcctgttccttgaacagctccccggcggcaccttgcaggtacacgattggaaggaatactacgatcgtggttaaggtggaagccgtgattgctcccgctacttccgaagtccccctcacggctgcctccgtgggtggtaggttgttctcgtccatgtttcggaagatattttccatcaccacgatggcgttatcgaccagcattcccgcacccagcgcgagtcctcccagcgtcatgatgttaatggaaagaccgttgaagtacatcaggttgaacgtggcaatgatcgagatcgggatagagagactgacgattaatgtcatgttcactcgtcgcaagaatatataaagtataataacggcgaggatgatacccattaaagcggaatctttaacctcgttgatggaactcccgataaattctccttggttactgatgatatggaaatcataccccggtaaacttttgcggaattcatcaatcttggctagcaagttttccacggcatttaccgtgttatatttattttctttgtagatactgatccccagacagcgttccccgttgtaacgggccaagttttccgggtctttgttgcgaatggacacggaggccacatctttcaaatataccggggcttttgtcttactggaactgcttgtagattccgtggaagaggaacttccgctggaagaattctctttaaatgccacgataatgttttcaatatcttggagactggtaatcaggtttacccctttcaccgtgtattgaatatctccgtccgtgatcgttcccccggaaacattttgattgatggccgtgatttgcgaggcaattccgtcggcagttaacccgaatgcctccagcatgtagggattcgtggaaatttcgacgatcgcctgttcctgtccgttcaactgaatatccgcgataccgtctacccggacgagttcattgcgcatgtaattttccgcgatcttccgcaattcgttcatgtccttcacttcgttatgagtgagggcgatggtcatgatcggtgtcgcgttggcatcataacgggtaacgttaacttcttctatggtttcatcttgagaaagagaagagacacttcgctgcaaatccaagaaagcggcatccatgtcttgatcccatccgtattctacggtcactttcgtgtagccgactttcgtgacgctgtacacgctcttcacgccttcttgacgagcggccgtagactcaacgttcgtcgtgatcagtttttcaacctcttcgggtggtctctgaccgcttttcacttccacgtaaagagcgggatttttcaggtcagggaaaaggtctgtccctaatttattataagatatggttcccagtaaacatactgccagcgtgagcattaacacgctcacggggtattttactgcaaatttggtaatgctgttcatgtctttttatttcatgatttttactttgcctctgtttctcaggaattcgtagcctttcaccacgatcttgtctccttggttcagaccgctttccacctcgatgaaacgatcgtcgctgataccaaccgtgatgattttttccatggcccggttttgttccaccgtgtagacaatccggtttcctccccgacgggaattaacgatgtccttcggaatgacaataaccgaatccttttgcaaagtaataatctctcctttcgcgaacataccgggacgtagtttcagttccgggttgttaatcgtaatatatccggtgtatgtgcgggtatcctcgttgattgccggggataactgggaaacaagaccggacagggtatctgatttgatattataattggtgaccagtactttctgacccactttcaccttgtcgatcgtgttttccggtagggcgatttccatgtacatgtggctgtaatccattaatccgaccatcgtttcaccggatgcgatctccacgttcggggtgaaatagggtaggctgacgatggctcccttgaagggtgctttgattgtgagttttgccagttccgtgtatgccgtttccaatgctgtttgcgcttgtatgtagctactttcggcatttagtacatctttttccgtggcaccgcctttttcaaatactgctttttgcccatcccattctttcttggcgatgtcaacctgcatcttttttgtcggtaacgatacagtgttttcatgttctttattattcagcttgatgatcacggcaccctcctccacaatgtcacccagcttgtagggacgcttggttttggggttgatcatcaactcgtatttaccatttgtttcggatttcacttccaccgttttggccgctttggctgttcctgtcgtggtggtcaattcccgaacatcacgtttcccgacttcggcaagccaaacaggcgtggttgtctctgaagaagaactcattcgttgctcgttacaagcgttcaaggtgtaagccagcagaatcaccccgatatattttatggatttgttgatcatagcgttttgttttatgttttgtgttagggtttatttcaataaattaaccggtaaataagacctgttattctggtaatcccacagggtttgaattttcagatccagtaatttcaatttgtatgaaatgatggcatctgtcaacgagtttttcgcgtcggtcaactgggtttgttgatttttcagctccataccggtaagggttccgctacgatatttctcaacgttgatgtcatacgtacgttcagcgtttttaacagtctggcgggcaatctcgatttgtcgcaataatttgggcaattcccggcatatctggcgtacatcaagcatgatggattttctttcttcctcgttgctgatttccgtgttctcgttggataattccgtgctgcggatattcgcttttcttgccccccagtcccaaatcggtaccgtcagggttatcccgatcgtttcgttatcatccggtttcgaaaaagctccgttaaagttgcctccttgtcccatcaaacccactctggcggaaatgctacctttgaacttgttattatcctttgcctcgatcaggctaaaaatgccttcttctatggcaatttgttgttgacggatctccatccgttgcgttagggcatatttaacggcttgattgacatccacgtgaactgaatcaatttggatgtcaggtaaaatgttgatgtctatatccaagggaagacccaaggtttgtttgaattgatctttggtattctcgtaactcgtttccgtgtcggcaagagaattttcgtttgtggccaaggtcacctccgcttggaatagctcttcttgggggatcagatcttgttccactttatttttgatcaactcgtagttttctttttgactttggaaggcttcccgggccgtaacgagccttttataagactggtaaacgccataaaatgctgcggtcacgtttttctcgatgttcagttgggccaaagcgtattgtatttttgctttttcaaggttaaattccaacctcttcaattgcatcttggtcttgttgtaggtaaagattggttgctccagatttaagctcagattatttgaaaaagaggtattcttggctcccgaagattgattatcgtcttcttgccagttgaacgagttactgagtgtgactgtcccgtccgtccatttgatcggttgactgatcctgaagtcaaggccggaactcatggctttccgggtataccattgtgtattgtaatcgtcgaacgatgtacttctggtatattgaaacgggttcaaattcaaactgaactgtgattttaatgaagccttttgctgaatcagggccagctcgctttgttccagactcattttactttgaatgatggaagggctttgctgataagcgatctccagagccttttccaacgtcaaaatttcctgagcaaacgttgatccggaacaaagcatgagtattcccgaaataatcaacgatattgacgcgatctttttcataatatgttgttcttatttttatttgttattgttcgtgtacacccattttaccgcatcggcaaagataatttggttcgattccgatcccttgtcgcttaaggtaatcttggcctctcctttcgagaagtagaaagaacccagcgttctccatccttgccgtccccggcccgtctcgactgaaatttcctcttccccgtcatcatgttttaccgtgtaatattgtatttttttctcttcacctcctcggtggcgccatcccatcatagggagctcggacgtgtacacgaatacctcatagaatcccgggatttgtatctgggttgtccattccgtcttgttactaccacttccggatttcttgtacacggcactattgatatagtctccataatagtttactccgatggtagctgtccatctgctaggaggcatccagaagtttaagttcttgtatttatcttcgctctccttcttgaagaaagattgtagtttgttcttttgattggattcgattatccggaatccgggatcttcgttgtccaccgtgatctctttcgggttaaacgtgaaaagggtggcatttgagtcgaatattcctgttaccgtgtcggtcgtcgtggtcgtcactttagcaaaattctgcatgatcgtactgggtagattctgcgagatattcgtgttaatcgtgaggttactcggacgttcgtcacatagaatacgaatctctttatatttctgtggttctataatataatttttcgccggtttggcctccatttgagccgcccgtcctcttcttccccgcgggccaccggggaacattccgcctccttcttccacgttgacggaaatcacgccttctacgttcgtggggttatacacttggaacttcacgatatatttcgtgtaatccccgacttctacttgatcggcatccacccctttcacgataaaacgaggcgtgctgttgatcgtgtaccagttcgggatgaaatccattaaattgaaatggaacttgcgaatgaactcgctgttcaggcgggtgaaattgacctcctgaaactggtatcttttcgtgaattcggccatgaattccttgaactcgtttgatgaaagacgggagttaatatagttcctcaggtaaacacccttcagtttcatcatttcgtagaacacctctgtcgaaagcgtgttatcgagtacggcctgttcaaaacttttcccgttcaggtaagaggcagctcgttgatcatcgcccatcccgttgaacatccggaagaaatgtcttccctgatcgctttcttcctgttttagcatggtgttcatcacgatgtctatgattgggaaattctgggaataaatagaacccgcgtaattaaaatacatggacgataaatcgtacttgttcagtttggatgttccggaccattcgcccgagaacatgttcacgaatgtatttccctcttcttgaaatgtttcctccgagagaagaacccggcgggcaaaatcccgaatgacgttcatttccacgtcaatttcttccatcgctccttggggatcacgtcgtccccagttagccattcttttcttggcaaatttgaaattactgctgggcagagtcgtggcaaattccggaaggaaaaccatctccggttgtgtttgctcgctgttccctttccagtttcgcacgtatcccgcgaaagaaatgggcgtttccgccatgataaatttttgatacgggtatttacggccttttctcaactcgtattcggatttcacatcttgaaggaatccggctaacgtgtctgaaatgttaggaaaaacttcagaatagaaatcgtgacccttaaaattgtataattcgatttgcacggaatcgaccacgatactctttttctcgtagtccccgatggctaaactgataccgggtagttgctctttattccggaatattgtcgtgtcacccgattgggaagatgtcccctgtgaaagaatcgtccggtcattgggatgaatcacttttagcgtgtaattcgagaagtttttccgaatattataaggagcttccgggtttaccggtggaaaagtagaggggtaccacaggcattccggggtcagcagggtaaatttgtcctgcacgaaagcgtatcttttcccgaaacggagaatactacttccggtttgcgtgtcgtaatattcttcgtccgtgatgtctaggtagcaaatgttttcgtcgatggaaccgttgtacgtgatgtccagttcaaggctttcgtacgggcggagtttgtattctgcaatgataacttgtgcgtctcttttgtagggaacatcttctccttgccgggttaatttttcaacttgcagggatggattcaggtagaacacgattttgtcgatctcttgatgattccggttttgaatctttacgtgtgaattgacggtaatttttttgtcggtctgcgagaatataatctcttggtctatcaaatgaaccttgtcaatgttattgtattttttgtatctttcagagtataatttgcgttgattatcaacgtgattgaatcgggaaaaataggtaaagccgcaaccgattccggcgatcaggataatacatcctagggcgttcagcaagatgtttttcttgggatgtaacggtaagcggttgaccatagcgatggtaaacgtgagtaatcccattcccaatagcaagaatgttaatcgttgaacgaggtagggaaacaagttcgtgtgtcccagcacgtcggagaacatattcggcaccgtgagggcgaagaagtcaaatgtcccgtgttccgcgtctccgagataagataaggtcaccccgataaaccctagcatgatcacgaacgtaaccgcttggttacggatgaaactcatgatcacgaacgatagtcccaacacgaaaatcagtgacgggatcgataacgtgagtaggtagaagaaataggggaatagggtaaatggggattcacttgcgaacaagtgaatgaaaccagcgataagtaaggcgatgatgtttaacgatacgaataccttcacgattccccatgttttcccgatgatgtaatccgcgttactcatcgggcgcacgtagatcacttcggccgtatctaacttcttgtctcgctttaaaaagctccctgccaagaatatggcaatgacggattgcgcgatattgaaaaggtagatattgacaaacgggatggaggatggcatggcaaccatgacccattcgaaccaccctaggtttgactgtgtacccatgtgaaaaaatacgataactaaaagggataaaatagcgaatatacggaatagccaacttcttcgcagaagcttggtttcgtatctcgatattgtgctgatgttgtgaatattcatcgctggtttcttctatgatttacttgaacaattcgttttcttggattgcttcaacctgcatgttcatcttgtctttcaacaagtagtccatgtagtaaacgtaggcatgttcgaggtttggttcgatggctttgtgcgagtagccgtcgacagcatcggccacgacctgaatctccatacccccgtccgtcgggatggttgaaataatcgggtatttatctttgatttcctcatattccatgtcggttacgaaaatttcccatacttttccgcgagctaggttgatcatctcgtccggggatccttcaaacttcagttctccgcggttcaacaaggctagtttcttgcaagtacttgaaatatcacccacgatatgggtggaaaggatgatgatggaatccttgtcgctaatgtcggacaggatgttacggaaccggattctctcttccgggtccagtccggtagtcggctcgtccacgataatcactttcgggttcccgataatggcttgggcgatcccgagtcttcgtttcatacccccggataaccggttggcccaacggtcacggacttcaaacaaaccaactttacgtagcatctcgtctaccacttcggcccggtgttgtttccccttgatcccggcaagcccggcaccgtagtcgaggaattcccatgttttcagtttctcgaagaaacggaaatcctgtggcaagtagcccaacagggaacgaatcgctttccggtccttggcaatatcgtaatcgtcgaaatagatggttcccgacgtgcaactctgcaatagagtcatgattctcatgagagaggtttttcctgctccattcggtcccaacagaccgaacatccccggttcgatttccaaattcaagtcttttaaggcttttttacctcccgggtagactttattcagatttacaatttttatacgcataacgctggtattttaggttggtataaatctatgcataataagccggaatatatgttaataaaatgtgaaatatcctactttgagtgagacactttttgcttaaaaaggtttattattttaacaaaacattaacttattaaccccgatgtcggttcccaaaagtcattttggtgaatttttgttgactggctgacggtttgccctgtttcatacgatttttgtttaaatttcttgtaaaaatatgaaattcagtgttatcggtcaataattttaaatgaacatctgtaatttcgggatgaataccccgattttatcgatgaacacgcgtttttaggaaaatatttcccggatgacccggatgcttttggtgttaaaatccagatttagatggaacccaaggaaaagtagggcaatatcgagtaaaatcttacgaccttgctgattaagcgggatatttttcaattcttgcaattgacatgtgcaaagggcatggatagctttggcggagtgtgggccggtgtagtaatttcccggtgaacccgcggggtagaagcatccatcgttgatgttgaacacgtggtcggggtgatacgtgctgttgtctatgctaaagccgagtaatttacttaaccggaacaggaataacaagttgaaattggcgatgtcgtcacgcgtgacgttcaggtattccacggaagttttgatgtactcgtataaaccgggattcgggtcggaatcccgtagcacgaggtttaatatttcaccccataacagggctatattcatcttgtacacgtcgaaatagatggccgacgtgttcacgagcggagagagagatttcagtttgtggagcccgcccctttcattcgggatgaactcgatttccacgatttgcatacactggacggacgtgttcgttttacgcttgaacagggccaacggggtaatcatttgcatgtaacctctttcctccgagtaaacatgtagaatttgttgctgttcggaatgaggtatgcttttcaatatgatggccttcaccgtgtgcatttctttttataagttgtttaaaaaacggcataattcccggacggcttgaccccgatggctgattttgttttttgcgtgaaggggcatttcggcaaaactttcctgaaaaccttcgggacgaaaaatcggatcgtaaccgaatccttcgtgcccgtgcttgcttgtgagtatctccccgttgacaataccttcaaacaagtattcctttcccccgagaattaaagcgataacagttctgaaacgggcttgacgttccggtatattttgcatctcctgtaaaacttttttcatgttggcttccgagtcgtgagcattgcccgcgtatcgtgcggaataaactccgggagcattgttcaaggcttttatttctaacccggtatcgtccgcgaaacagtccaagccgtatttcgcgtgaatataccgggctttttgaagggcatttccttcgagcgtgtcttgttcttccggaatatcctcatggcattgaatctcttttaaagaaacaatctcgtgccgggaacctaacatttcttttatttcttccagcttgtgggcattattggtagcgaaaactaatttcatgacttgtaataatttgtatgttgcaaaggtagtgaaattgggagtagaaactaacgattatccctagaaatgccgtggaaagttaaaaagtcatgatttatagatgattactactagaccactaccgtgtaaaacgctattagaacgctattaaaaccctattaaagcgctatatttagaatagagttttataagaattttaaaagcatgataaaagagtgatttcagctaatgatcaggtagaaatgtaagattgatcatatattaaagattgacgtgggactgtcgtgggtaggacaatttataatccttggtattataatttttcttggtccgtgcgagaagaaaattatatcgtgtatatttgcattcgggtaaaacaggaaccattaaattgataatatgaaagggattgttgtgaaatctaccggaagttggtattccgtgcgaatggaatcgggggaagtgctggactgtcggatcaaggggaagttccggatgaaagggattaagaccacgaatcctgttgcggtaggggatgttgtcgaggtggaggtcaatcccgatggcgcggtgatcaaccggattgaagatcggaagaattacattatccggaaatcaacgaacttgtcgaaagaggcgcatattatcgccgcgaatgttgatcaggcggtgttggtggtgacggtgaatcatcccgttacatcgaccgtttttatcgatcgtttcctagcatccgtggaggcttaccggattccggccatactcgtgtttaacaagatagatttgtacgacgaggaggatttattgctattgggagctttgacccagatttatatgcaggtggggtatgaatgttttcacgtgtcctcgttgaccggggaggggatggaggacgtggtggcggccttgaaggataaagtgaccgtgttctccggcttgtctggcgtggggaaatcctcgttgatcaatcgtgtcgagccgggcttaaaactgaaagtggcggagatttccgattctcatgacacgggaaaacacacgaccacgttcgctgaaatgttcccgttgagttttggcgggtacatcgtcgatactcccggtatccgggcgttcgggttgattcacatggaaaaaatagagatctcacattatttcccggaaatattcaagcgggcaagtgaatgccgattctataattgcacgcacattcacgaaccgggatgtgccgtgctggaggctgtggagaagggggaaatcagcgagagccgctattttagttacgtgagtatgttcgaggagggagatgaaaaatatcgaaaataaaggtttttgagggaacggaattttcgttatgtatatccaaaaaccgaagttttttgtataagtttgtaaatctaataatttatacgtggtagcgagcttttgaatttatgcaggttgatgataagttgatatgtaaacttttagttggacatgacgatccccgggggatggaggtcttgttcaatagttattatcgaccgttggttttatgggctgactcgtttttgggtgatattccggcggcggaagatctggtacaggatttcttcgtggcattctgggagcagcgagcttatgcgagaatcacttcgggtaatcttcggggatatctttttgcttcagtaagaaatcgagcgttgaagttattggaaaagagggatcccttacgcgaggcttgtggtgaattgaacgaaaatgcggaagttgaggacacggattggctgacagaggagattttgcaggcaatagaagctgagatcgagaaattgcccccgagaacacgtgaggttttgaagtcagtgtatcttgatgggttgagttaccgggagacggcagatcgtttttctatctcgatagcgacggtaaaaacgttgctcgtgaatgctttgaagtatttgaggaaggtcttttccgggttctggcacttcaggttcgaatgaacttgataccggtacgatcgatagaaaagttaaatcacatttttttctcctttaatctcgcaaaaaagcttacctttgaatagagaagtaaactatttccacatggacaagaataaatacattcgatttgattgggctgtgaaacggttattgcgggacaaggcgaattttgtcgtcttggaagggttattaaccgtgttactcgatcgtcaggttcacattatagatatactggaaagcgagggtaatcaacagatttacgaggataagtttaaccgggtagatgttaaggcccgggatagcgagggtgagattattatcgtggaggtacaggttactagggaattatattttcttgaacgaattctttatggtgcagccaaggcgattactgagcatatcaagctaggagaactttattcagaagtgaagaaagtgtattctattagtattctttattttgacattggaaaagggaatgattatctttaccatggtcaaaacacgtttacgggagtacacaccggcgatcatttgcacgtgaccgtgaaggagcgggatgctttggttcagcgcttgccatcggagatattcccggagtatttcttgatccgggtgaatgagtttgatcaagtggcaacaaccccgcttgaggagtggttggattacttgaaaaatgattacatccgtcccgatacaaagactccgggattgaaagaagcaagggaaaagctggtttactataatatggatgaagcagaacgagccgcatacgatcgtcacgtggatgctatcatgatccagaatgatgtgctgggtacagcaaaactagagggattagtcgagggtcgaatgaaaggcctagaagaaggtcgggtagaaggtcgggaagaaggccgggaggagggattggtcgaaggtgaagagaagggaattttgaaagtagctcggaatatgaaagaaaagaatatgccgatggatataatcattcaaatgaccgggctgactgccgaggatattgaaaggttgtagttatttttttgaaatagagatcacgatgatagtcctcaaattccatgaatttgaggactatcatttttttttgaaattttttctaatttcattcaaccgttttctaatctttccggtctttagaataacaaaggttattgtaaaaatgaaaaaagaatatcaagtcactgaatccgagttgtttgacttttttaatggcaaactttcagtcgaggaagaaaaagaaattctggaatggaaagaggcttgtgatgagaatcgtgagttgtttgatgtcatgcgaaaggaaaatctcattctgaaagaggttgtccgggttcaacttatcaagggtgattattcttccatacagggacggataattcctcggcgtcatcgggcatttaaattaaaatattggggtgttgctgccgctatcgtggtgggggttattttttcggtttcgttatgtataatccgcaaatccaaatttccgcagaatccgaaacgaagcgttcgattttcagggaaaaggacaaaacgaagcgttcaaaaaaggaaagcgcgcaacactcaaaaagccgaaacaaaagttttgtaatgacctctgtttcggctttataatttcataaaaaatggctttataacggcattaaaataaggctcaaaagtttggccttctacttgaaaaattgtatctttgttcagtgctaagcagctgttttatgaactaatttttcctgtttcttatacagcatcatgtctgtatattcggcagaataattcatgtgggcattgaattccttttttgtacaaccctcaaaaggattgccaatggttttgtttgctccaatccattcacacagttcaagtatggaggatttattggatgtgaaataaacgaaggaatgcttttcgagtatctttaaaacatccaaataatcagacaagcgccaatacatattgtacgtaccaacatcagtggaaagataaggcggatcaattaaaaagacgactccgggaacatccttatattggttgaatactgctttgtagtcgcatgatacaatttcaagcccttttaagtagtcagaagactccggataaccggtcttgcgaatgttgttataaaggacttccttgcgcatttcggctacagacaatttatacttcatggagaacataagtgaggatgataaggttataaaatccacgtacccaacatttagttcttcttcctcgatacgtttaaaaatgcgttctctaagttcccctttaattggtttatgtttgggtatcgaattacccaccagctccctaatatcggcaagcagtttatttgtctgtgggatatttttcagtctgaaccggtagttgtcgaagtcattgtagacaacagtagcatcgggcttgcttcttttggctatatgcgaaagaagtccggaaccgccaaacaagtccacaaacacggtatcttcagggaactgttccaaaactttaataaactctttagcaaacattcttttttggcctacaaatggcagtggtgcagataaattcatattcttcatacgttcaagtcaaatttaatgttttcaactccggataacagttccagagtccggtcaatgttattttcatatatatgcacatttccaaggtcaagggttatggacttcaggggaagctccacctgccttgccatcagataaagatgataaatatcagccggaagcccaaggttcgcatcagaactacgctgatatgcagatagcaccaattctccctcatcaatttggaactgcacaagactcaggcagggtgcctggttgctttccaccccggtttctccaagaaacaggacataattcttgctgttgcgcttttcccggttaatcctggttatgaggggtggaagcttttcaaagtaagttggatagctgtttacaagggtatggccgcaataatcccaccaggtaatccctgcctctttgtatttttccacatcccggactccttgcataaacagtttcaattcctctttcagctttttcctggctatcccgtggctttcaaatatgtcaagtaaatcagcgggggttagcatgagcctttcgtttaatagatacttgatacgccctttcctattggtctggattttgcccgtttggagtatcttgtctaatgtctggtaatacttattcatgagctttatttttggttgtacaaaggtagctctaccggacaacacaaggcatccccggcacatcaatcacactgcaccgagcgtgcagtgctttccaaaccgtttgataacatcatacaccttacgttcgcttaccgaatatttatttgccaaaaacgccactgcataagtggtcttttcaccttgttttttcatgacctcatactccgtatataagtctatgaatcgaaggtcatcctgcttgccgcccaaacttataagcatttcaagcggttctctgttaaatttaagtgcttcaaacaatgtcatatccaatcatttttgtacttttgcaatgccaatcatttatttaatgcgtaaaaacgccacgagagtgcggcagagggcattgcccccggtcgcgcactctcgtggcgttttgtgttaataaatgattggcgtctatattaacaggccgggggctttttttatccctcccccgaagggattgtcaatcactcaatccgatataattccaaattgaacttgtcctttttttcccagccttcagccagaactgtctgaatgaatcctactgcttttgtatagaaatctttcagttcttctaactgagtaaaagtatggtattccggttgttcatccgaaccaaacttaaacgtcactggcagggtttctccgcccgtctgaacggccaaatcgtatgctgccttatagttgtactggttctccacagaaagccatacatgggcaccattataggcgaatccggataggatagccgcatcagtctggctgttataccaggacataaccaatgtgtggatttcctcatcagtaggcttatgcccgaactcctcttccatgtaggaggcagagccgttctctttttcctgcacatcccatcggatgcgccatttgtctttaaccgggttcgtgcattccatcagcgaaaccccggaacttccttcaactcttctcatgtaaacacgtatttggttctacctttgccgaatgtctctgtcttgatggtcgtttcaaacgggaaaccatccggcatttcctttacttgtgcgagaatattcttcatttcctcgctgttggtgaagaacttctttgcctcgccgttcacttcgatggccacaatacagcggtcttctccctgctcggttttgataccggtctcaaagtccttcactacaatgggtaagtttaccagttcccggatgcttaccaccactccggggaatcgctttttaccgtcttccggcttgtaagcgacattcaagtctttaaaacttctcatttctttgcctgttaattttttaaacaacttattacagtcggcgtgcttcgtcatgccgtagaaactggcaatcagttcccgccgtctttttctcgattttacctcgtgcattttccgggcaaacttctgtttgatgcgtttccgcaatcttacatagtcgggacggataacatagccaaggaaatcaatgccttcttccacagggaacacccgttcattcggctttatttccaagtctatttttcccatttgcccgtgaacagcatcacgaatcttccacaattccgctttcgttttaccgagtaccagtccgtcatcgcaatagcgatagtaataacgaaccccgtacttatccttcagatagtggtctaaaaatacagacagaagcagatttcctgccccttgtgaactgcgcagtccgaaactgataccttctggcagcagcttaacaaaccgctccaacaagaccaacagccttttgtccttgaacaccctccggaagcaccacataacaaagtcctgccgcgcattgtcataaaacctccggatgtcaaatttgtatgcgtaaagcgtgccttccggatttttttgcaaatcggtacgtatgcagttcatcaggtcatgagtaccgcgccttttgatgcttgcaccggttgtccggatataacgtttttgcaggtggcggtccaccacattcatgatggcaaacacagcgatgcggtctttcatggacaggatctgcaaaatacgttttttaccgtattcttcaatttccctctcatggtagccgcccagccggaatgagccgtccgcaatggaagccgtcagttcggtgataatcttctccctatgggcaagcaggaatcgtccctgccttgacctcttacgatcggttccgcgaagtaccgaatcgaatgcctccgacatattggagtattcgatgatttcctcgataatatatccttccctgcgcataagctattggttaataaacatggaagatgagggccttcctttccccgggtctgacttcttcgaactgataacagcctaccaaactccacccgacgcgtgatttttcagctttccaccttttctggtgctgttgctgtggcttgctcccctcggcaccgcttcggggacacgtccccgctgctgtacgccgatttgttagatttccagacgcgagccgacattcgcattcgtattcgaagcatcgttattcgcattcgcattcgacacaccgccattcgcattcgcattgttgtacccgcgatagaccacacggactattggggaactctaccgcttgcaaagttactgatttaacaggcaaaacagataaacgaattacactatcatccaaaataaaacggatatactgccacccgcgacggtgagcccccaatcaatccagtcccaaggacttccccgaagagtatctttcagttccagacaggaagctgcaatggccgcagcataaaaggccgtccaaggagtaaatcccaatagacctaccatcaaaccaccgataagatgcttgtaacggttactcattttaaaaaatgcgataatctttttcatatacctcaaaattctattttttcgaccggcttcgccggtatttgaataccttttaaatggaattcggaaaccatccgaatcccgttctttcgttttagtcgcttcgctccacgctttggcgctttgcgcttacgccacctcgcgtatcgccttgtacgctgccacgctttgcgcccggacgattttgccgcggaaggccagacgcgagccgacactcgcactcgtacccgaagcatcgttatacgcactcgcatccgacacaccgccattcgcatacgcatagtagtacccgcgatagaccacacggactgtagcggtgcttatccagtacatgtcggtatagtaggtggaagatgatccgttcaaattacctaccggaaccatgtccatatacttgccgtgcgccacgcctgtaatccactgaccgctgtccttcttgccctgtaccatacggatactgccgtcaggcatccagatgcgccatttgccctggttgccgctgtcattcggcagatccacgccgtccatcatgtcatacttgttgccgtagatgtcctcgtagcccaggcagcagatattgttcacctgcaccacggtcgcctgtccgtattcgtcccggctcttataccaggcatactggtgcaccaggccgtcaatcagcgaattcgtgattttgttgttaatgacatacgcttcatcgtagccgatggtgtctgtcatcccgtgttcggccgttccgcctgttgtgcggttattgttatgctgaccggcaccgcattgttcctgcatatccctgcgcccgtactttgcatagctcaggttcgcgatgcggctgtgcatcagcgcatctatctgctgcataccccgctgctggctgtagtagtggaagtccgtccaggtcatacttgccgtggtcgaagctccggtgatgcaggcacgcagtttactgcccaccaccgaactgcccacaacggcacacagatgctcctcattggccacccaatccggttccatgtcctctatcttgtcgctgtggctcagtaccacgcagtcaaactctgccgtgttcagaatggagaaatgcagggctgtagcacgttccggaacgtctgctatcagatacatgccggcttcaaatttcaagccgatggtcggcaccacaatactcttcaggatgtttccctccgcatcagcaaacacactgccgataagccctgttcctggaacgctcgggaagcggacacgtctgtaacccgacacgtccactttgcacacggaataagccttgtccgtcgtataggattccatcagcgtgggcttgccgctcatgatcttgcgttcacccagccagccgccctgtgtctccttgatggcatccagtgtcagtaccgtcgcctcaggcaccgggggcatttcgtcctccggataactgctgtagcaggcgtacttcttgttgttcaaataatcgttgatgcctttgctccagtaaaacggctcatacatcatccagtctccctcgctgccgtccagcttcgccaccgtacagtcgttcatatcctccgcatcggcatagaagttcgagctttcgtcatgcagggggaaataggtcatctccccgtccgggttgttcacttccacctgctgcccggctatctccaccttccggctcgtgggcatcttcgtcaccttggccaatacgcggtggcgcttggacaggatggcattcacatgcccgctcattttgtacgtattgccgaatttgtaccccgtcttgttgtccaggttcgaaacattggcatcgtcggccacgctgtcgtcaaactcgatcatcgtatagggcggctgcttgatggtcagttccggataacgggcggcatacttctccagttcctcatcggccagatacttcgtcagggtcagcttgcccctcagtcccgaatgccggtcatccacggcacccgtctgtgtatacgttccgtagtcgtaatacttcttcagcagggttccgtcgtcttcccggtctatctccagcacgaagcgctccagcttgccgctgccgttcagtctggcctggtgcaggcgttccagcatagcgaacccgtcgatgccggggcagttggtgtagcggtagccccgcacattattgatcccttccagtatcaggccactatcggacagcttggtcagatattccaggaacagttcctcaatcgtgtccggcaggcataactgcacaacgggcgcaccggtggccagtttcacacgggtcagccccgtacccctcacgtccagtttcttcaggcggccctgccagctcaagtccaaagtggccacattcccgttgtccccgttccgggccagccggttgttccgcatgttcacttcttccagaagcagcataccattggtcgaagccatgaacgagccgttccggtaaccgctggctttctccacgctcatgtcgagttttaccagtgaggtcagcagaccgaagttgaagccgattgcgaacgcatcctcgtgccataccagctccttgattttggctgcaccgataatcttcagcgggtcgttctcaccgaaggcacgggtcagctgcagggaatggagcacgtccgcatccaccacgccgctgtcggcctgcacgccgttgctggtggagagctgcacacggtacgggatggtcagccggtactgcatcggtttcagtttataagccttgtccagcgatgccgtactctggtagaactgggcacccagcgtggatacatagccgtactccacctgcttcaggtcataccggcgttggatgaagtagttccggtgtgctttcaacgaacccttcagaccgtagatttgcggataggtctgtttggcaccgtcagcacccaccggcatttcgttcaggaacgggtagatgtatttgaagatgccggacttgttatagaggcgtgagcaccacttcttcatctgttcggtatcgaaatggtcaatggctttctggatactgaaggcactcatgaagcttgcgcccccgttccatccgctcaccataatctccacaatcatgtcccagcaattggccacgatgaggttccacagccacgagttatgaccctgcatcacataagccccgtcgcgcttcgtctggcggttgtcgtcatacttcccggtcaggaacgacttgttgtcagaaccgagctggcagtcgccgtcataatagtcaatcgaccatttcacaccgtcccatgtgcggataagcatgttcttcgcaagctggtccacgccgaggttgaactgcacgtacagatagtaggcaatcaggtggggaaggtcgaaatacttcccggcctctttcctgaacgtatcgctctgccacttggcggtagggaacttgtcgccgtcgtcctcatagtccaccccctcgaacgaatgggattccgtgctgtaaaccatgttcctgcccgcaggcgtttcctttacgcaccggtagacgaaactcatcatgcggtcggtggccttgtacatcttgtcgtacttgtcaccggtaccgaggtggtctttcaggttcggttcttcctccgcgtcaccgcctccgtccgaccagaaggtatctttcggatgattaaattccagtcctccgtcaaagttgtagtccatgaaatccttatgctccggttcggtactcggcaaccagtggaacaggcacagcggattggagttgttcagcgtctcgaagcagacgggcaggtactgcttgtgtccttcctcgtcggcttccaggtagttcagcgtgtcgccctcgccccatttctcgccgccgatggtctcatcctgcccgaagatggggtagctgtcgctcttctcgttgttcatgttgtactggccgtaataggtcaggtcttcgtcggcactcttcgctacgaacaggtcgcacggcaggccgtcgatggccgaacggtaatcatcctccagcccatggtctttggcgtaacgctgggcaggcgtaagcagccccatctctttcagtccgtcattgataagcttcgcacctccggtattggtggtcatggacgagtccgagaagtcgcatttggaacatgccagcttcgcgcctaccgagttcctgcgtaacttgaagagattttttttgccggtagttaccaccggattcttctgcctgccgtttccgtcaatctccccgtagctcaatgtaaccgtccagccgcttgccgtcttctggaagtagaaacggaagttctttctggcatagttcacggaagaagtaccctgaatacggacatatacgttggtaaggataaagtcaagcgtcctgtcctctccgttatagaaacggacctcccttaccagtttattggccttcttgtcgttcagctgggccagtgcatccaccacgttcagcgtgtcgctctcgctcggaacctcactgcccacgctgcccgtgcctatcagtaccaggatcgagttccggcgcttcttcatcagccccatcagcttctccatgctcaccgtatctccttcattcagcacgcggttgtcctcatccagtgagcgcacgcccggttccccgtcggcatcctccaggtggttgcggtccacgatgtagttgttcagcacctcgtccgaggtcagcgccttgttatagatacgcacgctcttcacgttcaagtcggcacctgccgacttaaattccaactggctctgaatgtcaaaattcaccttgtcgagccacttggaagcagccgactcttcaccgttcacatagaaaccgatcagcgtgcgctgttcgttggtctgcacgttcggatagaacacgtaggtaatgcggatattcgtacccggctggaacttggtacccaccgagtcttcatagcgcagcacctgtccggcatccatcgcctcggtcaccacaccggtcaggaacttggcctcttccggagtcacaatcagcccgtaccggttgccgttgtccagctgccccaggcaggtgatcagctcggcatccgtatccgtcacgttggccgtgctgtattctatctccagcgtcatgcccacgtcacggatggcaaatccctcgggcttgtccgcctcgttgaaggggcggtaaccgccgtcagcggtcagggtcatacctgcaccaccggccagcagcaggcggtccttgtgccagccgctaccggcaccatattcgttcacgctccacagcacgtcccggaactccatacgcttgtcaccgctcacccagcttgccgggttgttttccgtgttgcttcgcccgaaggcgtcaaacgtacacacggcatccggtgccagcgtggcttcaatgtccgggtgcgatgtggtgttcacctgcacctcaagcacggcatcgccgcatgacacacggtagtccaacggttccacgttcacgttcgtccgtccgtagctgccggtctcaccgcgttgcagcaggtcttccttcaccacgctgccccggtcggtcactttcacacgggccgtatacgcatcgcggtcatagccggcatacgtgaagttccatgccgtgaactgctctgcctccagcaccgggtgtttccagtcacgctggaaccccgctgcccggtggctgaacatcaggccggcatacgctgtcacacctccgcctgccttcagcagcgtaatgtaatgcacccggctcaccacaccggagttctcatgctgcgcgtaggcttccaccacgttcgtaccctcctgcatctgtgtcagggggatggtcacgttcttctgctgcacaccgctgccggccgaaagaccgagggtaaaggcctgtccgccgttcacgcggtagtagatgttcttctcaccgctcgtgcccttggcagtaaaggggatgttcacgtcatttttatatcccccgtcggccagcccgttgcccgccgagtaggtggtctccagctccatggccaccatggtcaccttggccgtggccgtcttcatcagcgtgccgtcctggtaagttgcctgcgcttccacctgtacggtataggcagtggcatccttcaggtagggcgaagcgtcaaaggtatagctctgtccggctgtaacgcccacaaactccgcatcccggaactcactgatgacggtcgaaccgcgtttcacgatcacgcgggctttcaggtcgctgtagccgtccaccgtaccgccaccggcagtgcccacacctacggagtatttcaccacaaagccgctgcccagtgccagatactgcgaggcgggaagtcccgcaccgccgctgtccgtcaggtcgatgttcaccaccaccttgtcatcgtccgtgtacttggaaaagcgcacttccttcgagctctcgccgccctggttgtccttctgcttgacggtcatcacgtactgggtgccgtcctcgctgtcctgcacatccacgtccgtcaccgtacccaccatcgcatcgaacaccgttccggatgtaggaggtttcgtctcgccgctcaccagttcctcggtaggggtacggtttgacagttccttcttcaggaacgcttcgatgtcatcgcctgcataggcatgataggtgccgtccggctgtttctgattccatggtgtttcaagattcatcggatgttcagtcgcgttgatgattccgcttattttcctttttgccataatactgtccttttataataatcattcatttatcagttttactgctaccgttccatgcgtccgatccgttccacggctcgtcgcctttccagtatccaagtccgaaacagctgcttatcgcagaccacaccagtcttgccccggcatagactgccgacagggcacgtttccccacatacgcagccgttatttccttaccgcctatggttatcatcgtcaatcctcctcataaatcagatacagcgtattcgcatccttgtcctgcagcgcctcgtaagcttccccgctcatcacctcatgccggtaggccagcagtctcaggctgccgcctgttccggtatatacggcatcacccagcaggtagagcttgtccggcaggatggctgtccggtccgcattcatgaatatgccggcaggaggcacacccgccacatcccagtccccgtacagggtggagtccatgtggtaggcgaacttcccggcatccgctacatacactacgctgccgcccggtttggtactcttgtcaggtaaaacgttgcctgtttccatccatgaggaaaagcgtgcggtagccccgccgatggctgctgccgtagtctgttccaccttggcagcggcgttttctgccttggctgccgcttcgttggccttggtggccgcttccgtggcggcctgggtcttttcctccagtccggctacggctccttccgctttcttggcggcagcctcggcacgggcggcggcatcgctcgcaggcttccctatcagttccagggggacgttcaccatcttgccgtccttctccccgggcagtgatttcacaccgctcagcgaggtgacggtctccaagtcctccacgccggtagaactctggagtacacggtccagcacttcctgaaccagttcttcttgtgtcatttctgccatactcattcgtttttatcggtttctgacccgcccaggatttcgttcagggcatctatcacattgggaagacaatagcgttccaccgccatgtgtatcatcccggtttcctcatcgctgaactcggtctcgccggtactctcgaaaatcttgaacgcaagccgatgggccttgatgccactgacacgcgtatacagcaaatcggctatctgctcacgtgcatcgaaaacctccctcgtctgacgggttattccggtgggaacgctgaaattcctgaaatctaactttttcatatatatctgttttttaggatgaatgattcaatatctggtaacggaatccgtccgcttttgtaataagtaccgttacggagtccccggatgccatctcgtagttttgcaaatcttcattgtggttatagataccttttagtatgatattctttgaaccgggtctgaccctgaacgtgacaatggctgcaaaatcggtaggcaagtaactcatgccgaacttgtatgccacagaactttccgacggcagcgtaacctctaccttactgtagttgggttcattgtaatacatcaaaatgatattgtgttgtgagaaatccaccgtgtagtttccacttccgaaggtaagcagcttggctttcgtattgataaacgccggggcaagtaatgccgcattgctgctgataccgtagttcttcgtaccgccggtaacatctataaacaatccatagttcgcttggtcgaagccgtaattcccgtatatattgggggctgagttcacgatacgaccgacagcggtaaaagctcctcctgcagaagacggtatcacatcatcaccgaacatcacatatcctttgctgccgccgacacggaaaaaatcatcataaatggcaagaccgccaccgctcccgtgagagtcggccacagaaccgatacggccgttccctatctcaaagccgccgattttccctttgctgctgtctatctctccggtaaacttaccgttggtcgtttcaatgctgccgtcttccagtatcttgaagttgccgttggccgttaccagtccctccagctgtatatggtcggctgtcagcttgattttgctcacggtatttccgtactcgtcctcttcctccacgctcaccccgataagggcaatctttcctgtattgtcctgcgcatacagaccggaaccttcaggctttatgacaagcccggtctctttcagcgcattaccgtccttgtcgaagaccgccgctgaaatctttaccagccggtcgctctgttcgaacagtgtacggtacttataggccagtgcgtccgccttgttggtgctgaacaccagcagcgaaatgtaaatcacgcccgtaaacgacagcttgaagtcgccagtgccgttccaaagtccgtccaacgtgaacatcttctcaccgccaacgggcaggtcctcttcatggccgaacatgttgaagttctcaaacccggtcttatcagcgttcacaaattctattttcaaccttccggccttgataacccggtagctgaacgacagatacaccacgccgggcacccgttcgccctggctgttcgtctgccggtactccggtaccagccggaagtcctccagtttctgcatgatatagctgttccggatataggcataaggcaccttgccgtcggtccgtatctcggcatggccgtccggcttcgtaccgtaaggaccgccgttcgcccagatccagcgtccgcccagggtgaacagcgtagccttgctgcccgtcttccatttgtccatgccgtcggcaaaactgctgttgtccagataactctgttcttcgcgtatttccttgcgcaagctttccacggctgaatggattttcccctcggttatctcaaaccgcgtcaggatgtcctcgcccgtcatcaacacgaacgtacccttcagccacacgttgtcggcatacaggccgtttcctttcggctgtttgtctgccgggaaagcgctgctcctgatgccgtccagcttacccagccggcaacgaaggcagccgttgaagttcttggccttcacaccgtccagaatgtcgatacggggctgtccgtcctccgtggccgcaatggatataaggttctgccggagcggggtttcggtgttgcccatcagcacgcactcatcgcctgcctccggcttcaccccgccaaactcgcttaccgggaccagtacaccgccggctatcaccgaagccacctccacccagtatgcttttagtttcttaccacccgtaaccgcacagcgcatcaggtcatgggccacaaagcccgattcctgctcaaacacgatgcggtagttgtcgccctgcttcaccacgtccttgatcttgccgttggcagcggacaccaccagctggccgcacacgctgcgcaccttctcgatcagcagttccagcgccaccaggctttgccgggcagtcactttgtccaccgtcaggtttgtcagtccggtcagctggtcaatccacagctgccagccctcaccggtcagcccgtccacaaactccgtgctgcgcagcagttcgcggatcacggcagtcaagtattcggcattgccctcaccatccacgatgccgcagggcttgccgccagcagcctcgccaaagctcacacccttcaggaagcggatggactctttggctgtgtccggctggttcttgctcaggaactctttctggctgcgccgggcggaaaacaggttgttgtccgtgggcagcgtcttgtcccagcttcgtatgatgtccggaagggcagcgccttccgtctttgatttcgtatagcttttcagcgcaccgatgctgtccgtcaccttgtcgaacttgcccacctgcagcgcatcgcttatctcgatgtccatctgcccgggttcgttcaccttgcggctgatcttggtgatacggctctgacggtagcctttttccgggaaatacttccggctctccagcttcacccgtctgcccacaaacaggtctatgccgtgctcctcgatgtataccgggtctgtcggggctttgtaggcggcaatgtccagccagtggtcccggttgtactcgtccaccgcaaccgcaaactcctcttcggccagccggtaatactcatccggcatccggatattccacaggatataggtgtcgcctgctcggggcaccagcttgccgcccggcagctgggtgtcgtcatcgtagggccagatggtgatcagttcgaattcacgtgccgcgctgtcgtagttcacctcaaagtagtggtcatcgctttctcccagtccggcaaggtcgcccgtctggaacgacacacgtttggtttctccggccagctcgtacaggttagggtcaaagtccagttccccgtcccggaaataatagacggtgaatttgtttccttcatcgtctgccacctcctcgctgcgaaccgagctcaccgtaccgacccgacgggggaagatgccgctgaaagcatcctgctcgtaatggtcatagatgccatattcctccacgccctgctcgatgtacttcctgccgccgggaagcatcagacgcgggctgccgtatttctccgcatcgatgttgcgggtcgagcctaccgggaacaggcgcgtatagaatttggccgtgttgctcgtatctctttccagggaggtcagccccttgccatagccaagggtgatttcttccccgtgttcgcagcggcacacgttcacagtctgcccctcaacccaccattccaccttgccgcctgccttttccgcgatggctttcagcgcttcgtcgcagtacatcccctcgtagtctatcgtgatcagctccgtaccttccaccgtacccgtcttccagtcagtaatgtggcccatgccgttattgatagccttcaccaccatcgccacatgctcgcggggcgtggccgtcagggtaaacagggggttggtgtccccgtccgtcgtctccagcaccaggaaccgcttgattaggctctcgataccgtacagcttcaggttatactcccattcaccatcgctcacctgcttcggcgtgtagcgttctgtcagccagtaccgttcgcccagatagtccgtgtagtcgttcacgtccaggggcaggaaggcataatagctgaacgacagggaaagcacattgtctccctgcacttccttgctttgcgtcgagctgtcgttcacggccacatccgcacgcttggttccggctttatcatatatcgttagaagcatattctaatagcgtttgaatggttatataatcggtttcggttcccggaactttacccggaactttccggcatgcacaccttccgtccacagataggtcagcggggtgaacttcgtacagtcggcatacttcacccgcagctgcagatccagctgggggaaacggatctccagccagccgtccttcccttgcttcaggaaattcacaaaggcaaagtactgcttcatccagcctgcctgggtcttgttgtaaagcgcaaaatgcagcgtcacgtcacgcgcttcattccgtggggtcagcacggggctgtatttttccccgtgctcttcccgtatgtccacagccgtatccttcttggccttgctcggggtcaggatggccgtcaggttctccatgcccccgcgccggtcttccaccaggaacacgccgtattccgtccagatgtccgtgccgttcaccagcaccagtccgctcagtatattgcccatatcacttcacttttagtccgtcacgtatcattttctttatcacttccttcagttcgcccaggtgtccggcgctcacaccggtgttctcggctatccgggccagatgcccttcagccgtgtccatcttctccaccacgctttccagccggtcgtccatgctgctccagtgctgcagcccgccggtgaacatgccctccagtttcgtgccctggtcctgcgtcatggccgtaaagccgcccgctttcgcactttggctcgtaccgccctgctgcgtcttgtcataaccggtggctgccgccaggttgtcacgcagggcaagggcttcatccatatactgcatgtactcttccatcagcgcgttccgttccgcctcggtcagttcgttgtcctccatggccttgccaaacttctcccaccagcctttcagtttgtcgctgtacatctcaccgatcttgttgctcagcatcgcccgcatgaagtactcggatatatcctccgccgcatccttggcaccgtacttcatgttcatcaggttgtcgatgaagctgctgtacataccgtcgaacgaaatgcccgtcagcccttcatacagctggtcggtcagttcctccagcttgccggcctggtctatgtagtcatccagtttctcggtcagtcgcccgccatagcctcccttaccggtattctggatttgcgtccacatatccacgttgctgcgcagtgccttcatttcctccgggctcaggctccacaggttcccgtcccactggcggccgatctgtccgctcagtttgtctatctgtgcctggttgaaaccgccccagtagtagttccagctgtggtgacttccgtggtagccggcttgcgccatagccatctgcaggtagttcgaattcgtttcctgctgcatcttgtacgcgtcgcggtaagccgccacactcttcgtcccctggctctgcttgatggtgtcggtcagatcctctatcgaggtctgcagcagctcgttccggtctgtaagacggtctatagccgcctgcacttccttggcgttcccgccgatgccgaacagtttgttgaaacctccgaaagacaccgtgttcagcaatcccccgatacctttcacaagggaaccgcctatctgtttgaacaggtctccgctgaggatattgtcgagtattccggttatcgcattgaaaatggtgtctatcaatgatgagataatcgggccaataccgtctttcagcaaatccagtatggagagaatggccgatatgatctgcccgatgactccggcacttgacagggtttcggacatccggctgatggcatcgccgaccttgcctccgatattcagttttgaaagaccggtaagcatgttctggattccttcaaatgatccctgcaaggttccgctcgcaaagccgtgcaacccgttggataccatgttcaatccgtcaaccgtgtcccgggaggcacttttcacctccccggcaagcgccttcatttcagaggtggcgttcaggtattcttcgtcagctgaaacgctggacgattgagccgtttgaagagcaatttgggtacgttctatttctgcctggttaccgctttcaagagccttgttgtaatcggcctgcgccgctttcaaccggatgaatgccgcttcctgctgcagttctgcattttgcacacgtgttacggcatcccccaaagcgtgcatctgcgtttgcagccgggcaaaatccaatgtgccgttgccaccggggagcatgctttgaatacgttcaatggcatcgtaaacgacctgctgatccgctgctcctgattttttgaactcatccgtcttgacatactgcttaagttcgccaagcagattcttcatctggtctgcaagcaagccggttaaatccccgaacgctgctccccagtctatcttctgggtaagggattccatgtccactttgtgcacagccgcatcacgctgcttttccaaagtcagtctttcgccctgggactgtgccttgcggattttctcggcatattcttcagcgatggccagtttctgctgctggaaggtcccgtattccttcagatagtcacgcatggcttccgcctcttccctgtacacgtccgcctccgcttttttccttgactcggtgtttgaggcacgggctttttcaagttcatcctgttgctcccgggtaagtccgttatctccggtagaaagaccggcttccttgttctcacgcttccagtcggcttcctgccggtttatctcttctttccgggcgttatagtcatattcgatttgtgccagtttcttctcggtaccggcttgcatgcggtctatctcttccttccggttttcagcctgcagggcggcaagatcctgcgccagcctacgctctgtggcaagccgttgcttggcttccgcttccggattcttcccggactgcttggggtcgatatgcccaccgatatttccttttttggctgcttctgcggctttctttacctcttcctccgcttttttcagataaccgtcacgtttgttttcggcatttttcaacagtacgtcataagcttcctgatcatgtttcttgatggcagcctgtgcgtcatagaactgcccggattctgccatgcttgactgcatgatatattgtccccatttcccgaaaaaacccatggcgctttccgcctcttccggtttctgcgccttgattttattcacctcttcatcggcttctgcagctttttttacaaggttctggacattggtctggtgcagcagaacctgtacatagtcctcgctcttttggataagggtatcataccattcggaaagtgttttataatacccgaaagattccccgtacttgcggttcagttcctccaccttcgccttttcctgttccttgctgccggtgaagttctttatttcatcgatgaccgatttcagttcgaagcgggtacgcaccatctgggcacggccgtccttctctatctcggtcatttccttgagtgatatgttgaattcatccacgccttttttggcactgaacaggtttttcgtccaatcccagatttcatcaccgtacattgccagcagcatgatgccggtggtcatggccgtctgccaggaaaaaagtgaggacaggacctgcttccataccggtgtgcccttcttgccggacttctgcagctcatcgtattccttgcgggcacgggccagttcgtccgtaaaaatcggcaggttgttgctgattgccaggaagaacatctgcggtcccatggccaaagaaggcatttcacgggccatctgctggatgctgttgtgaagcccgcccaactggcgctgtgcattgggcatgtctgcaggggtgacctgcacggattccgattcctcctgcagcagtttcagtttgccgcgcaattcctcaagctgcttctccagtgcatggatctgcgcgatattggcactctggtccagattgggggcagccgtctccccggcaaggcgcagcctttccagttcagcctccagcagcctgacggtattacgcagttccagcgcctcacgttcggccttgttcatgccgggcgtgagtttgtccttcatcaaaaattcaacttctacaggtttgctcattccagtttgctttgaaaaaatcctactatatcgttcgcttcatcctcggcgctgtgttccggtctgggagcaccgtttccgccgccttgctttttccgcacataccgcggcgcgtcgctcagcatcatgatcagcgtctggtaattcaccccatcaaggatgtaatccacgctccagccggtcgccgatgcaatctgccacacgaagccgaaagggctatgggaaccttcataccgggttcttaactccccttccttgcctggctcagtctcggagtcatcgggttcgcccgcgctgtcgagctgataatacgcataaaatccttcgtgcccatcagacgctcgaatgttcggaacatggccgtcagataacgccactccacaaagttccgcagtacccacgctgtcaccccgatgcccacgtgccgcgacacgtatccccggcataccgtataggccagcaggcggctcacagccttaccatgctccgccacaaaggccagttcctcggtcttgtccttcggttgccaatcgggtttgacacccgtcttcaggtattcccgcgccagcagaatctgaccccgcagcctcggacgcttcatcgtcacacgcacctccaccgggcgtttcagccacggaagcttccaccttttaagaggtacggacacgccgctgtcaagcagcgcgtccgcacactccatctctatcagttgttccaaacggtcagccatacgttagccctcctcactttggagcgatgctgcagccgcggcttccgccggcggcagcttgtactgcccccactcgtccggtattgcttccgtatcgaacacgccgtaaggctgcgaaccgtcctccggcatcgccacttcgagcgtaacctctatcttggaggtttctgtaagggtcagcttgcctgcaggattggaaagcagcgtggcgttgggaatcagtacgctctgtccggacacgagggagagttcccatggtccctgcatgacaagcacctccgacggggctgtccagccgatcggagttttcttttccgagtcttctttcttataatgcaggctgccgccaagcagtttgtgcaggttcgaatagttcatctggatcacattgaacgtcggggcgatgccgccgttaccctgtgggatgaccagcaccggggcaccctgcacctgttcggcctcgatcttcgcggcctcgggtttcttgccgcccaggtcaaacgagttcttttcaatatacccgattgtgaaatccttatactttacggctcctatgccgtacatgaaattcttgttcatcgtttataaagtttgatggttaataacacaccggccaataagccggccaatacacctgtgataaacgtccgcatccggttcggagggcgtttttctaccgtttgaacgtcatttgaaatttcgctcttggtttcgctacggatgcgcgccagctcttcttcataccatagcaccagctgctgcagactgtcacacgaggcttcggccacgatgttcccgctgtcgtcgctgcctacggtcagattcgcctgtccgctcttgccacggtacacggcaccttcaggaagtttacggaggctgtccgcaggtatagacagcttcaccgaactcgccggtatacccgccatcaccagtcccgcccgtcggcttccgctcgcgctgtcggtgcttgccgattccgtctgtatcttctccaccgtcgtgctcttcctgctgcttgcgcagcccgccaagcacaggacagtcatcatgatggcggcaactgttggcagtgtcaatggccttgcgcagtcgcgccatttcgcgcttgttggcctgcaggtcttttcttgttgcattcagttcttcttttaagggtaccacaatattgctcaccaaaacgcgggtggcatgttctgcgttatccacacgcacaccctctgcgtcggcttcggctttcatcgcttccgctttcgctttcctcaccgtagcacgcagggaaccgatggctgctgcagtgcccacaaggccgccgctaagaataatgttcatgatctcgctaaagtccataccacccgttttttagtcagtcaaccttttattctgcttcctcgcgtttctttcggaatagtccgataacccattgcaccagtcccgtgtcggctaccccattggctacaagtgaggcaccaaaaccatagagcaaggcaatgtcccagctcacatcactcacaaatccggcatcaagccaccacagtagcatcgcgcacaccaagcccacacaccagctcaccagctgcgtcacccagcctttcatgttggggaacaaacctttcaacccttcagtaagcaccaccacaccgccgacgaaaccggcaaaggtgccaatcattgcgtcatagtccgttgccggaacatcggccccttgggccatcacagccgatactgttcccagcatcagcatcataaacagcataattcgtttcattgattgcttcttttattattggttaatacctatttctttcagccatttctgtacatcgaaactggggcaggctttggccgccagctcgttgtgtcccacaatgcgcacatccgggaatctgcgatggaagtccttcacatacttctccagtgcctttttctggcagccggtgcgggtgtccttcggggtcttgccgtccttggccacaccgccggcatacacaatgtggcggctcacgctgttgtaccccttggctccgttggtcacttcccagggatccacctgcgcatcctcgttgttgttcaccaagcgttccacaccgccctgcaggtggaacaggtcggtgtagcccacctgtttccaacctctgccaccctggcttacgggcgaagtgtgccacttccggatgtccgccgatgatacctcacgcccctccggggttgccgtacagtgaattaccagatacttcaattttgccataccatcttatcctttctggttttgggtaatggtaatcttggccgtcttgctgcggtcggcattgagcgtaagggtcagtgtaccggttttctgactgccactgtttgcaccggccgaaatcttcacgcctttatccgtcgcttccaccttgaagccggcaggggcactgcctatctcatattctccgctggcggtcacggtcacttcttcactgccaccggttgcctcaagggtcacactggcagggtcaactgaaatcttcttctcgctcgccttgaacacggggttgcttcgcttgtccagcaccaccacttcttcaccgaaggcaatgttcgtgtcagccttcatcagcatcttgaagaagtacagttcgctcgcgttcgagatcttgtcaatctgaatcacgtcttcatcgtcctgcaggttcacagccgcaaacaggttgccgccggcatcgggcgaacagagggtgcacacaatcagatcatcgggccaggccgcaagcgtctcaatggtaatgcccttgtagcgacgggcattcacatcggtttcgctcgtgttcttggactcgcgctgggtcagctcgtcatcatacttgtcaaagtcgttcacgctcatcagaatgcggaggtccgggttgttgcggatggccacgggaatcttcgcacgcatggctttcagtctgcccagcatggtcgattctgcgctgtccaccacaatcacctcagtatccttggccatctgggtcaggatgccgttaaacaagtggtcgtcatcatccccatattcaccgttcacatagtggtcacccagttcaaactgtacccgcttggccaactcggcaagcagggcgttctgcgcttcgggcggaagttccgagaataccaggttgcccttcggctgccatttgcgccagatgttctcgaacgtgcgggggttaaacaccgtaaaggccatgaagtccaccgggtcaagactcttttcgtcgtagttgaagttgcccttcgaatcctccacgccggggttctccttgcgcttctggagcatcttgccggtcttcaggcgcggcaggctgattttcttctccacaccgggaatcaccatgatcagccccttttccacaatctcattgctcgtagcggcaagcgtcagcaactgttccagtacctcgccgctgtaattcgtgtttcttacaattattgccatagttcaatcactttttacgtttgtccttaatttctcgcatacgcctgttccaggggctttcttcaccattcggttccagatgcaggtcttccatcacacggcgctttaccggcagttgggccagggccttttcgccgttctcgcggtcattggccaaaaggttttcgtagatggggcgggtagtcgcatcaatgcgaccgtcctgctcggctgcgtcaagcagctgcttgcgggcggcaaggtcttcggcttcagccttgtcttcgtaggtcttcaccttggccttcaggtcggtgttctctttcgtaaggataggtaccttgcctgcctcttcctccagttggtccatcaggcggaacacatccgcatcactcgcgcagtccttgaagcgcgggcgtttctttacgtcttccagattcatgtcttctctgtttttttgtggctcaacgagccggttattgaataaagtatatatctgcgccggtgtactgtctgccggcacggggtctgcatcatagatgtcgtctatgaaaccaaggtccagggcttccttggcggtcagccaatggtcctcgccgtcaaaataggtctgtttcacttcttccttgctcatgcccagccgctcggcatagatttcactcaagctgccttccaggctttctatctcttccatgcaacgctgcaggtcctgcttgttgccgtaacacccgccgctcacactgtgcagcatcagacgggcatatttgctcatttctacgggcttgccgcaaagggctatcacactggccatgctggcggctatgccatccacataaatgcggatgtcggcctggctatggcgcagggcgttgaatatcgcaatgccgctgtacacttccccgccgttgctgttgatacgcacatggatgcgtcggctcacgcgttcggcttccatcagttcctgggctatgcgcccgctttgcacctccgtatagtctccgatgtccccgtacaggaatatcgtactggtgccgtcgtcactcgttgtaatattgaaaaatctgctcatcgtcatgtctttaccagcggtttccccgcctttcgatggtgcgaaaatagaacattcccatggcaccaagaaaccgcgtccgcatcataacgttttctggcgttatcataacgctgtaacccgtcatcatgcgtacgcgcttttacaaaccccgctttttcatgcaattttgtaacgtgatttacaactaaaaaggacgatttatggcagatttgacgaatgcccagaaaaaggaatgggcaaaaactttgtacctcaaggaaaacctcacacagcaggaaatcgccgaccgggtgggcgtgtcacgggtgtccgtgtccaactgggtacgggccgggaagtgggaggaacagaaggtggggcttacgctcacaaggcaggaacaggtggctaacctctaccggcaggtggccgaaataaacaaggccatcgccgaacggcccgaaggggaacggttcccctcatccaaggaggctgacatcctcgggaaactgtcggcggccatacgcaacatggagcaggaagtgggcattgccgacatcatcagtgtcctcaccgggctcatcgactgggtacgggcggccgacctcgaaaaggcaaaggaaattacacgcctggccgatgcgtacattaaagacaaattataaagggatagacaatgaaacagactgacagactcgctctcctcgattgggagaagtacaaagaagacatcgcaagggctacaccggtcgataggaacatgacggcagccgaacgggaaaaacaccgggaatatcttgagaaacatcccatagaatggatcaagttcttttttccgaattatgtcaaatatgaatttgccgacttccagaaaaaggctatccggcggatcattgcacacgatgaatggtttgaggtgctttcttggagccgtgagctggccaaatccaccgtcaccatgttcatcgtcatgaatctcacgcttaccggacgcaaaaagaatgtgattctgacctccaacagcaaggacaatgcggtgcgcctgctcgatccctaccgggccaatctcgaagccaacggacgcatcatggcatactacggcaaacaggaactgccgggctcatggaccgaggatgaattcaccaccaaagggaaggtctctttccgcgcactgggtgccggacaatctccgcgtggttcgcgaaacgaggccatacgtcccgacgtactgctggtcgatgactttgatacggacgaggataccaagaacccggacatcatccagaagcgctgggactggtgggaaaatgcgctgtatcccacaaggtccatttccgaacctacactggtcatcttctgcggaaacatcatcgccaaggactgctgcgtggtgagggcgggcgaaatggccgactcctgggacatcgtgaacatccgcgacaaaaacggtttttccacatggccggaaaagaactcggaagaggacatcgaccgcacactgtccaaaatatccaaaaaggcggcacagggagaatatttcaacaacccgatttccgtgggagaggtattcgaaaacattgcatacggcaaggttccggcactctccaaattcaagttcctcgtggtgtatggcgacccggcaccgggcgaaagcaagggtaagaaaggcaaatccttcaagacggtttcgctctgtggcaaattgggtggcaggctttacgtcatcaagactttcctggcacaggcgctcaatgcggagttcattgactggtatgtccggatgcttgaatttgtcgggggcaagaccaatgtctattgctacatggagaacaacaagctgcaggaccctttcttccaacaggtgttcaaaccgctggtggcaaaagtacgccgcgaacagaagattgcgctgttcatccggggcgacgaggagaagaagacggacaaggctacgcgcatcgaggccaaccttgaaccgctcaaccgcgaggggaacctcatcctcaacgaggctgaacgggacaatccgcacatgaaggaactggaggatcaattcaagttgttcaccctgaccatgcgctatccggccgacggaccggatgcggtcgaaggggcgaaccgtatcattgacgaactgatcaggcgcattgaaccgcccgtattccgatcacggaaggatgtaagaaaacggaataagaaaagattatgacaactctaaaacaataggactatgagcaaatttgttgaacttaccgattacgatgcgagcatccaccgagacatcctcgacgcactggttcgcgaagacgaaacggtcattgaggtttgcgaggacagggccattgccgaaatgcggtgttatctgggcaaacgctacgactgcaacaagatttttgcagccaccggcgagaaccgtaaccagctcgtgctgatgatggtcatcgacatggcggtctatcacatcttctgcatccacaacccgcagaaactttcccaggtacgcaaggatcgttacgaacgggcggtggaatggatgaaggcggtggccgacgaggacatttcaatcgaaggggctccgctgctgcccgaggaacaaagggcgggcaggtcggatttccgcattcaaagcaaccgcaaacgaacgaaccactggtaaaaagcaagcatcatgaaaaagaaaaacagaaaaaacaacaaagccggcatcatcaccgtagggggaaacttcacgttgccgggacaaaagagaccgaatgtgattgtgctcacacagcccaaacgcttcgggctggacatttccgactacatggcagccgtaagggtggccgagaatgtcgatttctcgcgacgttacaaactttatgacctctacgaggacattctgatggatacccacctttcctgtgtgctcgaaaagcgaaagaatgccgtgctgtgctccaacatggaattccgggtggacgggaagcccgacgataaaatcaacgaacagatacagtcgccctggttcaaccggctggtgggtgacatccttgatgcgaaattctggggcttctcgctctgccagttctacaagctgcaggagtgggtggattatgacctggtaccacgcaagcatgtggatccggtcagggaactcatcctgcgccaccagacggacattaccggccattcctggaatgaatataccgacctgctgtttgtgggttcaccgtccgatttggggctgttggccaaggctgcaccttgggtcatctacaaacgtaacactacgggcgactgggcacagttctccgaggtattcggcatgcctatccaggaatatatctatgattccgacgacgacgagtcacgccagcgggccatggaggatgcggccaatgccggaagtctggcgcagttcttccatgccaaggacacggaactcaaactcacggaagccggaaacaaaacagggtctgccgatgtctatgaacgcctctgcgagcggtgcaacaacgaaatttccaaactgatactgggcaatacgctgaccaccgaatcgtccgaaaaaggcacgcaggctttgggtacggttcataagaaagtagaggacaaggtactggaggccgaccggaagtacgtgctcaacgtgctgaattacgacatgacggacattctgctgcgcatgggcatcaacaccgaagggggtacgttctgtttccccgaaccgaaggaaacggatgccggtaccaaaatatccatcctcacgcagctgaagaagaacttcaacatccccatcgacgacgactatctctatgaggaattcggtatcgacaaaccggccaattacgagcagctgaaggcggaacaaaagacggctgaacaagccgaccagattccaagcccgaagaaggagccggagccagcgaataagggacgggatgatgaaccgacaccgaaacagaaaagaaacttccggaactggctcaaaggttttttcgtgaaagccccggcagacggggcagctttagactggtagtcgacagactgtatgcggctgataatggcagcatctccatggagtttgacttctccgaagaggtgctgcggcgtgccttgctgaacatatacagcagggactttcatccggcaaccgaaatcgaaatcaacctgttcaatgaaatatgggcaaagatggacaaggcggcaaaggaagggttcagcaaatccaaggccattactccggacgaggatttcagaaatgccatactccggaacaatgccgtattctcggcattcaaggtacatcgtatgcagaatgacatggcacgacttttattggattcaaacggcattttaaaaccgttcgacaaatgggtacaggaagtcttgcccattgcttcccatcaggttcgtcactggctgcggacggagtatgatacggcggtcatccgggcgcatcaggcggctgactggcaacagttcctgcgcgaacgcgatattctgcccaacctcaaatggctaccgtccacctccattcatccgggggctgaccaccgcccgttctggaataccatccggccgattgatgacacgttctggaacatccaccgaccgggcgaccggtggaactgcaagtgcgacctcactgccaccgacgaggagccgacaccacttccggacgaagacgacaagaacaagccccagcccggactggataacaatccgggaacggacggcaaactgttttccgacaatcatccatatcaggcagaagcccacaagggtgcccaaaaagcggtggataaacttatggcccgtattgacgagatgattgcggaaatgccggactaccttaccggggaggaaaaaatggccattgcccggaacaacctcgaaatggaaaaggctcttaaaatcaaaaaaggaaaacctatggatgtggataaggcggacaaacagaatgcaaatcccaaacatgtggaagagtatattttggattccaaaggaatataccgcgataaaaggggaaacagataccggaagaacagcgattacgataaaaaacgggatactccatacagtatcaactgccagacttgcgcaccggcatacgctttacgattacgtggatgggatattaccgccaaaggcaatgtcgcagggtctaaacttgaatatctgagtaatggacgtgcttttgaagtctggaaaaacaccgacggtactccggcgcaacatataagtataaacagctggcttgcgcacaaaggatacctgaaaatgacccctaaaaggtacatggagtatttcaatgaggtatgtaaggaagaaggcgtgtatgaattgtgcatcggctggaaaagtggaggaggtcatgctacaatcctgcaacggtttgcggatggtgaactaaggtatatcgaaccccaaagcgataattctgccggttcaggaatggaatggaaagacgtaaaatatttatgtgaaataggagctgcgacttcccacaactgcaggggagtcctgagaattgacaataagctattcgatgtctccttcctcgatattttcgatacatgaatcgataacgtcaagggataacggaccggttatttcggttgcgtctttaccgtcatacagatagacgaaaggataaccggtacaggagtcccccggaaacttgaacacataggcttcctggccttcataaataccaaggtattcgaaggtgtcaccgtattgctcaataagtacacgggcctcgttctttacttgttccggtatattcataacgcataaaaggcatattggaagcctcggttgcaaagttataaattattcttgaattactgatgattatggacataaaagattttacggaaatgataaagcggaaacgtgacaggctggacagtatgatgcgccgcaaaatgccagtcatggtaggacgaatggccaaagaccattttcaggataacttccggcagggtggatttgtcaatggcggtcttcacccttggcccaaagccaaacggctgtcctcgggaggttccgatgccgccagcaattatggaacgctgctctccggcaggaaacatctgttcaaatcggtcggatatacacctgcagactaccgggtaagggtattcaacgaggtggtctatgcacccatcaacaactggggcggggaaatcgatgtcaccgtcacagaccgcatgaggcgctttgcatgggccaagttctacaaggcttcgggaaaaagaaaaaaaaccggcacagggcaaaagaaacgcgtcaaacgacgttccaagccgaaggaactgaatccgcaggcacagttctggaggaacatggcgcttacccaaaaaaagaaactgcacatccgcatcccgcagcgccagttcatgggcgaaagcgaagaattgaaccggcgtatccgggaaaaggtggaccaggaaattaccaacattttaaaccaataacgatatggacgaaatttttatcgcaatcatggaacagattgcacaggaaatgccggaactctctctcatcgacgaggactacggacaattggaaatgggagcagaagaagaccagtacccggtcactttcccttgtgtattaatcggaaatacaaactccgactggcacgacctcggatacggggcacagaaaagcgaatccgcactgaccgtccggctggccatcgattgttacgacgatacaagctacgcatccggcacgtatgacaaggtgagggaaaggcagcagctggccaagaaattatacaagtcgctgcagtgtctgcaatgcacggacaacgcttcgccgctggtacgcgagaaaagccgttcgtatgccatgccgcattacatcaaggtctatgaaatgacgttctcattcacactgcacgatgaatcggccatgccgtcatcttatggggaatagttccagctgggcggcagtcagacggggggctttcaccttgggaacaggcttcagattgtagtctgttccctcacgtgatttccggcggatgatggtcatgatacgttcctcggatataaagaattcgcgctccgacaacacttttaaagcatcgtcgaaccgcaaccgctgtatttctgtccaatagtagtaacgacggcatagtgcctcgtcacgcagcttgatcagttctttatcccgtcctttgcccatacattttatttctcttacaaaaataactgatttccatctattttaagaacagaaagcgccgcaattataacaactgcggcgctttctgtttatagggttaacgggtttcggctacaaacggcagaaactgggttcaatgcgggtccatacgccgttttcagggttgcggcggctgaagtagtagttggtggcattgcgctgcactacattagcttccttgaacaggcgcatgatgtctgcatactcttcatcgaacttatcttccagttcatacagctttgaaatgctcttgtagtccaggtcgcccatcttgttgcgctccagcagggtcatggccatctgatacatcggatcatcagaacctttctcgctgttctgcatgtagcgcttcaaatagtcaatcagacggtcggctgccatgtcggctcgttcatcgaagcctttcaccttgttgcttttcacttccagacggaagtctccgtccgtaatggtatagctgcgctgttcgtcgcttttcacctggccgtattccttcatcaccttggtaaaggcatcggcttctttttccagccatccgcggaacccggtcacggcattcaccatctcaagaacgttggtctttacttcgtgcataaactcaccgcgtaatgcctcgtaagtttcacgacgggcgatgcggtcttctttctcttcttgctgcagctgggccatgagggctgctcgctgttctttactcagggacttgatgtccacactttgattgttcttttccattttaaatcattttagttgttaatcagctattactttgtcatccttcagcagcaaagcgaatgtcctgtctctttctgctttggtttcaaacttcttgtatgtcttccagccaccgtttatgccggtacacatctttatcctcgggcctggataatcatcctttcgtattatacagaaccccgcttttatcagcttgtcttggtcatctatcctcataatcatcctgcttttccggttcatcgtctatcagcatggcctccccattggcatacgcccagtcggccagttcgttgaaaaactccgctgcatcctggttctccatatcggatgtcgtaagggtcacgtcttttcttatgcgctcaagcgcttcatgtgcttttttatccatattgctctatttatcggttaaacctccttttcgttggatagcccgcagtttgatggccagttgttccagctcggctgtactaacctgaacaaagggcttgccggctatccgggggttgttgcagaattcgttcacccggttccagtcggtggtgtctatacccaactgttgcatcagcttcaggcagacgctgcgtttccgtcgcagttcctcgcgaagtttctgccgccattcgtcttgtccgctcagtttctccagagcagtacaacaaacttcatactccttggccgtcatttccttcagactgtctgtccggttccacgtgtactgcagcacgatttgttttttgaattcctcccgatcgccctgataaggcagtttgttgaacaatgcatagaaccgggcgaaattggttacttcctgtgccatatcatcctttcacttttttctccactgaaagaattgccaaacttatcatcataagttttacagactggctgtcctcttcaaacaaatcaatatccgcaaccacaggctcaccgctcatggtgttccatatttgctctacctctttcgtcttcttttgattcatcaaaaagagatacgcgtcatactcggaacggtcaaattcaaatacgacctgaactttctgtttttcttccatacattcactattaaaaggttattcaaacaatactttaatgccacacgaactggctacgtcaagctccagtttggctcccttgctcagttcccagtccttcagcatgtagatatagtcacaagccagcaacagggcaatgtcggcccgcatgtgggctctccaatgagcttcatccggcaatccgttcctgaaagggtttacaggatcatagccttgtgccatcagtttctcctcggcacggctgaaggcttccttgcgctcattcatatcatagtgcgcgatggctccgctgatgtacactttcccggcaccggtcgcttcaccacgttgaaaagccttgtgtcgttcccaccgttccggaaccaccacactgtagttgcacgattggcagcagcagccttcttctttcaccgggaacggattgtatccgtagccctcatactctttgccgcagatgcagcacactttcttttcttctttcttttccatcacttcaaatctttaatgtttatttggcaggacggatgccatacctgaatattccgagcaaacatcacatccctggtttctatcactacgtgtccctttgtcttggccctgcgcagacggaggtcgctttgtatgttacgttctacccaatcgtccaccacggcctccgcttcctgttctttcaggagtatctggtacagcttattctcccattccatcattcaaataatcctccatattatcgtccttcaatgttttggcagcaccttcttcccatatcacgtagggctcaccgggccgctccataaagcggcttttgcaccaggctttgaaacagcttaccatgattttcacatcggcatcatattccaccttgcgggcgcttctacctgccggatgaagcccctcggcatggctgatgaagataaacagtttcttgggatgacgttccttgaactccttgtaggttttgtagttcaagccgctgtattggaagctgtcgataatcacgattccgggactgcctctgcgccgtaaccgttcctccaattgctccatcggttcccggtcaaggataatcagcttctttttcacttcacccatcttgtgccgtttcaggctcatctggaacgacaaaccggtactttcttccaaactgtcataaattacgcgtccgaagctacacaggtacttggccagctgcatcacaaagctgctcttaccgtttccgctggctccccaaataatccacacgccgctcttggccgggttgcctatcgaggtttgccagtccccggaaaactcgaaccggggaatcttcatgttcagcacctcaccgggactgtaggctctcttcagtttcacggttacctcctttcaattcttcaataagagcatcagcatagtccacagcaagtctggcaacttgttttatagacattatacctgatgaattgcttcttactaccggaagcatgcttttggcaatttcatatctgcgctgttcccagtctatctcattcgcttttctcatctcgcgatggataccgataacagcatccatcgcttgcatttctatcttgcttatcatgcctgcatcctccttaatttttcgatttcggtatatacgcgccgcaagccgcctccggtgctatgaacaatcttggcaatgtcggcaccgtccggggcattgatttttgcgacgatggcagcctgtgccttcagaaacttttcgcgttcctgcgcatcgtccggggtcaccttgctgtaggagtcaccgtagcggctcaacatttcggtatagcccaccttcttgccttcgatggcgcggttgatcttctcctttaatccgtcggcacccatcatataccaggcacagcagcgttccgtagcgttccaaagcgcctttaactccaggaaggcttcatactgcaggtccccggcttcatccaggataaccaggggcgtatcaatcgtgcgcaggtaggccaccagatcctcatacacgtcgctatagcgtccgttgctggtcacaccgaattccttggcaatgtagcgtatcagcttcagtttggtcttcacctggctgcagtccacatatacggcgtgcttgtgctgcttcacgtaagctttcgctgtaaaggtcttgccgatattgggcatatcgcacaggatggcactcagcccgcttccctggcacacttccagctgcttgctcacaaacacgtaggtcggggtctgtgctgccagccaaggtatttctgtacgcagttgcacgcctaatcttcgggctatacctacccagttggcatcactgacctgcttttcataattgccccgcttgatggcattgtaaacgctgggggctatgcccagtgccgtggcatggcggttgtcactgggataattttcacggtcggcggctatcgctgccacaatacgttgctttacttcatttgttatttccatttgaatgctgttttaaattcgttctaacgtcgttaattatatcttggctactgcatcatgctcgaaggcactgatgtccatataggctgagtaatcttcttcctcggcttgtgcaggaaggggaacggcttccgcctgtacctctgttatcagctttgcctcctctttggcaaggatgcccacacgcttgatcttgccgtccttcatcatcttgtcgaattgagctacatacttggactgttcggtataggctgccttgtcgtactcggtctgctcggctgtattctcattgtaacgggctacgggcttgcaggtggcgatatatcgtccgttctggtagatatatacctcgttgatggttccgtcggcatcgggcagataataggcatctaccttgtagttcctcggctccagcttttcgatgatttccgggctgggcagtccgtattggttgtacatcaccgtgcagtaggtgttctgccggatggttgtttcggtgtgctgtccgatgaaccggtaaagaacggccttgtcccaaggtgcaaggttcgggttctgatgggcgcaaagcacatcccaacggctcatgcccggatagcgcttttggttggggtgaggctgtgcgttgaaggtctcaatggcgcgtatatcatcggctaccaattcttcataactataggtcttcaccttgtaggtgttgttcttttcgtcatacaccttttcttccttcgggcggttggcctccagcttggcataccatcggccgatacctacctgcgtgcgtttctccacaccgtatttcttttcgcggttcttgtgctcggcacgtttttcacgcgagttcccggggttacaccagcggatcagggggaagacggtaccggcttgcatcaatccgtcggcaaagtcgcttaccaggtggtgttccacttctaactcggcggggatatacatgccgttccggtccagggtctggaacatgtttcgcatgcagtctaaaaataactcggtagtcttgtaccggttgtaggcatatcccaccacagcaccgctcaccacatcgtaggcataataggctttcactcggttgccatccttcattgggcgcggcaggtcgcggtcgtcaagagaaaccttactcaaggaatattcaccgatgctgcgcagatgataaggacggtaggcattgttgaaatcccattggctcatgtgcagcttaccgcgaagggccttgttcttggggttgttcaggtagttggctactgtggccgggctcaataccagcggatttccatccttgtcggtaaagtctgccggattcaacacctcgccggtttcggggtcatatagctccagttctccttgcacaaatagattgtactgttcccacacggtggtattgaagggctgctccggttgggcatcgatgctcagcagcaggcgttcaatgtcataggtcactttccggcggttctggttcatgaacttgcggctgataaggctttcatagccgttggccttgaagtcattcacacgcttcttgaagcggttggaactgacaggcaaggtatgtccgaactctgcttggtagtaactgatggctcctgccagttcgccccagttcaccggcccggccttcatggcctttcgcataaacgtggcatcctccatggcacgcatcactgcctcaattaccgaagcgtttaccgtatattcttggatgtgttccggtggcagtgtatctccgttgtcaaaacggaaccgggtgtaaaattcccgggctttcgcatcgatgtggtaatggctgccgagccagtttcttattacgtcttctttcatatctccgtattttagttttatcctttcctgaaaccgtaggggcatggtggctatttctaccaaaacgtaacctcccagacctcttccggatcgaactacattgattttctcctttgccgctaacttcttgtaattgggtatcgacatgatgggagcaagttcttcttcggaaagagtggaaggatgaactcctttcagcgtgcggcttctgctgtagtctgcctttccgttcaccatcaccggtcggtcatcgtaagtcaggtcattgtaggatatgcacaatatctttccataatactccatttcatttctatttataaggcagatgccatctgttgggtctcgtgctgcagctgcatgaaatccgatacaaattcacattggtaggtttcagtccgttttccgtccacgtacacatccacatcattggtctttctgtggaccacgagttttacacggggaccgaaagtgcaggtcatggtcttctcgcactcctcgaaggtggtttcgcagttcgggatgaagttcccgtcagtcagtttgccgcctcgcttcagggcaagagtgcgtatccggcgcgcctgatcgctgtcacggacaaaattcagtgcttgccacacagcctgacggctgcatccgaatgtcttcatcaagaaggtcttggtctcgttatctgtcaaaatctgctttctcatatcgtcatactttttaatcgttatcgttcgttcaaaggttttcaacggcttccgctatttcctaatcacccgtcagtatttcatgaaggcgtgtccctttctgcagttcttcgaccagcacctgcatcgcttcctcacacacacagctcacattctctatcacccggtaggcatccgagttgcttatctcatcctccgtcatgaattgtccagccagctccatcgcctggtcggcaatattctgcgtatgtgccgtactgcctatcatcgtgcgcaacttctgtttgaacagactctctgctgttctcggattgaaattctttgccataactctaaattttaaaagtttatatcgtggggcgcggggaatcgaaccccgacggctttctacgctttcttatttcgatttaccaactctccggccgtgcctgccgcccctgcccgtctttccgggctgccagttatccggcaatctatttgccttgttcttctatcatcgaaaggacaaccatcctgtcttcatcccaaagcggaagccccaattcaatggtccgtttcaccacttccatctcaccgaccagccctaccgcttctttgcggaaatcggtatcgtcatacgcatgtgccttgccaatcagaaaatcggtcaggttgtcgataacttccttttgacgttcacatttcatttcatagttcagcactcgcacatgaacatcgcggataatccggctgtccccatgtttcttgaaatctttgcagaactcatccttgttcatcgaagtgttcagataaaccgcatggatgtaatcaaaatcctctgctgtaggggttatccccgtccgttccataaattcttgctgtgtcataaactcacttattttattgtattattctgcatcttcaattttgaaagaaaagcacttatccgccaatactctttttacaaagtctaagtcgtatctatcagctgaaaagaaaactgcctgataatctacactgggataagccttgattgctgttgtatctaccatcttcttgaccagtccgtaaagagcttcggcggtctcggctgttgcttgagctataattacttttgctttcattttctttaatccttaaaattcgctaatcacacgccttttttgtatatttggcgcgctgtttacatcttaaacacgctgcaaatatatagaat

SEQ ID NO: 3 - DNA, 36592 bp, Butyricimonas faecihominis
aacggcaaacaagtacggagaaaaacgaataaaaaaatagatagtaaaaaacagaattaaaaaacagaaaagcaaagaccgccgagagcgagaaacaaaaacggcgtttacacgaaagtgagttgttgagccgtcaaagggtaacacccgaaacaacaccgtgtgcgtttaggtacgcttaaagagtgcgttaaataaccacgcttcgcacggggcaataataccagtattgccaacctacgaaagtagggaaatttatggaacgggataaatcgtatttattccgagtgccggaaatacgtcaagacttttgcaagtcgctgggagtattgagaataccgccactgaaaaggacgtgcaagaataatgccataattgcgcccttgtgcgcacggagataaaatgcacggtagcggaaaaacagtccgcacggagcttgagaaaagagcattgccaatgttatgcccataatcaccagccgcccaccgccttactgttagctgtcggattggaaaagatccggaacgtgccagagaagcgtcttgccgaaattggagtaaagcagcgcagagccacgacacgatgagtagaactcgtgcaaagatacgatatgccgaaaatgcgctcatttggatagctctgctatggggtacgttttaagtgcgacaaagttacgaaaaattttgccgtgcagggtgaaatgcacggcaaatttttgggcgcgtggcaggaaatgccacactttgcgctatggtgcaaagttcggggttcgactccccgagtgcccgcaatgcgtgattttgcgcagtgtttctaaaattttatcattatggcaacttctaaattgaacaaggaacagtatgcaaacatcggttcgtttgcaggtatcatgttggtttacaactctaccaacaaggacggtgaactcgtgcagacggcacagcactttttcggtgcggactttgagcctgccgacaagtcggacaacgagattttccgtgtgattaaaaacatggtcgcaactatgtggcacaccattgcggaggaaaagaaactgcgtgccgatgccgacggcatacgctcgaaattccgtgccacaacccctgcggaaatcatcatctgcgagaagtcgggaaatcgtatcaagaagtacgaccttaccgacagcgtttgggcgcgtatcggtcttgtgccgaccaaagtagacctcgagaagtcaaaccgtgatttccaaaagacaatccatgccgctgcaaaggctatccgcaacgctatggatttcgccccgaacctcgccagcctcgaaaagccaaccgagaaaacgaccaagaccggcaaggctgaaaaggtggcggaacagcctgccggaacggttgccgacgaaagcaaaaaggcggcataagggcaacggagtaactgaaacctgcccgaaaaaggcaaaaggacggcaggcagcccgctgaacgtgtgggactgcctgcccttttcgtatctgccgtcgtaagcgcgtgttcttgtgacgtatgccacggatacgcgcttttcatttcgggcgaaagcaactgtaacgtgataggcgaaaagaatttcccggcaaaaaacggtgccgggactgtacctccgccgcaggacggggagtacaccgtggacgacctgaagaccgctctggaagagtccgagcggtcgctgcatgatgccgtcttcatagcccgccaagtgtgggagaaggactgcgatgccgtgaagttcgacatcgacgaccttatgcagatagaatcggcattgcaggagatatgcaacatcaccgcaggaattgacagcggggacgatggcgagtgacatgacgcgcacacgtgctgcggaaactgcggggcgtgcgcgctttttcgggcattgatatacactgtgtcaggattgcaccctgaaatgcccgcacttttctaaaattccctccgatatgacttccttgcgccgtgaggcgttgtgcctaccttgtatataacacggttaagcacggtctggcgttctgcggaaccgcctgccgtgcttccgctgttatcctgtgcggggaagcggagaacggatgtgccaataataaaacgaataaatatgatagaagtgtttgacgcaaagcgcacccgcagttacgggtgctttgccagtttcaaggctgccaccgatacgcttgacagccttgccgcgacgggacagctcggaagtgtgcccgctgtcagcgtggcggcgtattgcagcggcgtgttacaacgggaatatgaagcggtgtttgtcggtgggaaatggcgtgtgccgaaatctccgaaaaggcggatgccggaaacgagacctgcccgtgggagacgtcggcggaaatggtgcaaggagtacgctacggcggagctgatgttccgagaagggtttcccgaccatttgaaccgcagttatccgctctcggcggacagcctgagacggtgcaaccggaaatgcagaatttatatgcaataataaaaacgcaatgagtatgaaaacattagcagacgtgaaacggaaaatgacgcttggctcgaagtggcggtgtgtccggctgttcgagggcggaaaagacctcggcgtgcgtgaggtcgggaaagtgcagggtaatgccgtggcattcctcaaacccgacgggaaactctcgtggctatggtggccaaaggcaaaggacgtgcaggtggaagaaaacgccttcaccgtgctccagaacggagtgcccaagctcaagtacatctatgccggataggtgttccggaaaaaatcatgcaaaataatatgaattaataacaactatgggggcggaatgcccctatgcttttataaacggataaagaaaatgacagaaataacgagaaagcagatatctggtctgcgggtaaagatgtattaacggctatgggagaggaacatagaatcaacgagataaaaggtgtcatcatcagccgtgccctgctcaaggaatacgggtatgatggcgatatgcccaccgacaaacagatgcaggtcatcggcaacgggttacttgaatactggggcgtaagcgacggtttcaaggaagccctcgccagtacaatggagaacatgttcggtgtaaaagcaaaagattaggtctatggaaacgaaagaacttactacccaccagcgtggtgttattctacgcggcatctgcggcggggctgcattgaaagacaagtcgccgcaaatatctgaaaacaataccgtcataacctgcgccggagggttggagatttgggacatctgctgcatcagcagtgatgccgaagccttcggcctgaaaccgtccttcggttatgacgggcacacgagaatcactttcacccccaaagaataagcggaatgaaatcatattactacttggactacctgcaccgtgaaatcttccttgaagaggaggatattcagaccgttccggaatcaggcagggcggacgatgcctgttccgccattgccgaaaagccgtatgtcgtggagcagttcatggcggactctttccggacactcaaagatgtggccagccgcctgtgcgattcccctgatattaaaagccgccacgatgcgctgatgtatatcgtgtggagggtggcactggacatcaaggagtggcggactctgagccatagcgaagccgccgtcaaggtaacccgtgaggacggtttcgtgtggctgcttgtatcggcggaaaatgcccggaagctatgggaggcagacgtattctccctgtacaggctttatgccgatgattcggaatccctgatcgaaagcgaggcggagctggaatcgactatcaagggcggataccagataggtatcgaggtggggttcgcctctgtaatggaccatgccgcccggatgaagcaacaataaaaatcggaaacaatcaaataacgaaatcaagaagaaaggtatggaaacaacattattgacaaaggaaaatgcccatcgtgtgaccatggtgcggcgtgtggatgccccggaaagcgaaccggtagcgtttcttttcaggggaaagagacacgggtattgcagctattcccatcttgtagggaatccgggcaaggaagaaatcctcgccccggcggacttcaaggactgggaagttgtggaagtggcgcacccgggctatctggaagaatatttcaagcaggcgtgcagctcctacaacctcacctccttctcacccgacgagcggggtgagtcagacatcgcctcgcacgaaaaggaactgcacgaggatttgcagtcgatgcccgagcagcagcgggaacgttacatggaaaactacaaacgctatttctctgccatgatcgccgccaacagccgttgtgccagcgcgatgattacgggacctgcacgcttcaacacgggccgcaacgaaaaggcctgcaacagccacgccaagagcgtcacggcgttccgggaatggcgagaacgtgcactcgaagcgattcgcaaggctaccgaagcggccaagcccgaagaacagcgtctcgaggaggagtggcagaaggtcaaagcctttatcgacgatgccgcctcgaccattcacggtatcgatacgggtacggcacgaggctatagccgggctctcttcgtcagcaacctcgccgggcgactctccacctatgtcaaccatggcaacgtggaaatcatcgaccgtgccgtcgctcgtctgcgagagtggaacgacaaagtcaagaaacctgtcgtcacggcacgccattcaatcttcaagtatcccgaactcgtccgcaaggtgcgggaaaagcagcaggaacgggcaagccgtgaaaatcgtgagattccgttcgatggcggcaaggtggtctacaacttcgaagaagaccgcctgcaaatcctcttcgacaaaatacccgataccgatatgcgtacaaccttgaagcgtaacgctttcaagtgggcgccacgcaaccaggcatggcagcgccagctcacccgcaatgccgaatatgccgccggtcaggtgttgaaaataaccatttaatccagtgcccatgagatacatcatcgattcacgttatttcgacgggacatgcctcacgtcgatgtcggatgacatgcacagcgactacggcggcgagacgctggaagcactgcgcgaaagggagaagaacccgtacctggtcgctgtatcaccggtacgcatgacactgcttgtgaagcgttatacccgggcactttgcaagcccttccatgaaattacggaggaacgttattacgaactgctggaatgcctgcctccggcccgcatgcagagcgactggttctttgtcggggaaccgtattaccgaaacctgtacgcgctctgtttcgagtcggacggcaggtatttccgggcggaacgtcccatacgtctttccaatgcggaaatctaccgccagattcgggaacacatggagaaagtaaacctgcatcccgccatcgtcaagaaggcttcctttgtcaaatatgtcaattggtacaaaaagacggtcacctacataccgtactatttcgagtatggaggtaaaatatatttcctgaagaacctcgccactcggacgggatccgaatttggcgaccgccgggaacggaacgagatggcggcattgctgaggaacctgcgcggaaaccgctacgaatactgcactttctactcccaaaagaaggacatcttcgagttttttgactggctacggaagaacaaatacacgctggaaatccagggcgacttgttcgactttgcggatgaccgctcccacgtggactttcacggcaatgtatgcgagtattcggctgtgttccattaccgcatctattcacgcgagctttttggccatatcattaaccagctacgcaccgtgaaacggtatcacgcgtggcataaaaggagggaaatacgatgaaaatctcaaatgaacctaccccatacctcctgctcaaggcaggaactgacagtgcatgggattgctgcgactttgcaatcgtgtacctgtcaaaagagtggagacagacacagtccggcaggctggaagccgtcaagccattcaaggatgacatcagtttccagtctttgaacttttatgacatatcggttggtttttaccagccggacgaggacgggatactgggcagcgaggacttgccggaagacaataactggtgcttcgtggaactgaccgaaacggaactggaaaggttggttccgccggacaatgtgctggtcagccatatcttggcggtatttgcaaacggggaagccagataccgggcgtacggcaaacataccgacgagcgattctatactgaaaaattccctttgcaacagattttggatatactggcgagtcatgaatcttaaaatttcaaagcaactatgacagaaatcatcaaaacggacggaacacgccaacccgtgcagccagccaatggctcagacttcacgctggaggagatgcaggcgattgtcggcggctacatcgaactggtggaactggacgggagcacgacaatggtcgtcaacgaggaaggcaaacttatccctctgtccctcaatcttgaagcgagcaggatattccgtgctcatcacccggcgtcgaaagacttcatcgttggggacgtacttgtgtgcaataacaatcaaatcagataaaattatggataaagagaaagcaaaagcgctcagcaagaccctcgcatgctacaaagaattacaagagaataacagtgtaaacctgatcgagttccataccgctgacgggcagaaacacggtatcggcaacccggaagccatcaagctgttgctttcggtggccgtcatcgaactggaacgccagctccggaccgcacagttcggtgatattccggaaagcctggagaacagccgcgagtacaaggcggccaaacagctggaatacgccatgaacgatttgggattcaagtccgaacgtttcgcccaggctcttccttatttccacaagacactggaacagacattcttcagaacggtaaaggcttccattaccgctatggcagggcgtgattcacgctgcattgacgaccgcaaccgtgcttcatacgagatgtgtcaaatgctggcctccatgctggaagatacccgtctgccctttatctaaatgccatgttcatagacgagaggacacaaaaccgcctccatgccgtgccgggagagagtatctcccacggcacgatgcgcacgcaggacctgattccggcgttcttggacgttatccgtgacacaccggagtacgtgcaggtgatgaatgccatccccgcccatgccatggaggacaaagaagcagactggtggaacagcgatgacgcggcgggattgctggaatcgctgttcgacacgctcgatagttactcaccggaggggtactatttcggtgctcatctcggtgacgggtccgattacggattttggaaaatggacaagtgaatgtcggaacatggtacggattacaaaagacaagcggcatgacattctcaaagacgggatttgtatcgggcaaatctatcttgcccgtgccgaaagcaggaaattaagatactgggcaatctcttgcatgagtggaatcggcttcaacactttcaatgaagcccgcagttatgccaaggatttcctttaataaaagaatcgcatgaaaaattggatacaacagatgcttttgtggcgtaaaaagacggacaagggcagaatgacactcggaaaggtgcagaaagagtatcgcgagaatgacgtatgcatgggagaactccttgatgcccttcccgccgacggcctttccatagaggaagctttcgagctggctatcaccgccaagaagtgggcggacggagaccgtttctaccggagtatcaacgatggagaaccggaagaattgtaaggtaaataacaataaacaataatgacaaatgagcagatatgattttataagattcggcggctttgtcaactgggcggacgaggacacggacacgttccggaaaatgaaagtctgcctgccggtaaaggagcctgtcgaagatgacacgaaaataggactgatttccacggacgaggacaatccggaagaaatcgcggtttcctattccgtcagggcagccgaactcatcccttggacggactcattccaggaaggatactggaaagccctgatagtggcagaggcaaacggagcaggcacggacgtattgctgcccatgctcaaagatgccggactatgcctgatggaatgtgtcttcctgatgctccggagcgatgcctgcaaactgtttccggtcctgtgccggctgttcccggaagtggaggaaatgtttgagattatcacatggaatgacagggaatattttgtcagggaactgacgctgttccgtggaacgggcggggaatacaaaaccctagtctctgtaacgggtctgcaagacgtgctggtcggcaaagacggcgcacccatatcggacgaggcggaggccgtggaccggaaaatctgctattacttcacggacgaggagttcctgctgccggaagagcggcttgtagcccttgcggaggatgcgtgagaaatcataatgtatgtacaaagaccagaaaatgaataaaagaatgaacaaacagcaaaccactcccgttaccgacacttttaaggggatgctacttatgtcaatgggtgtccctgtaggaaacatccgtccctaccgtttgaagtcggcatcttcctgcctcggcggtttcgagcgcatgagcgtagcggcagcacgagcctcgggaatggatatcccggagacggagaaagagaacgatgaagtttacatatgccgcttgggacccgccgtcttccataaatggatgcctgtctggatgttcgaaaccgctttcgaaccggttcccgagcagagacgcggtgaccgcatccgaacacttacggaagagatgaacaaccatcacgtggcggagaaagccctgaatgaaaaatgttacgccctgtccgtggagctgctttccgagtgtggcggcagccttgatgacaacggtgaacaatcctcgacctatctccatgttgtggaccgtgaccccgtggaactggtcatcacgaacgcgtcgctccggaaagacgggaaaatcttcatcatgggttacagttactacacgggcgaggagtacgagcaggaatgtgacgtagaatccggcatggacatactgaattttatcctttcccaaaaaagttttgagtgctatgaatgaagacaagatattgcaaatgttcttcgacataggccagtggacgaaggccattgagaaaggcgtgctgaaagacattaggaaagaccaacttattcggctgaccgacgagcatacccgtatggcgatggcctatgccatgcgccggggaaagtacgagatttcccctccccacacggcgcagatacccaaggacaacggtgagttccgcacagtgtacgtaaacgagccgatggaccgcgtagtactgggtatcgccaacgacctgctcttcgagttgatgccggagatgctgcactcttcgtgcaagtcctaccagaccggtatagggtgcggcaaggtagttacggaagtcagccaccggatgacagaaaccggcaatagcggctgtctgggctggaagtccgacctttccaaatacttcgacagtgttccgatacggttcatcgacgaggcgttcgacaaggtggaggccaaacacggccagtctgccctgatagacgtacttaggaaatattaccactcggacctctatttcgatgaagataaccggttgcaaagcaagtatcaatccttgaaacagggttgtgctgtggctagctggctggcggatgtactgctctacgacctagacagggaactgtcacaaatgaacggctactacgtccggtattccgacgatatgctttttatcggcaaggattatgaaaaagcgatggacacactccaaaaacgcctggaagataaatccatgaagctaaatcccaagaaagtggaatacctggcagccgatgtctggttcaagttcttaggattcagtatcaagggcggcatggtctcgctctcgtcatcacgcatcaagaccttccagcacgagatcgagcggcggacaatccgctgccgggacacgacactggcaaaagccgtggacgccgtgaaccgttacctgtacaagggcgagttcagctgggcgatacaggtattgccggtctgtaatgtgaagagtgacctcaacgagctgaacaagttcgtgatggactgctttagagccattcagacgggcaggtgcaagatcggcggtctgggatatgtccgaaccaaaccggatggctgcatcgtccggggacggggacgcaacgtgaaggccaaccgcgataaaacagaccgggacataccgggttacctgactgtcggctgcatgcgtaacgcccttctgaccagccgggcggtgtacaacacgctggtggcatcgctataagttacgccgggcacacggcagaacgggtggacgggcaggctattcaacgttacaggcttataaccagaatccatatcgagattaaccggtctaacacccggttaatcccatctcgattctggctgcgcctgtaatgtatcgggaaattaaagtcatgtgccgtctgtcccgcacccgttaccggagcacaccgggaaagttcaaggaataggtttgggcatcccgcgtaccaacgtcttctttccgagtctgaaggcggctgaccgtcgccttcggactccgcagaagacccatacgcgggatacatcggaagcataaagccatgtgccggtattatgagaactttcagtcttttccagcacgggaacgtgcggttcgggggaatggattcagcctgctgtccccgataagcccgtctcgcgccgtcgtatccctaacgttatacgacggcgccattccggcttccgccacagcagacatcggacctgtaaaggaacgtgccggcattccgggaaccgcaaaaagaacagcacagggcaaagggggcaaggccgggatttcaacagagccgcaattcacacggctggagcctgtgtcatctcctgctaacacgacagatgacacaggttccagctgtactcgcggcccgtatcaggtttttaaagggatgtgccgtccggatgagtcccctgaacagaaggtagcgcgaccgcatatgcacgagggacccaaattcaagatacagtattcaagcttggtcctgagccaggcaactacctggttcaggaccgaagtcctactgtatttatcaggactataaagatacgcgccaggggtttgagtgccattaattgtaaacaggtgagaaaatggaagatatttaccgagaaaccgtcaccgccatagagaacggcgcaaatttccggattgatttccagtccagaagtttaaaagtaaacgggagacacatgatacggaacggcaggtatgatggcgctccgtggttgccggagtacggctgcggggattttttcacggatgtggaggagctgtaccgccgctataaacattcgataccatcggagcgcagccagagcaagtcccgccggtatttcatggcattgcccgaaagtgacctcgaggacggggacatgctgtacgggcaacaccgggataccgcgcaattcgagctggaattctatatcctctgccggattataggcgggttcacatggaatcccgaaacgatgggcaaatggttctggcaaagcgaaaaagacaaggacctggtgatactcagaaaatgggtggaacccggaagtaatcaactattaacaaattcacaatgagcagaaagaaacaagaaacaaaagtcctgtgccccggatgcggcacggaattcgccatcgcggacaaggaatttgccgccacgggcaccgttatcggcaagaattcggatttgggcaccgtctatccggtggtggccggccataattctcccgccggacttcccaaaggggcgcgggagcgtatcgaggcactccgcggtgccggtgtggacgtgagctgcctgttcgccatgcagggagccgagggcggcgagtatatcgcctccaacaaagacgggaaacttaccatcctggatgacaacgacccgatattcggcagcatcatggcacagggtaccgttcccaacaaccgactcttccgccggtgggtcatggcacaaatgttccatatgatgtcatacacgcattaccgtgaaaaagagccggcaggggtgaccgagatgattcaccggaaaggctatgattaccagtggaaaatgctcttgaacgagctgcacgcccagatgaagatggaacacaaggacatcacgggttttgccgagagaaaccgctggttcaaccgtgatgtggttttggccatcgcgagcgactatgtcaacgcgctgaaaaaacacgtgggcaacctggaaacaagaaaatgcaagggagttccctacaagcgtatacacggccgtaatattttcgtggaggacctgcaatccaaactgtactacccgctttccatcgcgataacccacatcaggcacgcgttggacgccacacagctttacaacgcggtcagacagttcaatgaccgtcgtatccggctgccatggggcactcctcaaagcaaggcatggatggatgcctataagggagccggggcgttctttaccatgcagaacctgattcgtttccacggttgcacggctgtcaatgaccggggtcggcgtctggacaagtaccagtcactggcgttcctgtcagccaaggcggaagagtataaaaacggagaaggctggcggttgctggcagtcctgaaaaaaatgctggcggacaacaatatcaacatcaaaaagaagatggcggcatggcgtaagaaataggccgtcatctccatccgcccggtaggcggcacggtgtggcgggtcagaataaattagtactccctccattgaaatgatgctcatccctgttaacacaagatgagcatctttcaatggaggcattacatcgaaaacgtaaagagatgcccctgtttgacgaccacaccgctattctaatcaaaacgacataatcctttatacgatgagcaagaaacaactacgacgcagggcctacctgctgtaccggttacgaaaacagggtatccgatgcctgacacgttgccggaccatcttctacccttacggggaggatcctaaatcagtaccgcagatctgcagcctgataagcgaattccatttccatgtccagtttgaaatacccgcctgacatgaaaccgggagacattgcaacgctgaaagtgccctacaagggctatcgccgtatagagctgttggaacggctccaatacacctggctggtacgcatctgcgagagcgggaaggagatcgaggtctatgaagacgagttcgaaacggattaaaggcacggaacaatgaaaggagaacaacaggaagaacgcataccgaactttatcggcaatgccgtcattatcctcacagccgcccatctgggctgcgaggtggagatgctcgccaccgcacaggaggtgtggcggacgaaacgcctgcccgaggcggtactgctgggcatgtacgaaaaggccgcatgcgatgccgtgtcggctgtccggaagagaggtctggcggaacaggctgaccgtctcggagagatattttacaggacgggggaatttcccccgccggaagaagacaatacataaaaaggagtaacaaatgaaaacaaggacttttcaggaaatatatgatttctgccgtacggacgatacctaccggagctatttcgaggcatcggacgagtcccgcattaccggagcaagggcaagaaagtactattacggcgacatccgccgaggccagtgccgcgtggggacattcatctactgccagtcgatgcggcagcttgaaaggttcctcgagggcgcaaggcaggaccactacatccatgttgacccgccggcctgccgggaagtgagcctcaaggacgatatgttccccggccagaccgcctatatcgtggtacatgtcaggaggcagggtgtgcagattgaaatcgaacacccgttgcatggtggatgggtgcatttcacggcacgctcccaccgtcccttcaccagggagggaatcatagccgaggcgaagtcctacattgacagccacatcctgctggcaccgggaagataccgggacttgcagctggaacatatggtttccaaggaacagttccccgcatggtacaggcagtataaaatgaggctgcacgaccgggcggaagccgaacatcgggatatggtggacagatacaggcacaggaacgaccttacctacggagaagcccgtgacatgctcgcggcttcgggtatattcttcgacctgaactgcgacgagttcgagcgggacgagattacggaacaatttgtaagactttgtaacaaaacataatacccaggcaaatgaatctatataatcaaatcaaatataacgggtatcgcatcaacatctattatgatgatgacgcccgaagcccgcgtgaagcgtatgacaatctcggtacgctttatacggcacatcgtcgctaccgcccggagaaggagtttgatgaccacttcgatatcgacaaggtttttgaagggcatatcggaaatttccgggaatcgttcctgaaggaatatatcgccctgccggtctacctctacgaccatggcggcattacaatatccacctcgccgttcagctgcccgtgggattccggatttttcggaatcatcgcggtaccgttggacaaggtgcgccgggaatacgggtggaagaacatcaccgcgaaacgcaggaagcggatcgagggatacctgcaagacgaaatcagtacccttgacaactactataccggggaagttttcgggtatcgcatcatgccggaaagtgacgatgacaatgaactggacagttgttggggattctatggtacggaatgtatgaaagaactggaagccgaatgcaggcatattatcgacgggcagaacaaagcggcagcataaaatagaaaaatacgcataataactggaaatacaatgaagacatcatacggacttgaatttgacacggtaacagaaatcaatcctgaatggagcgactatgacaagacgatagcaggatgtcacctggccaatgccagggtggtcatcgtggatacggaatacgggcaaccgatagacaatgagcatgaccttgaagaaatctaccggattctcgaaaagaaaaagacaggccatactaaaaatgaacgacatggaagaaaaacgagataacaaggaaatcagggtacgcctgcaccatatcgaccgtggaaactgcacggaagtatgggaggtgcagacagagaaggggaagcccagacgctatctgggacgtgacgacggttatggaccgaaggagtggtacacgctctgcgatgctccctacggctattgcgaacgcgactgccatgtgagggaggacctcaccctcattgtctgcgacaaagattggaacgaggtgttgcgagacggaacggacagggaacgctttcctgaaagtttcccttcactggatgaagcctgcaacgaggcatggagcaaggtcgtgaaagtgcttccgcatgtcacgcacaaaggtttcgggcagtggatcaccaaacagtcattcctcccgctcagccagaccgaagaattgaattggcgggatagctactatgaggaagaagcgagtgagatactctcacgttttacatggatcggtgaagagtatgccatattcaaggttacccagaggcacaccaagtgcgacgcccaatggtacgagtattacgcggggaagacaaaccggcaggaacacgagtggtatacccgtttcttcggttacgagtatcatgaccggcatatcagcgacgtactccggacactcggaaggcggtgcgacgacatcatccgtactgcggtggaaacccgcacggaccactattacgggcgtacggtttcctgtttcatggacgagttcatcggttacgacctgtcccatgaacaggtccgtgacgccaaggaatgcagattgcgcaaggcacgggaagactacgacgaagcgaacgcctactattacaaactgaaagagaatgaggaaagcatccgtggtatcgaattgatgctgcactgcataagacaacaaatccgaaaaatgaaaagataatggccagaaaactacatgtagccagagtttggcaaatcgaatacaaatatccgggtatgtatggcggggacggtcaggatatcttttatgatatcctgacaatgttcgaagttgataactccgcagaagacgcctataccgatgacttcgaaatagcccgttcgggtctgcagcagctaagaaaacatatctcagaacaggatgaaaccttccggcagaatgccgaagaattttattcctgcctggcaaaggtcgggatggaccgggaaaagtttatcgaagtactcgattgtctaatcaacggcagtgaccaaagcgatgcctatgtgcatgtctcatggttttaatgatatgccatgaaggcgtttcgagcaaacctgccgtaacatcaaacctgtatgaaacctaaagataacgggctggccaaccttcatgaccggaaacgtgaggaacgcggtttctgctgcatgcaactgatcatattccttacagacaatggagtgaagagctgggatgaatggcaccgggcgcataccgacgcggcccggggcgaatgcagataccgcaagcggtgcccggtttatggacgtagcaaacatttaatgaacaataaataatatggtacttaatattgtaaaaaacgacctgcctgcctcatgcattgcagaatatgtaagatgcgtatttgacaatgccaaagtaaacatcaaagatgaaaatgcagtatccgtcgacatcgaagtgaccggaaagaacgagctgcactctttggaaggattaaaagagttggaatactattttaaagattatgacataagaatatggtgaccgccatgcaacgggcggcaaaccggaaattgttcaactacagataaaaaacaagcaacatggaacaggaaaaacctacaaagccggaaacagacagaacctttccggaagacgatgacacactttaccgtgaaatgacagtgcacatgccccgctgctattttccgacttcgctaggcgagaacagtatcctcaaatttgccggagaggaattccgccgcgtcaagaatattgtctgccggcgctacaactttaacgaggacaaatatatccgggagaacgccggcgtatcccctttcgactctgttcgaggcaacttcgagcaggaagtgtacagacgtctccgtaaggattatgcgcacctcagtatcatctccatcagaagatcacttatggagaaaatccgcgacgccgtgaagaaggagaacaacatcatcggcacgttctaccgcaactgcggcgtacattaccgggaggcggaatcagcggagtatgaaacctccccgatagtggtggtccacaattccgctttttacggatacggcggttatgaaagtgcgaccgtttatgaacttttcatcgacgggaacggcaaactgctctgcacgctcaacggcgaagccggcgaggatttcgatgagcccatcggacaggtacagaccgagggattgcttgagattgcccactggctggaagaacacgggttcatctccgctgatgtcaatgacgacgagattgtcgtatgcgaggggtgcggttcagacaatatacagacccaggcatgggtggatccgaatgcccgtacattcatcggtaccacgggtatagaccgctatgataactggtgcgacgaatgcgaggaccatcagccattctgtactttaaaagagttcaaagaacgcatggaggaatggtggaactcgttggacgcaaatcaaatggaacagatcacgggttgccgtcaggacaagtgtccggccggagacaaccatcaggggtttgccgaaacctgcaatgaatggtgggaaaacaagggctatgacgagaaacgtaaaatctggaaagaacataatgactgctgattatgatttacaatcttcttaaacgcatacagaacctgttggcttccaagccgtccgggacaaaggaggaacaggaaatcctgagtctggtcagccaggcgcttcctgcaatgctcaatgggcatgatacggaaacacttgccgccaatgagctgctggtacggatatgccccgacaccaaacggccggtcctcgtatgccataacggcaacgggcagtgcctgtgcctgcacaatgggacgacggaagaggatgccgtcgacgtggacttatggctgcgttccaacggtagagagtgtaacggctacaacaagttgcaggaggctgtcgtggaccttgcctacaatgccggggcggacaacctgtgggaggacagggactcccgtgccgtcaatgccgagatcgtccagtgggcggaagaattcgagactgagcatgcgggcactgattgggatgcggaggactacttccttgccatcgacaggttttacaaggaaaagacaaaacaaatgaatccggttacaataccggcgaactgaaaaaatggcaaccgaatggacaaggaaattgcagaagaaatcatccgggaaaaccgttatccgtccggatatgacatacaagactatctgtttgacaatgaggatactgtgctttctctggaggacggaacggagctgcttgatgacttcgacctctggaaagaacgttccgacctcgaacttgaaaaaatcatggaccggaactactggtcctcgactggtggatattagattaaaaacaggaatataattatggtaagagaactttatcaacggctcagggaatatttcaacaacttacccgaaccgacagaagaggaaagacaatttatccgggagctgaacgccgggtatttccctatcacgtccgtccaccgcgatgacctggaaggacaaggtttcgatgtggaaaagatcagcgatgacgacatgcagaatctggcggaaaagatggccgacgattactgcgaacagttgttctggcccagcatggaaatcattgccggagaaatcctgagtttcccgaaagtaaaaacaaaagacattatctgtccgaaatgcaattcggaaaatatccgttatgatattcacgaaagtcggttccactgcggcgagtgttccctggcatgggatgacaagttatatgcactcgtggaatttcccgaggaaagtgctcctttcgaggaagaaggaaccggttatccggcatggggaagcggggagaacggggcgctttacgtgcccgaggaagactatatacgccataccggcaaatctcccgaacgggacaagtgttaccgtgccgtgtgttggccggactcccagaaatacatgggaacgaaaggttgtgaacccatacaggatgaaaacgggatacgggatttcggcacatcggcatactgggtgccgctgcttctgacggaagaagcggcagagcgacgaatggacaagaaaaaggtaccggtatgccccgaatgtgggggcacagatattgacattctgagtgacgagggcgtggccgtatgcaatgactgctgccttgaatggccttacgcggaggattgagaatggaaacggtagatgtttatacggaacgaggcgacctggtcacctgttccgattgcggcaaggtgatgctcctgccgtatggagcggataaatgtcccgcctgcaagaaagaaggttgcctggtatggacggacgaaagcttgcgggaagccgacatcgactccctgctcgagaggcactgtaacctgcaccagaagagcgaactgcaaccggaggagtatctttcactttccatactggtgaccgagtatattccatatctggccgataaaccgcagacagcgcgtgaaaccctgttcctactccttgaaaccggctctcttttcgagaaatactggcgggatacaagatgcttccaatccgaaaatatctacacgcccgccatcaagacactgcttgacaaactggacgtgaaactgcgagagggcgacacgattccggtagaataccaggattgccgctccctggaggacttcttcagggtcgttgccggcgagcgtccggcaaaggaagaggtatcgttttcttcagataaggagggaaactattatttcaacggacgcaaggtcaaggtggaaaattctgacgagtacgcctaccgcctgctgaaaaccaaaatacagacgagctaccggcgtccggtagatttttacttccgcttccttgcccgtttcggaccatacggaacttatggcaacgtgtattacccgagtatcacggacctgatatgcaggcgttacctgcctgaaaccgcaaaatgaattccggaaaggcgatggacaacggttcaccgcctttcttattgtataacttttttaatatcaatcattatggcaacagcattagcaacaacggccgcccccgtgcagttcgatttccagaacaacaacgtcgaggtgatgacgctcgacacgctccggcgcacacacaaggaaaatgacatctatggcaacccgctcaagggaatctaccattacgaggtgatagagcgcatggcggacatctgccagaaacacaacctgaattacgaggtggaggaaatcttcgccgcccagaacaagaacaaggcacagcccggcgtggtcgtcctgccccaggtggaacaaaagtacggggcgatggccgtcgaggcgcatatcctgcgccgcgtttatacgaccatccgcattaaggaatgggaaacggacgagctgaccacgacgcttgtcatcgccttccatcaggacggcatccaggcggccatcggcccgtgcgtcagggtgtgccacaaccagtgcatcctctcccccgaacgcagtgtgtcgaactacgggaaagacaaagtcaccaccgaagagcttttcggtcgtgtagacgagtggctctcgaacttcgaggtacagatgaacgaggacagggaacgcatccgccgcctgaaagcgaaagtaattaccccggtggagatgtacgcctacatcggattgctgacagcattgcgcgtatcgcatgacagttccgacaagcgtctttcgtccaaggtggagacctatcccctgaaccagtcccagatttccatcttcaccgaggacctgctcaaactcaccgaagagaagaagacgctcacggcgtgggatatctataacgtggcaaccgaaatctacaagcccggacgtacggacattccggccatgattccccagaacggggcgctggccgagctgatgctctcggaagggttgccggaatcttaaaaggctgccacgtgacaagaatcaagggacaactgacgacagccgactacctgcccatagcggaatataacaggctggtccgcgggcttgagaaggacggcgagtacctgtgggagacctactgctggctgtcgttctgcacggcatgcagggcctccgacgtgaggaccctgcgctggaaagacatcttaggaaaaagcaccatgacccgcatcgagcagaaaacaaagaaaaaccgcctgatcaagttcaacagggacgtgcaggagaagaaccgtttcctgtacgagatgctcggacaacccgcccccgaacagtacatctttctcagcccgcgtaccgggaaaccttactcgctggaatacatcaacaggctgctcaaggtattcaaggtaaggtacaggctgccgatcagggcattctccacacataccttccgcaagactttcgggcgctatgtctacgagctgatgggacgctcggccgagggcctgatcctgctcaaccagatattccgccattccaacctggaaaccacccggcgctacatcgggctggcgcaggaggacatcgacaaagtgttcgattccatacgtctatgagaatattttcaacgatgcccggaacccgagcgggaggttccgggctatgctttatataacatatcaaaatcagaactgtaaatggacacaccgatatatatcgacacatacttccgcgtcgagtccggctatgacggcggtcgcatgccggaagagaaagccggacgcttcttcgacgaggtaaagcgccttttcacggaaacagggttcagcatcaaggaaaacaaatacaaagacggttgtcccgaggtgtatctcggaaagacatgcctgtactgtcatccccaatcgttatcgggccctgttcttaaagagcacatggagcttatcgagaagattctggcacaaggaacgaccttccggtacctacgtactgacacttacggcgagattctcgacctgacggaggaggaagaactcgcgtattaccacaagactcatgacatgactatcgggggtgtctttctcgacgccttccgcaccaagcgccggaacctgtacaagagccgggagcaggtgctggaaatactcgtcgaaaagctgcgtgtcaagacactccgtgggaagtccgtttattcgaacacctccccggcataccgttatatcagggaaatgtacgggaaaatggtgtctgaaggacggctcgtcgagggatgcaagcaaaccgcttccgggaaactgccgctctgccgcacggcaaccggcagggaactgaaaatgaaaagacgggaagacgacaggacggaatgacacgcggttccgtaccggacatggccggataccagtccgaagacttctgtaaatcataattttcaagccggactgtcaatcgaaagaaggacgacccggctatacttcaacaacaagagatagcactattatgagcatacaaatcggaaaactgttgccggacggcagtgtccggcacatcaaggcgctccatgagacgctttcaaaagaccttgtgaggaaactccgggtgttctatcccaatgacagacgggtagatgccctgctgtcgctgggcgacatacaaaaactgggaccgtcaccctatggaaaatggacaggaaccggcgataccgtccactgtttttcaaagatccgtgacggacgggaaacaccgcggcaatccgcatcacgcatcgcggacaacgcagacattttcggccgcatggaggacacgtgcctcctgttcgataacggcagatggcatgtcatggacaagggagaatactgtgaacagccgctcttcgtcgaagatacgccctcccatgacagcatgaaaccgatcacggtatatgtgaacaaccatgtccgactcgaaaagataaatacaccgcagcactggcagggacttgaggaactcgccgaacgggaatccaggatactctatgtctaccgggggtgccgccttgtgagaatcgtccgttcgtccaaccttaaaaagaaactgtatgcggcacaataacatcgtatcggccatagaatggctgccggaacacctgttcacggaagagatcgtggaagcagccgtcgaaagcaaggaaatagaggtgctgagccatattccgggacgtttcctcacacccggacgtatagaacgaatcatcgcgggcagcacggagagctggcacagcttcgagctgcgcaatattccggaggcgtaccgttcgggagcagtctgtgactacgccatgcgcaaaaaaccgaagaatatcacggccgttcccgaagcaatggttacccgagaaatggcagaagcggtcatccgaaacggacgcggggatttcgacattctcgccttcatacctgaacgcctttgggatgcgcaactggcatacctggccttgcgcagctatatttacgacccgtattacacggacagcaggacagacgccgtcatgaaaacggggcttatcctcggatatgtccccgttgaggtaaagactcaagagttctattacgggatgctcgacgggatgaaaatattgagcacggttaccgatgccgtcgtgccgtcccgtttcaagactgcggcatactaccgcaagatggcggaacatgacctctcgcttgttcccgcccggttctattcctatgagattctccatgcggctgtctgttcgaccgaaggaaaaaacttcatcacagacccccagtttttcaagccgttgtcggtatatctggacgacatgctggcggaccggctgatggagaaacacccttacatgttcggggagttgccgaagcggttcaagacaccggaaagactggtcattgccatcgataacagcaaacgggagacgaactgctatatcgacgaggaaactgaacaatccctgctctcggtggaagtgtgcaaggcattcatccgaagaaacggcaactgtcccgaatttcctgaaaatgtatggacgcgggaatttgtcgactactgcatggagcacgggacgagtttccgctggttccgccagatgcccaaaaagttccagagctccgcgaacacgcaggcggcgtatgattacggtcattaccatatctgtgactttgccaaacggttcatcactccgcaaatggcgaaggagtgctaccgggagcgcagttatgcacatgccatccccggacatttcctcacggagttctgccgacagaccggactgcccgagaagttctacggcggggaaaccacgatgctgtcgctgaaaaacagccgtgacgactatacttactgcaaagtcggcaatacctgtctggccttttacctgaaagaacaatacgagccgtcctcggcacatctgatgatgacgcggtcggattcaaaatactgcacgccggagaaggtgttcgacgtgcctgtcggaaccttccaccgcacgtggctggaaaagatcgtggcggaaaacgacccccgctttgtcaaaccccgtgtggacaaagcgttgaaagccgtacaggcggtctgctattacggtgtcgagaagttgaaggacctgaaccgtacggaaatcttccgcaacaccttcatgggtgagaccatcggttactgcgcccgccgcagggacctgacctaccacagcgacaactgcgggacccttatcgagggcttgaagttcaagatccggggaatggctgtccccgtaaccttggcggaagacatgactccttatacggccgacatgctgcaccggaagttcggcttctgctatatcggaatgacggcattcgccacggactacggcctggacatggagaaggcatacacctttgcacagatgcgccagatcgtaagggagaaagggcacaagccgtcattgagaaactacaaacgtgaactgaaacaaataaacatcatacaatgaaaaaataccggatagctatcgaagagacgctccgtaaggtcgtggagatcgaggcagaaacgcccggtctggccgtctgcagggcggaagacgaatacaatgaagagaaacacgtgctgtcagccgacaatttcgcaggagctgacatcgcgctctcgactgatgacagcacggtcatggagactctggaagacgtggatttcatcggatacgtgcaacgccgtttcgaggaatgccgggagtccatatccgtcgaagacaaagtccggctggcattcggaagtttcgacaacgccctgtatgagttcggcgaataccgtaaggaggcggcccggaaccgcccgcaggtctacctgctgtaccggagcgatgcctggcacaaccgttcttccatggagctcatagccccgttctcctccctcgaaaacatgatggagtacctgcggcgtaagaagaaggaattccgcctgacggaaagtgatctggaagagttcaagaacaaccggcagacgaaggggcgcgacgaaaactacctgtacgagtcggattatttggatgtgctgccggaacaggaacccgaactgccgccgaaagatgacgctttctatgacaaggttttcacctgcgggcaatccgagctgtcacgcagggagttggaatctctgccggagccgttcgatacctaccatgttacggacgaagaaatggaacagattgtgtacgaaacggaaatggagacacgggaccggctgcggctcggtaaaagaaagcccatagattttgacaatgaccgccatagtgaaatctggtgggaagaaatggaaaaagcagtggtaaggcacggcgtaccgtactacgaggccgaataacgaaaatagaacctgttcatcacatgccataatgatgacgggccgtcgcggctacggctgcggcggtcttttttttcaaaacgaggtgagtattccaccccttatacaaaacgattacctactcttaaaaaaacggatttatgaaacagacaagacaggatttcttcacggcgaacggggaaggaatcaaaatcatgacatttacggagttcgcccggcatatcctgcgtatggaatgcggggaaagtctggaactgtatgccgttgtgaaccggcagacacgggaatgctcccggccgctctctgtcagaaaggaacaatggaacggtacgcccttttacctgctcggcgggcacgggcaggaagtccgtaccatcaattttgcgggtcgtccgaaagaggagtttgaaacgacctgccatgatgtcttggacagctacgatgccgtggaaagtatcggggcggtcgtgtcaagactgcgtgaattatctcctgaagaactgcataagcggattgcggaagagatgaagaccggctgtaaatacctgttggtctaccgcagcgaggaggagatgacggccgcactcgacggcaagatatacgccatcagcgatacggacggcaaattcctttgcgacctgtatcagccggattatctccatctggaaaacgggggcgatattgtggacaccgcatccattccggacatgcatttccattccgattgggcaatcgccaaccccacggtacgcgacaaggtgctctcctcccggatggtgattatatatacccacgaaacggtaacgctatgatagagattggcaacaggatagaaacgccggaaggtgtgttctatgaactggaatacggaggggaaggaaacatctacaagaacgaggatgcctttctcaaccgccccgatgaagtgtgctatgtacctgaatacgcggcagaagaccgtgaggactggcgtgtgtcggagagcagtgacggctgtttcacgcataactcactgctcgccctgtgcaagggtaatgaagaggtgtgccaggatctgttttacagccttgaatggacgtacccgaccaccttgctggaagaatgggactcgaacggctatttcgatgagatcgagggctggtatgacagtaacgattaaatggaacggcatatcatggacaggaaatacaaaatcacatactcgggaaaaatcacgggcaagaccccgaactacatattgagcctgcgggcgcatctgaaaggcatcttccctgaaatggaacggtatggtaaggaagaattcgaccacgtgcttcattgcatcagctcgttcattgatgattttaccttcaaggtacgcaattcccgataccggggagacatcctgaaaaggactatcagtaacgactgcctgaaagtgttcaacctgggtgacgagaaagtgatactgaccgtctccttcaccccgctggaaacatgaaaccaacaatatgacagatatggataaaatacagaaagacaatgcggagccgggcaaagccccggacaaaatgagcgccgacaagctgcatctgttcgccacccagtacgcctttatcgacggacggctgcacgaggccgagcaagccatgctgaaattcatgctggagttcctggcacaatatggccgcgtatcactcggccttacagaagaggaggaactcgatgacaacaacttccccgtcacgacaaccttgtacgggaagcacgacacgccccgtatcaagcttaccgatgtctacctgacggatgacggggaatatctccttgctgacggaatagatgcggagaccggggaaaaacgggacggattctatatctacagcgaacaatacgccgatatcttccagttcgtcggccacgcttcggagatgaactgacgaatgaggaacaaccataaaacgaaatatcaatggactgtatcaaagatttacaagacgccatccgcaacattctcgtgaacaacggccttacggaactctgtctgggagagcctgacgaactggacgatcccacctatatcatctggtatgacaggcactgtgagcctcacgaagacccggtattgaaggtttaccttgaaaatgagggcattgccgttgaggtcgaagcccgcagtttcgggaacacgataaccgtctacgattatgacatagaccgtattgaatggtggaaaggcattcatgccaatattctggaagtgctggagcgtgacggcaagcgccggtgtccggcctgtggcaggacggtcaaggggaagcagcggtattgcggtgccggatgccgtgatttcatgactcccggaccgacagtggagcaggtcgcggaaaaagccaaccggaatatccgcaaactggcaagccttgccgccggaaaagacaaggcgtaccggaagcggctgatagagaaatataccgtcggtccgtcataagccggctttgttacactaaaaaatgtatgatattatggcaacaagaaccatttacctgaccgtacggctcgatatcgacaacccgaaggctgatgaaataacggacgaagaggttgacgaaattatcagcgaagtggactatgaattcaaaaattacggggactatgaaatcgacacggaaatctgcgggaaaaatgacgaaggtggtctttagacgctatcccgacggacaggtcatcgccctgttcccggacataccgtggagcggacggcggggtgaaataacctcctacatgcatgtcggccagcatggcgcagccgactatgcgggcgtgatcgccatgacacggccagcccatgaaaaggagtaccgcaacccgctttccgaactgagagccatcggttacgatgacctacacatcatgcggcgtgcaagaccgaaattcataaacagctaaaaacaaatcttatgtctcataaaccgaatgccgttcctgtcttgcaggagggaacggtctatacaattatacttgacaacggacgaaaggtccacgacgtaatctatcatgcctgtgtcgcctccggcaagtcgtatttcgccaaaggcgataagacctatcccgccgaaaaggtgcggaaccattcaatcaccggacatgccgcatcggacggctctagaaggaacggcacacccaatcccgaccgcttcgccatcacggatgaagtgtgcgaggtcgttgatgtagttaccacgccggaaaccaatccggaaatgttccggtgtcgtgtcaaatgcctgatgtattcaggcctgtcacaagccgaggctgagaaagtcatcgcttcaacgccactaaagctggaactcttctacgacgtaggccgtggcagtttcgctattgacgccgaggcagttggcaacacaccgctgtataatccttacacgggaaaggaaatcccggatgaaacctaagccgaactacatcgaatatgagagaactatatatcaagaatctctgcatcgagattacccgacgttgcaacatgcgctgtacccattgcatgcggggagatgccgaatccgtggatatccctttgaaacatataagcaacctgctgcggcatgtcaggcatattcaccatttcaacatcacgggcggcgagccgtcgcttaacgtccgggccatccgccatatcctcgaacgggtacgcgcctacggtattactgtcaatgacttttatatcgtaaccaacggctctgccacatcccgttcggaggaattcatagaagcctgcgccgcactgtacgagtaccaggaggaaaaggaacaggactccggccacatgctcgaaatgagcgacgaccgcttccatgatccggcagagcatgccgccacgctcgcggcactttccccgtatccctttttcggagtccggggacaggccgagcgtatcttccttttccgggaaggccgcagcacggaggggtttccgaaccctgttcatgggatttatcttacggaggagaactacgtttacggcgacctctgtctcaatgctgaaggcatggttctctccaacggggacctgagttatgcccgccaacgggaacatgccctgtgtccctgcgggaaactgatgcaatatctccggatgaccttgaaaaagcgtcaaaaagaaagattgtacgaataaatacacaaatcaaaaaacttatgtcaatcgtatgcagtatctgcggcggcactggagtgaaatgtaccgccgtcatcgacccgaacaccagacagttcctcgaatttacccgcaacgccttgtcggacggccggtgcagccagtgcggcaacgttgccctgaccgaccctgacgaagtaaaagccgggctggacaagctttggacggaatatacggcgcggcatcgtgccgcccccaactacacctgctgcgacattgtccggcatggtgattacgacgggtgtgaaaaggcgtatatccgcatcggaggcccgtcagacgtggtcgagaagtatccggtcgtggccgtgtgccgcgacctcgaagagctcaaatcacttgcgctccctgacccgacgcgagaatttaccctcatgggaattcaagggttcgagttccacgacgtgttggaaaacaagacctacgagatcggggtggacgacctgaaaattcccgtcacgacgaaagaggtgctggacttttacccggcggaacatcggctgaaagaaacggacatcgaacaatatgccgcggcttacacggcccgtatcaaggcgtacagggagtatacccgtcagctcgacgccacactcgtgcggcggcttctcgacaaagagcggctgatgaaagtcggcgagagcgacggtttccgcttgaaactccatttcgactggtttgtcattttaaagcgggagaacgaaaggatgtacgcgcctttcaaatacgctgtaaatgcttattgtctggataatatccaaactttcgaccgtcgttatgtcacgctcgaagatgccttgctccactgcctgaacggtttcaacgagaacgcgaacattcctaaccgttacaagtccatcgggcattacctgtcggggaaatcctgacgacgggcagtgtatcgacgggttaccggaggccacgggtgctttccccttgaccggaataccgtcggaacaagtaacaatgtaaccaaagaataaaaaatatgatgaatgattataaaatcaagaacattctcgaatccctgaaagaggaggtcgagaacgggaaggtatccctgcgggaagctgctgtcgaacttcataaagccggctggacgaatttcatcgacatcgacgccacgaggaacctactgaagacccggaatgtaacggggaacggaaatgtcccgggagtttccgacatgatgggaaaataccgcgagatgaaagcggcgcacccggatgccctgtacattttccgaaacggggaatcttgtgaattgtatgaggatgatgccatcgccgcttccggcattttgggcattgccaccgccgaacgcgtcgacgggcaagggaaaggcgtcaaggaactgcggttttcttttcgtgacctggacgtgtatctccccaaactgatacgcgccggaaaccgggtggctgtctgcgaaccgaatcaaaccggttcgggcaaacgagtttgataaccattaaataacaaatattcaaaacccaaagacacatgataaagataacaacgattttcggcgaggacgccgtacgggaatatgaagagaacaatgaactgccttctgaagaatggctggcggataacgggggcgtcgtggacgagaaagagttcgagactgaggcggagtacaatgcctacatcgccggggtaaacgatgccgacggatggagtgattatcatatcatacgccaccggtcggaagaggcggacacctcgagagaggaaaatctctggctacgtctcggaattagcgtccggggcagccgggaggacatcgaaaggattctaaacggggacaccgaaacccttcggaaactgctcgatgccggacgttatgggattggcggagagacctatgtccctggttcgaccgtcgaggggtacaacgaggaccacgacacggagttcgaggaggaagacgtggagttccatttataataaaaccacaccatctgcaataatgataacagtaaaagttctactcggtaaggatactgtaagcatatacaggaaaaccggggatatctcgtcggtggagagcacggccgaatccgggggatatgtgataaccagacatttcgagaccgaagctgaatacaaagcctacgcaatggctgtggaagacctggacggacatgaagactggcagatgctggctcctgccgttacgccggaagctccgttccgcaaaggggaatttgtccggctgacagacgatgcaattaagcggatacgtgaaagtttcggggacggaccggctgactacagaaaggaaatgattttggaggtgattgcctggtgccgctatgaaggcacatggatcattgaagtccgagatatccgtgaagacgatactcaggagttcgatgccgtttttctgcgccccttgacggcacgggatctcgtggctatttccgcaccccgacacccgctatccactgcgatatatcctattcacatccgataacttaaatgatgcatgatggaaaatatattcatactgcccggaaacgaacaggaactgtttaaccggtatttagataacaacgaatacggccctctgaaagaacggctggaactggtcaggaaagccttgagcaacaagctttccccggatgaacgcaataagcacgggctgaacgtgggtgtgcatgaactgtccatggaacgtaaggaactggaaagaaagatattccaaatggcactcaaatcctttgcagaacgggtttgtgacgagcaacgcgctctttgcgaacaggggttctggcaggcaccgtgcggcaaagaggcggaatatatctcctccgctccggttccggaccttgtaacggacgtgaagcagtacaagaccatttgccgctggtgggagaagctgtccgataccaggaggctgaaggtagcggcgatgtttgcaaacgaactgggaccgatatacgggcacgacaccgaaacgctggaacggatttatagccgctggtttctactctccttagatggcaaacaacgcatctaccattcatggaccacaaacgaaaaacagacttcactatgccatacaaaagctcgggaataatcatcagcgggacacaatatgaccgcaggcagaagctcactccttttcagaaggctgaaattttccaccgttacatgacagaagctgtcagccagcgccagcttgcccgggaatacggtgtcagccgcaggctgataaccttcattgtgaacccagaaagcgaagagcggaacaaggaactgctgagagagaacaaggcaaaaggcttgtataaatatgaccggaagaaacataccgaaaatatacgcaaccaccgtcgttacaaacagagattatttcaagaaggtaaaatcatactaaaagatggatagacaatgagaatacaggagaaacaaaaagcgttggaacaggaagttatagccaacctgtgtgcgataccgaaaatgccggaaaatatgttgccccatacggtatatgtcgaggaggaaggggaagacgggtatgggcacgggataccggtatacaccatgtaccggttggaggagatacgcacggacggaagctgcacgctttacaacgcggaaagccgggagcgtttcacctgccgccacctgcatgagattaacatggactggctggtgacagtctgggaacgttatctggaactctgtgtcgagcaggatatctggaaagggaatgccgttgcattcctgaaagaccgtaccggcaaaccggaagaggaaatcatttcattcgtggaaacctcgtgggacaaatgccaggcttatacagacaacctcaaggcgtttcttggggaagataaagaccgggaaatatggatattctctttcccgctggacgaatttgaacgtgacgttccggccgggaaaatcatcgttgattacgaaaataaccccgcaacgcgggttgagaagatgataccgctggaatttacggccaacatcaatgatgaatgttttgatgaccggaacaattgggtaagagccattgaacttcccaagcaggaataataaactatttgaatcaataaatatgattacaaaagaaaacattggcaacgagacctttgagtctatgaccatcaatgacacgcctgcattgtttacggatatgcggattgaccggaatgccgttccggagggactgtacgcatacgatatccgggagtcggatgacggggaccgtctggcgaccatcgaaccgacggtgatggtaaatcatggcggaaccatcctgaccaggaaagagtttatcacggaaaaggacggctatgtacagattgacgaatacggtttcgaggactccatgacactggaagagtggcttgaggaaaacaattaaatgtataaaggatatggatattaaggaactgacagaaagatatcgggatcgtttcgatgcccattacctgcaagacgataacggaaccggcagaaaaggtcggaaacggaaaaaggaagttgagaccccgaattttctcaaggatgtcatccggccgatcctggacactttgccggacttgttgccggagtacgggttcaccaaaactacggatgattacgccatgtacggcgagtattaccgtatcaaggcgggtatcgtcctcgtgggaggtttttccatcgatgaggattttaacctgtacttcacgccattgttccatggcaaagcctgcggtaagagtcaaaaaatcgacagcatcggacaactcgttgaaatcatccgcgaacaatttgaaagaagggaggtgaagatgaaaggatagtttcatgcaatagacatgggtcgttccgtaatttattgtatatttgtcagatgaagaaagtctgtatatgtatttcggacgaaagcccggcagttgaacggattacaggcactttcatgtttggctgacatcaaacctaatatatctatttgatatgaaaaaggaagagattattcgccgctgttacggcggcatgaaggaaaggcatggcgtggaaaccatcatccttttccatgtcggagattcattcgaggcgtattttgatgatgccgaaacgattacccggatcacggaagtgccccggttcaagatgacggcggcgggtatacctgccatcaggatttccgacgccgccttggaagaatgtagaaaccggttgctggatgcaggatgcaaggtatgcgtgtccgaggtccggggggtatccggccgccacattctcaaaatcaatgaaacaaatacggaaacgggccgatgaattggtattgatagcggcagcaataggtccttggacactgttggtggtagcggtattaatcatcggaacgctgaaatgctgtctgaccacggactcggacagcattgacgaaagtatcaacaaatcaccggggatagtcgcgcatgtcatggtactggacagtacggataatggttttcgggtggtttatgcgacggctgagccggtaacggatgaaaggtttgccgagatatgcgacaggccgggtattctggaggggttcgagaacctgaaacggaaagctcccgaacactttggcggcaacctgctggaaaccgacatctgtgacttcgcgttgtacgcctaccggtttcctatcgataaggacgtacggatacacaatatctttgtcgccggtaaagagaaaatggacttctatgtccggaacaacccggacctgcccgggtgcgctacatggatgcaccacggtacggaacaagggaaccaatatctgaatgctgacgatataaatcactgtatacccaacggaaggcggatttaccgttattggaaatgccgttatctactgcaaacttctgatactgacgagcgtttcagtcattttacagaggaggaaaggctgtactgaatgcagccttttctctatatatattacac

SEQ ID NO: 4 - DNA, 34099 bp, Butyricimonas faecihominis
attatagtattagaactatttatttcaaattaaatagctctttttatactagagaaggtgcagggatatactagcgaaatgacgaggaatccccggtatatgtatttttacatgaatagtaaaaagaaaaatagcgggttcagtctttcttttaaacgttgaaatgccttctgtttttggcttttaaccgttgagagggaaatgccgagttgtgaggcaatttcattttcttttttcccggccaagtgtaatttgaatatttccttacagcgttccggcaattggtcgatgacgttgaagaaaatacggtagatctcttcttccatgacttggaaaacttccgattcgtctgatattgattctccttgccggtaattgatgtaatttaattctgctttttgatgtttcaggtggttgatcgaacgattccggataaataaatagataaacgaatgaaatgcggagatagaatcaaaatacgtgtctttttcccacaatagagtcattaaatcctgtacaatgtcttcggcaacttcctgtctgacatagtgcatggcgtacatgaccaaagatgcatagtaatctttgaagagcatttggaaagcttcctctttttttcggtttagcgctttgatgaactgctcgttcgtgtgcatggtgatgtaacgtttaattctcttcgcgttaaaaataggaaattaaaaaggaaataacaaactgaggaatgagatgaaggggcagttcaaaaagtcaattttcaaactccctcccggcttcgccgtactccctctataaacagagggagagttgagatactcccagtctacgggaagagtcaccagctcctcctctgtttatagaggaggtggcacgaagtgacggaggagttttttttataaaatagacttttgggataaccccttctcgttataaattttatctcattttattgttcgtgtactttgtgatcagtgtgttccgaagttgtacgtaggtttgcatgatcgtgtcggcacattcctgcgtgtatttattgagtaattctgtcgctttcttgggatttttcttttgcaaggcgataaactctttctcgatctctgcgttacgttcgaagaaggattgttccatgggagcccgtgcggcttccaaatcctttttcccatcctgccagttcaagtagagtaagttatcgacaaaatcaatggcccagcgagcggaattgtcggagtattctttggggttatacgtggaatagacttccgggatgcgggtcacgccggtgaagatgggcaggtaaggtgacgtgtaggcgttatcttggaaaacccagtatattccaccgatttcccggggaaggtccgagcggagctgggcaaccataccgtattccccgtcaacccgtgctactaggcgtctgcgggtagtcttcattaatttttgcgtttcactggatgggaaaggggtagccagtttacttttcaccatgttcccgttcttgtccggataataccaaacggcgtcattctctttgtcatagatggttcccgagaacgtggaacgttgaaagtccatgaagtctttcacggaaactttttgctccggtttaaaggagaacgggtacacgctaagcggttccacgtattggatatactggtttaagttatcaaacgggttattggtacgtctggacgggatcgggtcaagagagggggcgaaggtgttgacgaataaccaaaaacggtttgtggcccattctctgggagtcggggcataaacatcctgccaaacgaaaggtttgccgcttgccggggaataccagccgttttcaatggctacctgctggtagttggaagaggcacggaattgttccggttttgaaagatctatttctttaatgatgctccagttgggaatcatggcgatttcatcgtccggcacccgttgagcggcccagatcacacccggcttaccactttccggggtccagtttttaccgacactgaaaagttcgagaacccatactccttccgggtccgcaatcgtgagacattctgattccggcccgcaagaggggaggaacccgtatttttccatgagcgaggtgatgagggttagggcctcttctgccgttttgcagcgttgtaaggcaaaaatcatggcttgttccacggtcatgatctgtttcccttctcctttgtttacttgtaattcgggacgttggctcgtggtgctttccccgatacagagttggtactcgttgatgtgagagtaagcggattggaaatacgtgtaggtttgctcaacttgcgggatgtaacctaagatttccccgttgtcatccaagggaaggtcaactcgctgtatgccgtaatacacgggagccatgcttcctttggggaatttttggcccgccacgacccggatgcgacaatccgcaccggcatccgtgtgtgaatttaaaacactaccgtcgaccgtggcttttttgccggccacgatgatcgtgcaggcttttcctgtctgtaaaaagaaaaggatagcgcttaaaataagaagaagtgtcttcatgtgtaatatgatttttttgttttgtgatttatcagagtgcaatgttgcaatatttattttaacaaaaaaattaaaagcacgaaataatacaaatttagaggtagagtatttcacctttctcggctgcttcttttatggcatcgataattgtgaataatttattgcacatcatttttggggtgaggatattccctcgcatatcttcataaatttgttctttcttgttgatatagctataaaaatagagatgttcgaattggaaaattttaaagtcagcgtttttaatatcgggaatcttgtcttttacattctgaatgttttttccgaagtcttgcattaggatattaggtatccaatgggaattttgtttttggacaattaacaggtatgatgtatcggctttttctcgtagtaaaagcatggcaagagtgtccggttgatacaaggataagagaaggttttcgggagtaggatctttgtaaaatttgtctatgtctaaatgataaaaaggcataaattctacattgtcattttttagggtggcaatttttgtaagtattatgctggaggatttggttttgccattgagagagtccgcgaaagaaactaatgattcaatgatacctttttgttttttcgttaattttttttgaggtgatggatcaattccatcataacaaatgaaactgatgacgagtaaaaattggataaatgaattcatgatttgtatgtcattttagttggttcggattgtgtaatatccggtaaaaaccagtcaaataaatacaaatataataagaagatacgagattccggtaggggtatggataaggaaaattagattttattcctcggagctttgcatctggggcgagcgtgaatatcgtgcggcgttaatttgattgaaaagaacgttcatggaatgcacgtatgcgctgtaagacattttttctcaaattctgattgtagagattaaattcttccacgtgtagattccctttgggtaaaagtacttctacgctgggaatataatatttgtcttcatcaattcctgttaccacgattgtatggatggaagggtcgatagatgcggtaaaaccttgataagaaactccggggctagcatccgttttccagttcaggggattaatacacacgatgttgtttttgaacaatggagaaattgcttccggttttgtcacgctattgaatccgatgatcacccccacgtccgtagagtctttagccattcgtagataaggataaccgtctagttcctcttgcgtgattgtgtacccgatggcgtaagatgcgactaagtgctggtagatctccggtgttatctcgtgtttcaataattcgatcacggcttttgctccttggctgtgaccggcaagaatgaaaggacgtccttgattgtaattgttccaataataacgaaaggcggctaccacgtctttataagccaattgaaaacgtttttcgatgagagccgtgtccaaagacaaccagctgtccatcgagatctgacggtaatagggagagaaaaaattgcaactgtccgacaagacatttttggccaatcgaatagacgggtctaccatttgacgctgttttgtattgaatatatccatgttatgttggatttgcccgaggctgtcggtataatcccaaatgcaagtaggtaccacgtaaaaaatatcgaccttcttgttcatgccctcttgattggcctcgaaccaacacttgctatccgagtaatccaccccgtcattcgtggaatccgaagaaattttcccgcaggagataaataaaagcaaggagcaaaaagcaaaaatatatttcaaaacagcctttcccataattttatttttgatgtaaaatttaaggcaaaaataggcatttttttcatatgtttgattgtggaataaacgttttatccagccgtggatttactcttagtttgtacgtgaattgtttctagggaataggggaaaaccaatgaatagctaatgtacattcgatgtatacgggaattaaagacgtatcaatttcgaatcaaagacgcatcaaagacactcgtgaacgtctttgatgtatctttgattcgaaagagcagggtgggagaaatagttctttcatagaatttcatcggctcattgtcggctaacattctcacagtcttatgcttttttcgaaaaaaaagatagaaatgtttggtggtgatgtataaagttactacctttgcgagccaaattgaataaaagtaactaatttaaaagtacttgtatgccaactattcaacagttagtaagaaaaggaagaacaaaaatccaggacaagagcaaggctccggctttggatgcttgcccgcaaagacgcggggtttgcgttcgtgtgtacacgacgaccccgaagaaaccgaactcagcgatgagaaaggttgccagagttagattaaccaacggaaaagaggtgaatgcctacattccgggagaaggacacaacttgcaagagcactctatcgtgttgatcagaggtggtcgtgtgaaggaccttccgggagttcgttatcacttggttcgcggtacattggatgctgctggtgtaaacggtcgtttacaaggtcgttccaaatatggtgctaagagaccgaaaaaaggtgctgctgcagctccggcaaaaggtaagaagtaaaaagattaattgacaggagttgtttatgggttgttcccgaaaagttgagtaaatggtcgtgagaccgttgaagaccggtaagggcagcgaacgaacaaattcgtaaactagaagagatgagaaaaagtaaaccaaaaaaaagaatcctgttaccggacccgaagttcaacgacgtgttggttacccggttcgttaatgatttaatggtagatggaaagaagtctatcgcgtttagaattttctatgatgcaattgacatcgtagacgagaaaatggccaagaaggaagagaaacccgcattggacatctggaagcaagctttggagaatattactccgcaagtagaggtgaagagccgtcgtgtaggtggtgcaacattccaagtaccgatggaaatcaacccgatgagaaaaagagctatctccgtgaaaaatatgatattgttctctcgcaaaagaagcggaagaaacatggcagaaaaactagctgctgaaatcatggctgcatacaaggaagaaggagcggctttcaagaagaaagaggatattcatcgtatggctgaagccaacagagcttttgcacatttcagattttaattgaagggataagataaatggcaaagagagatttacattttacaagaaacatcggtatcatggctcacattgatgccggtaaaacgacaacaactgagcgtatcctgtatttcaccggagtgaatcacaaaattggtgaaacgcatgacggtacggctaccatggactggatggtacaagagcaggagagaggtatcaccattacttctgccgctactacctgtttctggaattatcaaggtcagcaatataaagtaaatattattgacactccgggacacgttgactttaccgttgaggtggagcgttcattgcgtgtgttggacggtgctgttgcattgttctgtgccgtgggtggagttgaggcgcaatcggaaacggtttggcgtcaagcgaataaatatggtgttccgagaattgctttcgtgaacaaaatggaccgttcaggtgctgacttcttcaaagcagtacgtgagatccgtgaaaaattgcatgcgaatcctattccattacagttaccgatcggtgctgaggatggatttcagggagttatcgatttgatcgagatgaaggcttacgtgtgggagaatggtgaattggaagctacgatcaaggaaattccggagaatttgttggcagaagctcaagaatggagagagaaattggttgaggccgctgccgttcaggatgaggccttgatggagcgtttcttcgaagatcctgaatcaatcactgttgaagaattgaaagcagtggttcgtaaggccgttatcgcaatggacttctgtccggtgatgtgcggttcttcattcaagaacaaaggtgttcagaacttgttggatgccgttatcgcttacttgccgcacccgctggatattccggctgctgctggtaaaagaccgcgtacggaagaggctgtgactttcgagattgatccggaagccccgctttctgcattggcattcaagatcgcgactgacccgttcgtgggacgtttgtgctacactcgcgtttattccggaaagatcgagtctggttcatacgtgtacaacccgcgtaccgagaaaaaagaacgtatttctcgtttgttccaaatgcactcaaataaacaacagccgaaggatgtaatcgaggccggtgatatttgtgcttgcgttggatttaaagatattcgtaccggagatactctgtgtaccgaggaaaaccagatcgtgttggagagtatgactttccccgagccggtgatcggtatcgctgtcgagccgcttacacagaaagatactgataagttaggtatggctttggctaaattggctgaagaagacccgactttccgcgtaaaaacggatgaagattcaggtcagactgtcattagcggtatgggtgaacttcacttggatattatccttgaccgtctgagacgtgaattcaaggttgaatgtaatcaaggtgctccgcaggtggcttacaaagaggctattaacggaaccgttgaacatcgtcacgtgttcaagaaacaaaccggaggtcgtggtaaattcgctgacatcatctttagaatggagccggctgaagaaggcaaagaaggtttgactttcgtgaacgaggtgaaaggtggtaatattccgaaggagtttatcccttctgtagagaaaggattcaaagatgcgatggctaatggtgttttggccggttatgaacttgttagcttgaagattactttgcttgacggttcattccacccggttgactctgatgcgttgtctttcgaaatggccgctaagatcggttacaaggaggcagctcaaaaggctaagcctgtattgttggagccgatcatgaaacttgaggtggtaaccccggaagagtacatgggagatattattggtgacttgaaccgccgtcgcggacaggttgaaggaatggaatcaagagccggagctcgcgtgatcgaggctaaagtgccgctagcagagcaattcggttacgtgaccgttttgagaactttgtcttccggtcgtgcaagttcatccatggaattctcacactacgctgaagttccgaagggaattgccaaggaagtggtagagaaaaataacggtagagtagaactattataagaattttagattgctgatttacgattcaagagccatcgagaatcgtaaatcttaaatcataaatcataattaaaaacatgagccaaaaaatcagaattaagttgaaatcttacgatcacaacttggttgacaagtctgcagagaagattgtaaagacagtgaaggctaccggagcagtggtaagtggtccgattccacttcctactcacaagggaatttttactgtaaatcgctctacgttcgtgaacaaaaagagccgcgagcaattcttggtatgcacgttcaaaagattaatcgacatctacagttcaactgcaggtacgattgacgccttgatgaaacttgaattaccgagtggtgttgaagtagagattaaagtttgataacggcgaaaacctatgtcgttattaagagattgaaaacctatttttaaaaagagaaaaaaagagatgccaggtttaattggaaaaaaagtcggaatgacttccgtattcagtgccgagggaaaaagtattccatgcactgtgattgaggccggtccatgtgttgtaacccaagtaaagactatcgagaaagacggttacacagcaattcagttgggttttgatgacaaaaaagagaaaaacacaaccaaaccgctaagtggacactttaaaaaggcaggcacaactccgaaaagaaaactcgtggaattttcagggtatgatgtcgagtacaagttaggtgatgtaattgacgtgaacttgttcgaaggaacagagtacgttgatgtagtcgggactagtaaaggaaaaggtttccaaggtgttgtgaaacgccatggatttgccggagtaggagaggctactcacggtcagcacaaccgtcaaagaaaaccgggatctatcggtgcttgttctacaccgtcacgcgtgttcaaaggaatgcgtatgggtggacaaacaggtggtgacagaataacggttcagaacttggaagtgctgaaagtgatacctgaaaataatttgttattggtgaagggttctatccccggagctaaaggttcatacgtaattatcgagaagtaatggagttaagtgtattaaacattgccggacaagagacaggcaggaaggtagagttaaacgacgctatcttcgggattgagcctaacgagcacgctatttatcttgatgtaaagcagtttttagcgaacaaccgccaagggacccacaagtcaaaacaaagaaatgaaatttccggtagtacccgcaagctgaaaaagcaaaaaggtaccggtggcgcccgtgcaggtggtatcaagaaccctctgtttagaggagggggtagagtgtttggacccgtaccaagagattatagcttcaaattgaacaagaagctgaaaagattggcccgtaaatcagcattatctgtaaaagccgcttctaatgcggtgactattgtcgaggatctcaatttcgaggcaccgaaaacaaaacagatgattcagctgtttaacaacctgaaattagataaccgtaacatcctgttggttaccaatgacatgaacaataacgttctgttgtcagctcgtaacttgcaatacgtggatgtgatgagagttagcgatcttgcaacttacaatatcatgagagctaagagtctcgtgttcgttgaaagttcagtgcagggcctaaatgaaatgttcaatcttaatgaagagtaagacatgcaagtaattgtgaagcccattttgtcagagaaaatgactgcattgactgacaagcagaacagagtagcattcgttgttagcaaagcagcgaataaattagagattaagagagcagttgaagcgatgtatagcgtgaccgtgaaatctgtgaacacgatggtgtaccaaggagatgctaaatctcgttacacgaaagcaggtgttatttccggaagaaccgcttccttcaagaaagcaattgtgaccttagcagaaggtgatagtattgatttttttagcaatatttaattaagatggctgtaagaaaattaaaccctgtaactcctggtcagagacataaggtagcgattacctttgatcagttgactacagatagacctgagaaatcattgttaggaccaaagagtaaaactggtggacgtaacaacaccggtaaaatgacaatgagatatataggtggtggtcataaacaaagatacagaataatagatttcaaacgcgacaaggataatgttccggctcgtgttgcaacgatcgagtacgatcccaatcgtacggcgagaattgctctattagtgtatgcagatggagaaaaacgttacatcgtggcaccggacggtttgcaagttggtcaaaccgtgatgagtggtgcaggtgttgctccggaagttggaaatgcattgttcttatctgaaatcccattaggtacaatcattcataacatcgagttaagaccgcaacaaggagccgtgatggctcgtagcgccggttcttacgctcagttagtagcaagagaagggaaatacgcttcaatcaagttaccttctggtgaagtccgtatggtgctgttaacctgtcgtgcaactgttggtacggtgtcaaactccgaccacgcactggaacgttcaggtaaagcaggtcgtactcgctggttaggccgcagacctcgcgtgagaggtgtcgtaatgaacccggttgatcacccgatgggtggtggtgaaggccgcgcttcaggaggacatcctcgttcaagaaaaggcttgttggctaagggttacaagactagagctcctaagaaacactctagcaagtatatcatagaaagaaggaaaaaataactgattaattattgatgttatgagtcgttcgttaaaaaaaggcccttttattgatttcaagttagagagaaaagtattggtaatgaatgagtccaataagaaatcggttgttaaaacctgggctcgtcgttccatgatctctccggacttcgtagggcacactatcgctgtacacaacggtaataaatttatcccggtatttgtgactgaaaatatggtaggtcataaattgggggaattcgcgccgacacgtacatttagaggccatgctgataaaaagaaaaagtaatgcatggtaaagttgaactaaagaagatgtattaaaatgggtgcaagaaaaagattaagagcaaatcagaataaagaagccaaaaaagagaaggcttttgcaattcttcgcgattgtcctacatctcctcaaaaaatgagattggtggcagacttgatccgcggagtagatgtacagaaagctttggatatgcttaaattttgtcctaaagaagctgctcgtagagttgaaaagttgttgctttcagcaattgctaactgggaacaaaagaacgagggtaaacgtgttgacgaagcctccttgttcgtgcaggaaattttcgttgacggtgcaggtatgttgaaaagacttagaccggccccgcaaggaagagctcaccggattcgtaaacgttcaaatcacgtgacgatcgtgttgggaagcaagacagctgttgaaaacattacaaaagaatagttagcatgggacagaaagttaatccaataagcaatagattaggaatcatcagaggatgggattctaactggtttggcggtaagaactatggcgataaattggtggaagattacaagatcagaaagtatctgaacgcccgtctcgctaaagcaggaatcgctaagattgttatcgagagaaccctgaagctaatcacgatcacgatcaacaccgctcgtccgggtattatcatcggtaaaggcggacaggaagttgataagttgaaagaggagctgaagaagatcaccgataaggaagttcaaattaatatcttcgagatcaaacgtcccgagttggatgccgtgatcgtaggtaataatatagctcgtcagctggaaggtcgtgtggcttaccgtagagcaatcaagatggctatcgcttctaccatgagaatgggtgcagaaggtatcaaaatcttgatttccggtcgtttgaacggtgctgaaatggcaagagccgagatctacaaagaaggtagaattccattgcacacgttccgtgctgatattgattacgctcaggctgaggcattgacgacctatggccagctgggtatcaaagtttggatttgcaagggagaagtttacggaaaacgtgagctggttccgaatgcattggttggcgctcagaaagagaacaacaaccgtccgaacaatgccggcaaaaaaggcggtttcaaaaagagaaaaaaatagtcttttaacttttaaatagatcaagagctatgttacagccaaaaaggactaaatacagaagatcgcagaaagggagaatgagagggaatgcccaaagaggacatgaacttgcatttggatctttcgggatcaaggcgttggagaacatgtggatcgaacaacgccagattgaggcagcccgtgttgcagtaacccgttacatgcaaagacagggtcagatatggattcgtatatttccagataaacctattactaagaaacccgctgaggttcgtatgggtaagggtaagggatctccagaaggattcgttgctcctgttactccgggtcgtattcttttcgaagcagatggagtaccgtatgcaatcgctaaggaggcattgcgcctggcagcacaaaagctacccatcgctactaagttcgtggttagacgtgattacactgagtagtcgtgagactattttgaatttcgaaacgaaaaattgtaagagaaatgaaaacatcagagattaaagatttaaccactgaagagataaaagaaaagatcgagacagaaaaagctgccttgaccaagatgaagatgaaccatgctgtttctccacttgagaacccgatgttaatccggacgacaagaagaaacatcgctagattgatgacggagttacgcaaacgtgaattaaataagtagtagaaaaatggaaagaaatcttagaaaagagcgtaccggtcttgtggtaagcaacaagatggacaaatctatcacggttgccgttcattttaaggagaaacacccgatttacgggaagttcgtcaacaagaccaagaagttcactgctcacgatgagaaaaatgaatgtaacatcggggatacagtgagaattatggagacccgtcctttgagtaaaaccaagagatggagattagttgaaatcattgaaagagctaagtaatcatgatacaacaagagagtagattgaccgtagccgacaacagcggcgctagagaagtgctttgtatccgtgttcttggtggaaccaagaaaagatatgcacgcgtgggcgataaaatcgttgttgccgtgaagaatgccatcccgaacggtgacgtaaaaaaaggttcagttagtaaggcagtggtagttcgtgtaagtaaagagtacagacgtccggacggatcttatatccgctttgatgacaatgcttgcgtgttattgaacaacgcgggtgaaatgagaggaactcgtatcttcggacctgttgccagagaagttcgtgagggttataccaagattgtgtcattagcccccgaggtactttaagattttagatttatgattttggattgtagattgtataatcgaatttcttgaatcataagtcgtaaatcataaatcataaataatttatacgatgagcaagaagtttcatataaagaaaggtgacttagttcaggtaaatgcaggagaagacagagggaagcagggaaaagtacttgaaatgattccggacaagcaaagagctattgttgagggtatcaatttggtaagcaaacataccaaacccaacgcaactcacccgcaaggaggaattatcaagaaggaagctcctattcacatttccaacttgaacgtggtcgatccggttacgggaaaaccgacaaaggtaggacgtagacggaatgccgaaggaaaattagtaagatacgctaagaaatccggacaggaattgaaatagtaaaataaataattgcaggttgtcccagagcaacttgcaattattaatttaaatttgtagctttgcagccgcaaatttaatgtaatatgccgtgaggcatgataaccaaataattataaatgaaatacgtaccaaattacaaaacaaagtataacgaagaaattgtaccgactttgatgaaggagttcggatacaagtcagttatgcaggcacccagattggagaagatagtaatcaatcagggcgtgggatcatccattcaggataagaaaatccttgagttttcaatgaacgagatcgcgaccatcaccggtcagaaacccgttgcttgtaaatcaaccaaggacgtttctaactttaaattgcgtaaaggaatgccgattggcgttagagtaaccttgcgtaaagaacgtatgtatgaatttttagaaagacttattgtttccgcgcttccgcgtatccgtgacttcaaaggaattaacaataagcttgatggaagaggaaattacacattaggaatagaagagcagatcattttcccggaaatcgtgttggacagtgttcacaagatcatgggtatgaatgtaacgtttgtaacttcggctaataccgacgaagaggcttttgctcttctaagagaatttggattaccatttaaaaagaactaaaaaaaagcaaaatggcaaaagaatcaatgaaggcccgtgaggtaaagcgtgcaaaattggtagaaaagtacgccgcaaaacgagctaaattaaaagaggaaggagactatattggattaagccttctgcctaagaattcaagtcgcgttcgtttgcacaacagatgcaaattgacgggaagaccgagagggtacatgagacaatttggtataagcagaattcaattccgcgaaatggcatctgccggacttatacctggagttaaaaaggctagttggtaatatttaaaatttgaagagatgacagatccaatagcagatttcctgactcgtattaggaatgcagtaaaagcaggtcataaagttgtggatatccccgggtcaaaaatgaaacgggaaatgaccaaaattttaaaagaaaaaggatatatcctgaattataaattcgagcaagatggtgttagaagcaacattaaaattgctttgaaatatcatcctgaaacgaaggctcccgccattaggacattgacacgtgtttcaaaaccgggtctgagacgttacacgaacgtagaggatatgcctcgcgtgttaaacggattaggtatcgcgattttgtcaacgtcattaggcgtaatgtctgataaagaagctcgccaaaagaatgttggtggagaagtattgtgttatgtttattaataaaaagggcggaaaatgtcacgaataggaaaattaccaatagatataccacaaggggttacagttactgtaaatcctgataacacggtcgtagttaaaggtcctaagggagaactttctcaggacgtacacgcagatatgatcgtgaaagtggaaggagctcacgttgttgtagagcgtccgtcagaagataaagctcataaagccatgcacggtttatatcgttccttgattcacaacatggttgtaggtgtttctgaaggttacacgatcaaacaagagttggtcggagtaggttacagagcaaatgctgaaggtcaagttcttgaattgggattaggttattcacacggaatcttcatggtgttaccgaacgaagtgaaagtgagtgtgcttaatgaaaaacgtgctaacccgattatcacgctggaaagctgcgataaacaattgatcggtcaggtagcggctaagattcgttcattccgtaaaccggagccgtataaaggtaaaggtattaaatttgtgggtgaagttcttcgtcgtaaggctggtaaatcagctaaagtttaatcacctgtaaaaaagtaatgttatggctttaactaaggtagaaagaagaataagaataaagagaagaatacgtaaagtaatcttcggaacagctgagagaccccgtttgtccgtataccgttcaaacacgcaaatttctgctcagttgattgatgataatgccggaaaaactctggtatcggcatcttctttatgcaaggagatcgctgaaaagaaaggtaacaagacagaacaggcccaattgttgggtgccatgcttgctgaaaaggcaaaagcagccgggattaccgctgttgtgtttgacagaaacgggtatttatatcacggaagagtgaaagcattagcagatgcagctcgtaacggtggtcttaatttttaaaagtaggcaagaatggaacagaagattaatagtgcagacttggaattgaaagacagattggtggctatcaaccgtgtaacgaaagttaccaagggaggtagaacattcagtttctctgctatcgtggttgtaggcgatgaaaacggtaccgtgggttacgggttaggtaaagctaacgaggtaactactgctattgcaaaaggcgttgaggccgcgaagaagaacttgattaaagtacctgtattgaaaggaactcttcctcacgagcaagaagctaaatatagtggtgcaactgtattcatgcgtcccgcttcttccggtaccgggctggtagccggaggtgctatgcgtgccgtgttggaaagtgcaggagtgaaagacgtgttggcaaaatctaaaggatcatccaaccctcataacttggtaaaagcaactttcgctgctttgaagttattgagagatcctcgcatgattgctcaacagagaggaattagtcttgacaaagtgtttaacggataaactggaataacgatggcaaagattaaaattacattggtaagaagtagaattggtagtgataaacgtcaagttgctactttgaacgcactgggcctcgggaaagtgaacagcagtgttgaacacgaaacttcaccgcaaatcatgggaatggttgctaaagtgcaacatctcgtgcgcgtggaggaagtaaagtaattgttaaacctatttaaagagtatacaatggatttaagtagcttaaaaccggctgccggatcaactcacagagaaaagagaattggtcgtggtcaaggttccggaaaaggaggtacttctacaagagggcacaaaggagccaaatcaagatcaggttataaatctaagattggttttgaaggtggacagatgcctttgcagagacgtgtaccgaaatttggctttaaaaatataaacagagtagaatataaagctatcaatgtagggatgcttcaggctctggctgaaagagataatcttaccgtgatcgaccgggatgtattgattcaagccgggttaatgtctaagaacgatcttcttaaggtattaggtgacggagcgttaactgctaagcttgaggtgaaagctgatgctttctccactaaagcggtagccgctatcgaggctgttggcggaacagtggttaaattgtaagattaaaaatttgggagtttaaagttgtttttaaaatagaattactatttttgaagcaactttaacaaaatcccaaatcaatgccttaaaagaaagaacttatgaagttatttgatacattaaagaacatttggaaaatagaagagctcaagactaggattcttactacgcttgggcttattctcgtttacaggttaggaacagagatcgtactgccgggtatcgaccctcatggtttgcaggctctgaaagatcagacatccagcggagtgttaggcttgttggatatgttctcaggaggtgcattctcgaacgcgtcggtatttgcgttaggtattatgccctacatctccgcgtccatcgttgtgcagttattgggaattgcggttccttatttccagcgcttacagaaggaaggcgagagcggtagacgtaagattaaccagattacgcggtacctcacattagttatcctggtattacaaggttcggcgtatcttacaaacttgaaagctcaggtaccggcagaggcttttgtatctactggtttttggcaattccagctcccgtccatcgtgatcatggctgcaggttcaatgtttgtcctgtggttgggagagagaattactgataagggaattggtaacggtgtgtccatcatcatcatgatcggtatcatcgctcgtttaccattcgctttcattgcagagttaacttccagagtttctcaacaaggaggaggtttggtagcgttcttgatcgagttgattatattattcttggtattctgcggatcaatcctgcttgtacagggaacacgtaaagtgcctgtacagtatgccaagagaatcgtgggtaacaaacaatacggtggcgttcgtcaatacattccgttgaagatcaacgcggccggggttatgcctatcatcttcgctcaggctatcatgttattgcctatttctttgattaactatgcaaattcggaatcattatccggttttgctgcagcattttcaaacttcactggattctggtataacttcacgttctttatcatgattgtcgcgtttacttatttctacacggctatcacggtgaatccgatgcaaatgtctgaggatatgaagaagaacggtggatttattccgggtgtaaaaccgggaagaaaaacgatggagttcctcgataccattatgtctagaatcacacttcctggatctatattcttgggaattgtagcaattcttccggctttcgcccagatctcgggtgttaaccaccagtttgctcagttctacggaggtacgtctttgttgattttggttggtgtagtgttggatacattacaacaaatcgaatcacacttgttgatgcgtcactatgacgggttgatgaaatcgggacgtattaaaggtaaaaatcctggaggacctgctgcatattaagaaaataaattgtacttttgcggcatgatttttttaaagacacaggaggagattgagttattgcgggaaagcaaccaattagtaggaaggactttgggtgaagtgtccaaacacatttgcccgggtatttcgactttagagttggataagatcgctgaggattttattcgttcgaatggtggcattcccggatttctcgggtatggagggttcccgaacacgctttgtatttcagtgaatgacgaagtggttcatgggattccgtcctctcgtcgtttagaggaaggtgatgtcgtatccgttgattgcggggttgtgaagaatggtttttatggggatagcgcctatacttttgctgtcggggagattagtgatgaagtgaaaaagcttttacaagtgacaaaagatagcttgtacaaagggatagagcaggctgttgcgggaatgaggataggagatattggttatgccgtgcagtcgtatgccgaagcgaacggattctctgttgtcagagagctggtcggtcatggcgtgggaaagaacttgcatgaagaacctcaagtgccgaattacggacggagagggcagggatgtaaattgaagatcggaatggtgatcgctattgaacccatgattaacttgggcgcccgtaacgttttccagatggcagacgggtggacgataaagacaagagatcatctgccagccgcacatttcgagcatacgttggctattcggaaaggagaagctgatattttgtcgacatttgaatatatagaagacaggaaattgtaaaaattgaattatggcgaaacagccttcgatagagcaagatggagtaataacggaagcattgtcaaatgctatgtttcgtgttgaactggaaaacgggcatatcataacggcccacatttcggggaagatgcgaatgcactatataaagatacttccgggagataaggtgagagtggatatgtccccttacgatctcacgaaaggtaggataacatttagatataaaaattaaattgttgagcaatgaaggtaagagcatctgttaagaagcgtagtgctgattgcaagcttgtaagaagaaaaggcgtcttgtacgtcatttgcaaaaagaacccgaagtttaaacaacgtcagggttgattattaatttagtaaaaagagtaaaaaagatttatggcaagaatcgttggtgtagatttgccctcaaataagagaggggagatagctctgacctatatctatggtataggtagaagtagtgccaggaccatattagaaaaggccggcatcgattttgacactaaggtgaaggattggaatgacgatcaactagctgctgtacgtaatgtcatcaatggtgggtacaaagtagaaggagagttgagaacttctgtccaaatgaacattaagcgactgatggatattggttgctacagaggaatcagacatcgtatcggtcttccggtaagaggacaaagtacgaagaacaatgcccgtacgagaaagggtaaaaagaaaactgttgctaacaagaagaaagcaactaaataattgattagagattgaattatggcaaagaagtctacatcaaacaagaaacggctagttaaagttgaagccgtgggacaagcacacgttcattcctcttttaataacatcattatctcgttgactaattcaagcggacaagtcatctcttggtcatcagcaggtaagatgggatttagaggatcaaagaaaaacactccttatgcagcccagacggcagctaccgattgtggtaaagttgctttcgatttggggatgagaaaagttaaggtatatgtcaagggaccgggtaacggtagagaatcagcaattcgtgctattcacgcttgcggaatcgaagttgccgagatcattgatgttacgccacttccgcacaatggatgtcgtcctcccaaacggagaagagtctaatgtaattttaaattgtaaattgtaaattgtaaaatttgagattcgaacgatttgaagaatcgcgacaatttaaaatttaaaatctaaaatttaaaatcataataaaatggctagatatacaggacctaagtctaagatagcaagaaaatttggtgagcccatttttggaccggataaagcgttagaacatcgtaattaccctcccggacaacacggtatcgctcatcgtagaaagaaaatctctgagtacggtactcagttgaaagaaaaacaaaaagcaaaatatacttacggtttgttggaaagacaattccgtatcttattcgagaaagctgaaagtagtaagggagtaaccggtgaggtattacttcaattactggaatgtcgtttggataacgtggtttatcgtttaggaatcgctcctacccgtgcggctgcccgtcagtttgtttctcacagacacatcaccatcaacggtcacgtatgtaacattccttcatgtcacgttcgtccgggagatgttgttgctgtaagagagaaatctaaggcactggaagtgattaacgaatcattgagaggaaatagaagtagcagatactcttggttagagtgggatgctgcagctatgagtggtaaattacttaatgttccggaaagagcagatattccagagaacattaaggagcagttaatcgtagagttgtattctaagtagtaaaataaaaatatatatggcaatattagctttccagaaaccggacaaagtaatcatgcttgaatcaacggatagattcggtaaattcgaattccgcccgttggagccaggttacggcatcactattggtaatccactacgcagaatcttgttgtcttctttggaaggctttgcgattaccggtattaaaattcaaggtgtagatcatgagtttgcgacaatccctggtgtcatcgaagatgtgaccgagattatcttgaacttgaaacaggttcggttgaaaagaaaagtggaggacgtggagaatgaaaagttgaccgttaccgtttctggacaagagacgtttactgccggtgatatgaatcaattcctgaaagggtttgaagttttgaacccggaattggtaatctgcaacatggatacttccacgagcctaagtatggagttgaccattcaaaaaggacgcggttatgttcctgcttcagagaatatgcctgcagatgccgagattggtgtaattcctatcgatgctatttacacgccgattaaaaacgtgaaatacgagattgagaactaccgtgtagagggaaaaaccgactatgaacgtttggttttcgacatcgagacggatggttctattaatcccaccgatgcgttgaaagaggctgctaaaatcttgatccatcacttcatgttgttctctgacgagaaaattactctcgaaacggaggataaatatggaaacgaagagtttgatgaagaggtattgcacatgcgtcagctgttgaagacaaaactcgtggacatggatctttccgtgcgtgcgttgaattgtttgaagtcagctgaggttgaaactctgggtgagcttgtccaatttaacaagaatgatttgttgaagttcagaaacttcggtaagaaatccttgactgagttggaagcccttttggagaacaataaccttgaattcggtatggatgttgccaagtataaattagacaaagaataagtaaaatgagacataataagaaaattaaccatttaggtagaactagttctcacagacatgctctactttctaatatggcttgttctttgattcttcacaagagaatccaaacgacactagctaaagctaaggccctgaaggtctatgttgagccgcttttgacgaaagccaaaaacgacacgactcactctagaagaaccgtcttctcttaccttcgtcgcaaagaagttgttgctgaaatgttcggtgacgttgcacagaaaattgctaatcgtccgggaggatatacccgtattttgaaattgggtaaccgtttgggtgataacgctgaaatgtgtatgattgagttggtggattataacacgacttatactgaagtgaagaaagaagaggctaagaaaacgactcgtcgtagaagaccttctgctaagaaagaggctgctcctgccgctaccgaggaaactcaggtggctgaggctcctgtaacggaagaagctccgaaagctgaataaagtattattccagataaaaaataaccccgggcaatacgtccggggttattttttaggggaacgaatgtttgaccgtaggaagaaaactaaaaaaaggtagggagaaaattatttccttgttattagaggatccgatgttgagtgccacgactgttgcgacacggatcgggatttcgtcgaaagcggtagaaaaacattttgcccggctcaaagctgacggaatactccgcagaatcgggccggacaaaggtggacgttgggaagtgataattaaaaattaaaactcttcttccatcatgttcatctcttccgaagggcgctgttgcttttgcttggaagctttcatgtttccgaagttatagcttaacgtgaaacggaaaaccccgccttttctccaactatcactatcttgtttaaacccgttaccggaagtgatgctgtgccaactacgggaattcaaaatgtcctgcacgcttatgctaaagtttattttccggtcaaagaaaaacttccgggctcccagatctaagcggtagcttgcctcccggtggccttgggcaataatctgtttggagttgtagcttccggtagcctgtaacgagatggcgtacggtagcatggcattggcaatgattttacctgtccaggagaagttatcgtcccgttctcccgtaactggggtgtctgcacctgccgggaggtaagaaaagccttccagttcgttataatagaaattcaaggttgttgtaaagtccaagaatttcagtagtttgttttttgccacgatttcggctccagcagaagaagattgtgtaatgttagctgacgtacttttcatgacatctccttcccggtaacgaatacgttggatcacgtcatccgtgttccggtagtaggtggagacggatagcgtgtgtttttcccaagtcttgatataattcaactcgaaggaattggaatattccggggaaaggtaaggattaccgaacgagatattaagcgaatcggtcatgttcatgaatgggttcaattgccagcctctggggcgtgaaattcgtcgggtatagttgacctgtatttcatgatttttcgggagactgtatgagagaaacaagctggggaataaactgaaatagtcgtctttataaggaatggccgtggcctcggtttctctgtatcccagtgatttggtctccgtgtccgtgtattctccccgtaagcctagttgcaacccgaagttattcactttcgtggagaacgtggcgtataaggcttggatatttcggtcgtaagagtatttgttatataataactcgtcaaaagcggcagttgcctctgtttcgccggaataggtttccacgggacttttttggctgctgagcgtacctttataacctgcttctaacttactctcttccgtgaattgattcacgtagtccgcttgaaattcccagctttgtgagcggttgtcactttcctgttgttgccaagaggaggtttctttattctccgggtagagagaatgttgtttgtatgtactggtcccgtcagaaacccataagtcccaagaggcacgggccacgagattgcttttttcgctgaattcgtgcttgtagtcgaggttgatatttccccctttcgaggagttatctgaatcgctgatgcgttcgctgctggtgaaggatccgggaacatcactttcgtaacggatggtgttgttggaatttcggttcccgaaatgtccgaatccttcaattccgatatggtcggtctgggtgagatgtagtgttaggcctgcccgggtgaagagcgaaccgccatcccgatcattccagcctttctgattcaggtaggagatcggattaccttggtcatctagattgatgcggtcggtgtaatcctttccttcggatttccgttggcggtagccgacattaaggtaagattcgattttgccgctactgtaattgatactcccgctggcattatacccgcccaaaatgtctgccccgacttggaagctaccgtaatatccggctttccggttttttttcaagatgatattaatgataccggaagtcccttccggactgaattttgccgaagggtttgtaatcaattctatacgctcgatgctttcggcaggaatttgctccagaatttgggcttggttgtccgcagacaagcctgatgccttaccgttgatccagatcgttacgcttgagtttcctcgtaaggagatttcgccctcgttgtctacctctaccgagggaatattttcaagtagttcgctggctgatcccccggcttgggaaatattggattccacgtcaaagacttttttgtcgatttcgaatctcatttgagcccgttgcccgacaacctgtatctcgtcgatcacttggctgtcttcttccaaaaggatgtttttcacgttcacgtttcttgctgtcggcgagatcgtgaattctttttccacggatttgtaaccgataaacgaggcggtgagcgtgtaagtcccgtttttcactctgttgatacggaaaactccggttgaatcactgactgttccggttaacggggtttgagttcccgtggctcggatactcacgttgacaaactctaagggtctcttcgttttagcatctataattcgtcctctgacacttcccgtttgggcaaaagccgatagggcaaacaacgtgaagaagatagctaaaacagcttcttttactttactcatatacactttatacacaattgaacattccgttgaagaatggatgggttttggtcccaagtcaaatcttcgcactactaagacaaatcttacttggaaaagtttattttcgaaacaaaagtttatgacaaggaactttataaactaaatcatgtgacttttccaattgttttacgtatcttagtcacaacaatttatttacgaacttttaaagttaagaggaatgtatattacagaagttatcggaagagaagtgttggattcaagaggaaatccgaccgtagaagtagatgttattctggaatgtggggcgatgggccgtgctgcggttccgtccggagcgtccacgggagaacatgaagcactggaattgcgtgatggagacaagaaaagatatggcggtaagggtgtgaccaaagccgtaaataatgtaaatacggtgattgccgatgccttgttgggaatgaacgtgaccgatcaggtagggattgaccgtgttttattggaattggacggtacgccgaccaagagtaatttaggtgccaatgcattattaggagtgtcattggcttgtgcgaaagctgccgctaacgcattggaaatgccgttatatcgttacatcggaggtgtgaatgcgaaagtgttgccagtgccgatgatgaatattattaacgggggatctcattctgacgccccgattgcctttcaggagtttatgattcgtccggttggggcagaatctttccgtgaggctttgcggatgggagcggaggtttttcatagtttgaagaaagttcttcacgaccgcgggttgagtacggccgtgggtgacgagggtggttttgctcccgcgttgaaaggaacggaagatgctttgggatctattattaaagccattgaggttgccgggtacaaggcaggtgaggatgtgatgatcgggttggattgcgcctcttctgaattttatcaggatggggtttacgattattctaaatttgaaggagcgacgggcgcaaagcgttcttcagccgagcaggtagcttatctggaagaattgatttcccgttacccgatcgattctatcgaggacggtatgagtgagaacgattgggaaggctggaaattactgacagagcgtatcggggaccgttgccagttagtgggagatgatttgttcgtgacaaacgtgcaatatttgaagaaaggtattgaaatgggatgcgctaattccattttaatcaaggtaaaccagattggtacattaactgaaacgttggacgcaattgatatggctcaccgtgccggctacacgtcggtgacctctcatcgttccggggaaacagaggatgcaactatcgcggatattgcggtggcaaccaattccgggcagatcaagacaggatcattaagccgttctgaccgcatggcaaaatacaatcaattacttcggatcgaggaagaattaggtgataatgctcagttccacggacggaaattcagcaagtaattgaaatttgttttatagggaaaaagactcttgtgacaattgttataggagtcttttctttttgggcaggataatatgcttaatttttcttatatttgtattacaaaatcttaaaaacaaatttatgaaaaagtatgtagctgaaatgattggtaccatggtacttgtgcttatggggtgtggtagtgctgttattgccggagcagaaatcggtttcttgggaattgctttcgctttcggtttgtctgtggtggcaatggcgtatgctattggtggtatttccggatgtcatattaatccggccattacattaggtgttttcttgacggggcgaatgagcggaaaggatgctgggatgtacatgttatttcaggtgataggtgcttttatcggttcggcgattctttacgtgatttcttccgggatggggttggaaggaacgggggcaaatatgtatggagaaggaaatatggttccggcttttgtggcggagttggtgtttacctttatctttatccttgttgttctagggtccacgagtgctaacgctcctaccggattcgcgggattagcaattggtttatctttggttttgatccatattgtatgtattcctgtgacagggacttcggttaatccggctcgaagtattgctcccgctatttttgaaggtggtaatgctttaagtcagttgtggttgtttattatcgccccatttttaggcgctatcctcgctgccggagtctggaaatattttgaatgtcagaaatgcaaataaatagatatgaagatggggatttggttgagtccccatttttattctgattcttcctcttcttttttgggtttaccttccacgatcatgacgatttctcccttcaccccgttttcggtgaaatgattgattagttctttcaacgtaccccgttggaaatcttcgaaaagtttactgatctcgcgggcgacacaggcgtggcggttttccccgaagaattcggccatctgctcgagggcttttaccagacggaagggggattcgtagaatatcatcgtgcgttcctcttcggcgagggtcatgagtttcttttggcgtccttttttttggggtaggaatccttcaaaacaaaagcggtcgcagggaaggcccgagtttacaagtgcgggaacaaatgccgtagctcccggcaggcattcggtttcaatgccttgctcgatgcaagtgcgcacgagcaggaatcccgggtcggagataccgggtgtccctgcgtcactgattaaggccacgtcctccccccgggcaatgcgctcggcaatacggttcacttgctggtgttcgttgaatttgtgatgagagagtaggggagtgttgatctcgtagtgttttaacaattttgcggaagtgcgggtatcttcggcgaggacgagaggtacttcttttaatatacgaagtgctcttaacgtgatgtcttcaagattacctactggggtcgggatcagatataatttagccatattaattgaaaattgaaaattgaaaattgaaaattgaaaattgaaaatgaatttcgatcttcaataggttacaggggcaaaggtagggaataaagtatttacatgtatggacgggagagttttatttattcatatggaataagacggtattgtgtttatttacagtggattgatgtcgtgtacgagaccaaattgctggagatgtaaaaaaaaaatcacgttttctttggtaggaatgaaatttgccgtatatttgcaaccgctaaagcaaaagatggtccgttcgtctaggggctaggacgcaagattctcattcttgtaacacgggttcgattcccgtacggactactaaggcaaaagcaaatgtttaacgatggtccgttcgtctaggggttaggacgcaagattttcattcttgtaacacgagttcgattctcgtacggactaccgagattttagtgggttttatggtccgttcgtctaggggttaggacgcaagattttcattcttgtaacacgagttcgattctcgtacggactacaaagttgaattaaattaatttgtagagatggcaaatcatcaatcatcagaaaaaagaataaggcagactgaaaaaagaagattacacaatcgttattacgcaaagactgctagaaatgccgttagaaagctacgtgcaatgaccgaaaaggagactgcagcagacttgttgccgaaagtttcggctatgttggataaattagcaaaaaaacatattatccacaagaacaaagcagctaacttgaagtctagcttggctttacatgtgaataaattgtaattttactatcttaagatattgaggtaacaaacgattgtttgttacctttatttctatgtgtcggttgatcttgagaaattacttctcgagattttttttattgctaaaaaatagctacattgccagctataaagagaaagttatggttggaaattatatcccaatttcctcgtgggcggaagacgataagccccgggaaaagatgttgctgaaaggtgttgctgcactttcaacaaacgagttactcgcaattttaattcgttcagggagtggaggagaatctgcattagatttgtctcgccggattttgacggatgccagtaatgatttgaatgtgttggctcgtctttctgtatcggattttatgaatcgctacaaaggagttgggatggcgaaagctgcctcaatcattgctgccatggaattgggacgccgccgggcgttgtcgacagctagggaggaaccggcgttgacgaccagcagggatttgtacgattatcttcagcctttgattggagatctggatcatgaggaattttgggtggtcaccttgtcaagcgcttgtcggattaagtcatgcgatcgcttgttttcaggaggaatagagagtacgattattgatattcgtatgatattccggaaagtgttggaatcaaaagcttgttccatcgtgatagctcataatcatcccagcggtaatgatcgtccgagtttccacgatattactttgacaaagaaggtgcaggaggctggacgggtattagacatcacgttgctggatcatatcgtcgtttgccctgatcggtattatagttttgcggacaatgggatgctttaatctcattaagtgctgaaaagttgaatcggaagaatatcttttactatctttgtggcagctatttgtgtcacattggcactcgtgatgcttgtcaatgtggcatattgacggttggcagggattttgcttggaaagagtagcttaaaatgtttattcataaaaaaattatatacgatatggcagaagagaagagatcgactcaagaaaacgagtttgaagagtcacagacgaacgacacggagaaagaagaagtgaattcagaaaaacatcagggagaagctcacaaaaagaaagaagataagtcttgccgaaaagaggacaagcaattggaagagttgggacagaaactgatcgagatgaatgataaatacttacgtctgtctgcggagttcgataattaccggaaacgtaccttgaaggaaaaaatggagttaaccaagagtgccggggaacaattgttaagtaatattttacccgtggtggataacttcgaacgtgccttgaagagtatgagtacggcgaaggatgtggcagctcttaaagaaggagtggatttgatctatgctaattttaagtcttttctgacacagaatggcgtgaaagaaatcgaaactgaaaatgctgattttgacacggatattcacgaggcggtaacaacaattccggctccgactccggagttaaagggtaaagtgttggattgtatcgagaagggatattacttgaatgacaaggtgatgcgttttgcaaaagtggttgttggtgaataatatatagttgcgtggtaatggaaaagagagattattatgaggtgttgggggtatctaaaagtgctgatgccactgagatcaagaaagcatatcgaaaactggctttgaagtatcacccggataaaaatccgggtgacaaggaggccgaggaaaaatttaaagaagccgctgaagcatacgatgtgctgagtaacgaagagaagcgacgtcgttatgatcagttcggtcacgccggagtaggtggagccggacaaggaggttttggtggcggcatgagtatggatgatattttctctcaattcggggatattttcggaagtttcggtggctttagtggtttcggaggttttggtggtggccgtagtgcccgccgagtaaaccggggaacgaacctgagagtgaaggtgaaaatgaaccttcaggaaattgctaccgggattgagaagaaaatcaaggtaaagaaatatgtggcttgtcagcattgtaatggaacgggagcaaaggatggaaaatcctattccacttgttcgacctgtaaaggatcggggcaagtgacccgggtacaaaatacgatactgggagcgatgcaaaccacttccacgtgtccgacttgcgagggcgaaggaaagattatcaatgaaaaatgtactttctgtaatggggagggcgtgttgatgtcggaagaggtgatttctatcaatattccggcaggagtgggtgaagggatgcaattgtctttgagtggtaaaggaaatgcggctcgtcgcggtggtgtgaacggagacttgatcgtgttgatagaagaagaagagcatccggagttggtaagagatgggaatgatttattatacaatgtgtttatcgggtacccagaagccgtgttaggggaaacggttgagattccgaccatcgaagggaaagtgaaagtgaagattgaggcaggtacccagccgggtaaaatattgcgtttgcgaggaaaaggattgcctgatgtgaacggttacggtaaaggggatttgttggcgaaggtgaacgtgtggattccgaagaacttgtcgaaggacgagaagaaactcgtggaaaagatgaaagaggcggaaggctttaagccgggaagtggtgacaagaaaagtatcttctccaagatgaaagatttttttgattagaaatataatatatgattacactgacacaattagaatatgttgttgcggtcgatgaattccggcattttgcaacagccgccgacaagtgtttcgtgacacagccgacactgagtatgcaaattaaaaagctggaagatgatctgggtgtaatcattttcgatcggagccggcaaccggttgtgcctaccgacatcggttacaagttgatcgaacaggcaagaattgtgctggcctcgactcaaagaataaaagagattattaatgaagagaaacaggaggtagcgggatccttgaaaataggtattattcccacgctggctccttatttattaccgatattcatcggggattatattcgtcgttatcccggggtacaggtggaagtggaagaattaatttcggaggagattatccgacgactgaaacatgacacgctggatgtgggagtatttgtgaccccttatcatgacgataagattgtggaacagcccgtgttttacgaggagatgatgatctacgctcaccccgatcatgaacttttgaaaaagaaaaacgtagaaacacaagatattgcaactcctgagttatggatgttaggagacggacattgtttccgggatcaagtggtgaacttgtgtgaaatacgtggaacgctgcataagaatttgccttttgattttgagagtaattctttagaaaccttaatgaagattgtggaccgggaaggaggatttaccttgattcctgaattggccacgttatacatgacggaggaaaagaaaaagcaagttcgttctttcacggtgtccaaacctttacgggaagtcagtgtgatatattcccgtcatttcacgaaacagaagttgattgatttgctttgtgaagatatacgacaagtggttcccccgggaatgttgaaaaaagagaggggaaaaatcgttgaatggaaaaagataagataaatgtaatacccgaatatatggatagtatcaagaaaagttttttggaggcgcagcaagtgttagctgatttcgtggcggatgaggagaagttgaaacaagtcggattggcggcagagatattatcccgggtattgaaaaacgggggtaaggtcataagttgtggaaatggtggttccatgagtgatgccatgcatttcgccgaggaacttaccggacgtttcaggggagaccgtcctgcactaccggcaatggcaatttccgatccgactcacttgacctgcgtggccaatgatttcgggtttgagtatgtgttttcccgttacgtggaggcacacgggaaagcgggtgatgtgctattggcaatcagtacttccggtaattcagagaacattgtgaaagccgttgatgcggctcaccgcaagggtatgttggtgatcgggttaaccggtaaggatggcggtaaaatgaagaatatgtgtgacgtgaatatttgtgttccttggagcgggtattccgatcggattcaggagattcacatcaaggtgattcatatcctgattgagcaaatcgaggcacatctgttctcggaacaataaagaggtgtat

SEQ ID NO: 5 - DNA, 30441 bp, Butyricimonas faecihominis
atcctgtaactaaaatatttgcatttctctttggaaaaatgagaaaaaatggaggatctcatattttaatagaaaagaataatgctaaatatagaatcttatgggaattatagacaaagaaagtgccatgaacttggcattgggtgtatctacaacaaatccttctgatgaagaaagcgttttgcttatgtcattaggaggtatagaagacaataaaaaagagttggagcgtcttcgggttatctatcaaaagtttgctgatgatctaaaggcgattcaagataaggcaaaccgggagattatggaattgcaagttactcaacttcggacatcagtggagggtgagattgtacgtattcgagaatcaatgacgatcgtccggaatgaagagacggccagtattgaggctttgcgggataagatgttgaaattacctcagggatgggaggtaatttgggcggttgtaggtcagttaacgacaaaaaatactgaggatttgattacgactttgaaaaaagaagtagagcagttggctttagcagggaaactgactgcagatacaaaaaaggagttattggaaaaattgaataaagttgttttaccagtagaagatgagggaccttttaaaagattgaaagattcaatgtcggatttgtttagaagtatggggagtggggttgaaatgactaaaggtaaatgggagaaactgggaaaatcccttggcgaatgctccgccattgctactcaagctttatctggtattagtcaaataggaggggcttttgggatgagtaaggaggcgcaggcaactttcgatcaggttagcgggatggtttccgggatggggaatatggcgaaagggttggtgtcaggtgatgtttcgagtataattagcgggggagtggggatgatcacgagtgccacgaaattgttcgatttcaaaacgaagaaagcggataaagagatcaaaaagcacgcggagaacctgaagaaattaaagacggaatatgatgggttggcccgggctgcaagtcaagcattgggtacggaagagtacgaaacgaaggtggatcagattgctaatttggaaaagcagaaaattgaagtcgaggggcagttaagggcggaggatagtaagaagaggaagaaaaaagataaggggaaaatagaggagtataaaaaggcgatcactagcttggagaatcagatcgcggattcgaaacaaaatattatcgatgaattgatgacgactgatttgaagtcatttgcttcccagttgggttcaactctggtggatgccttctcgcagggaaccgaaggtattgacgctatcatgcagggcaaggttgataccttgattaagaatatgcttgcaaaacaattgtcgatgaagttaattcaaaaatcgttacaacctgtgttcgatgcggcggagaggtttacagccgaggaatcggaggaaggagttaatttcagtaccggggagatccggcaaatcaagggacttttagagtcgagtatgtcctcgatcagtgcccagagcaaagagtgggtgcagatgatgaccgatatggggctggtggtgaacaaggatatgtcgagtcgggtgcaggaggtgaccgggcaattgcaggcggctatgacggaaggtacggcgagtcagctcgtgggactttggaacatgacggcctcggacgtgcgggccatccgggattggttgttgacggggactgtgaccgtaccggaatctccttttaacatgacgcaaatgatcgagttacagaacgagatcgcggtgaatacccgagtaaccgcccaaagcacgacagccacgatgcacgaacttggacgggtgaaccagcacttggaatcaatcgaccggaacacgagggggtatgcggggagggggagatgaaagataaaaactaaaagataaagactaaaagatgaaagataaaggaaatttagaatgaaaaagattccgtgattgccgattcgatgattgggtgattaaaatcacttaatcgaaaatcattaaatcacttaatcgataggatctaaaatttaaaatctaaaatttaaaattaatatggtgtttttaaaggaagaattgttggcgggagccgggttggtacagggatgtgctgacgggatggcgcaactggcggcggcgggggataaggaggagatgttgcagtgctattgggatcggatagatttttgtctggcgaagaatttcccgacaaaggagtatttgaaggagcattttgacgggatgttacacgagagaggaatttatattgacgaacgggtggagattgcggggggaaatgccgtgttgctggggacgtgcgaggcggagtgtggcgtggagaagtacgcggtgagccgcctgtacgtgaagcatgattcgcgggtggtgattcgggcgagggatcatgctttcgtgatggtggatgcgctggatgatgcggcggtagaggtgcattgcgagggcgagtcgaaagtggtggtgaacctgtacgcccgggccacggcggtggcggacggggacggttacgcgaaggtggtacataaaaacaaggaaacgtatgatttataagtttgatacgattgatgtgaccgcttacggcgtgttgcccatgcggggtgatggtggcgtggcggtgagcgggttgttcgatttcccgaagcgcaagggggagatcgagcggaactggggcgacggggtggaaccttatcttgacgggaaggacttggaatatgacgggcggacgatcgggttgaagttcgtgatggcggatgcggcgaacatggagcgtttccgggaggcggcagtggcttgtcggcgattggggacggagttggggaatttcgacgtggtgatggcggatgaggttggcgtggaacgggtggacgacaagttgctgaaactcgatctgaagtttcgggagccgcacgtggagttcgaggagttgacccttgcgggaagcggggacgggaatatcagggtggacgacttcaatctggcccgggatttcggaataacggtgacggcggtgaaaggcgacctgaaagtcccgaaacggatagaggtaagcacgacggccccttacctgaacacggctttccgggaaaatccggcgctctcgctagagtgcgtgatgcgggcagggaatttgaaggaagttggggcgaggatgaggcagttccatgccttgtggcggctgcccggggttcgggtgttgcgtttggcgaacggacgggagcgaggcgtgttcgtgaaggacggttttagcgtgagtatcgtgagtgacggggtggtgaaatttactttaaacgtgatagaatatgatcgaaatttatcggaagatcaataaggaagagacgctcgtggcgagtgtcccggatgacaacgccacgttggaaagaacgttgatgggggcggacgaggtgacgttgagcgtgaccgtgagcgagccgctcgatcttcgggtgggcgattatgcccgcttggagggtagtagttacacgatcaaccgggcgcccgacctcgtgaaggcctcggcggtggagttccggtatgacttggtgttggaaagtcccctgtacaatttgctggacaagatttatatctcggacgtgcagggactgagccgcttctcgttgtcggggacgttgaacgatttcgtggagcttttgctgatgaatattaaccgggacgatttcgacccggggtggacgtgggccacggacaagggcgatcacccggtgacggtggtgacggagcggaagaatctcagtttcgacaacacgacgtgccgggatgtgctgaaccgcttggcggacgagttcggggtggaatacgtggttcgtgaccggacgatcgcgttctacgaacgggtggaaaacgccacgagcctcgtgttcgagcagggacgggggaaagggctttacacgttgcaacggcagaacgtggataccgacaacacggtgacccgggcatacgtttacggtagcacggaaaatctaccggttggctaccggaaaggactggtggagcgtctctgtccccgggaacgggattcggataaatatatcccttatttcgagaaccgggaggagtacccgaaactggtggaacgggaggtctatttcgacgacgtgaaaccctcgttcacggggagcgtggacacgatcggggaggacgggttgacattgacctgtaatgccattgatttcagcttgaaagaggtggtcatcggcaaggagggacgggtgaacttcctgtcgggtgacctgacggggaaggcgttctctttcacgtgtgacggtgggttggtgcggacgttgaagctgatcccgcaggaggacgagatggcccctgcgggggacgatgggaaacgatcgatgatccccaacgccacgtggcgggtgcaggtgggcgacaagttcacgttcacggggatcacgttgccggaggcgtatgtccgcacggcggaggcgttgctggcggagaaaggacgcaagtggatacgggcgcattcgagtttgcgggtgaagtataacctagatgtagattaccgctacgtgcgggagaaggggatcgtgttcaacccgggggatgtcgtggggattgttgttcccgggatggagacggtgcagcgattgcggctgacctcggtgaaaaagcagttgcacacgggtaagctgacgtgcgaggtgtcgaattacctagaggtgagcctagaggatgccttgacggcgaagatccaagaggtgaagagcagtatagaactggaccggagcgaggtgttgaatgccgttaacgccacgcgggagtggacgacccgtaatttcggacggttggccgacgagatgaccgacggggaggccatcgtgtgggatgcggacgggtggcagatcaagacggtggcccaagtgcctgatgccgcaagatggaacacgcatacgttcgacgactatatggatcaagccgtgaagacggggagtgacgtggtgttcaagaacctggaagtcgggacattcatccccgggatgatcggcggcagcggggtgaggatggacgagaacgggtacgccgagatgacgggattgacgttgcgggagttccttgaagtgccggaattgcggtttaaccgggtggatgtggtcagcggggagttgtggaactccatcgcctacggcacggtggagagcgtggacacggcaaaccgggtggtgaccctgaaattagaagaaggggaattggcggggctgcacgtgaatgatatttgccggggaatattccataacctcacagggaatgctgacgggaaccgggtggactgttgcgggttcctgacgatggccgggttttcgacggtttatttcacgccgacggagatcgtggggaacgggaagttccgctacgagttgaaacccggcacgagcgtgcatccctgcccggcgatgaagtttgccgtgtacgggaatttcacggacaagacccggcgggcttcggcctattcaacaaggacgtacaagcgttacctgacgggagtggccacgtgggaggtcgatcccgaacggaacattgccatgcagttcggggatttgtcgggactgcacgtcgggggtgtttcgatggagggctactcggcttacctgaataatatttacatgaagggacacctagagttcacggacgggcaacgggaggaattgaaaggggagaacggttacacggtgttgttgacgacttacgacgcggtagtggcggtggacagtgaggggaagattgattcgtcgctttatgacatcgtgaacgtggtggatggggaggagctggtgaaggcggggaatgatacggtggtggtttcccggtttaagattcagacccggattcaggcgtataaggccggggcattgacttacgcggagacgcccggagagggtgagtatgcggtggcgttgacggcgaaggggtgcgagtatgttttcgcggatggcgtgttgacgatcacgaagatcatggtggacaaggccaccgtggagatcgaggtgaattgcgagggaaaagaggtcttcttgaagttgtttaccctgacgagattgtacgggggatcggatgcagtgtacatggacctgacgaacgagaatgcctcggtgacttgtgacacggagggtgtcgtgacggggagtattccgggatcaacggctaaagtgtacgtggggactgcgctggacggggcttggagtttctcgggcagtttttccggttgtacaggatcggtgaatgcttccacgggggcgatcacggtgaccgggttgacggaagatagcgggtcggtgacggtgacagcgacgaaaagggggtacgcctcgttgacggccgtgtacagcctgtcgaaagcctacccgggaccaaacggggaacccgccgtggtttacagcgtgcgcccttctgcggacgtgatcgttaaggataaaacgggaacattcactcccgcctcgatcagttgcgagaagttgaagcagatcggcaattccgccccgtacgtcaccacggagaaaacattgaagtaccagctatcggacggcaacctgaccgactacacgggtgcggtaagcgtgggcagtgccacttggatcgaattcacgctctacgagggtagcacggtgctggatcgggaacgggtgccggtgattgcggacgggaaggatgggattgatgcgaatttgttggattggattgaggagtggaacgggaacaaaaccgatgtcgggagagaattaatcatttctccccggatggttgccgggaaaaaagagagtagtggcaaatttaccggggtgatgtttggccgggatatgatagaggttaatggagtgatgcagacgggattattcggaatgaagaatggtgatttaaccttttccatagatgctcaaacgggagatgcttttttcggtggaactgtccttgttcgaaaagatgctaagaattatgtgacaatgaattacaaggatgcgaacgattggggattgaaaggagttgttaatggtaacgaggataagcctgtttttcaacttgggagtacgaatcaaattggggaatttatgattgaaggcggcttcctcaggggaaaatgtgtgctacttaccaattcaaatatcaggtttgaccgggatgatggtgcggtggtgaatattggagctcttcccggagagggtttaggaggagcgcctgttctaggctatttaaaggacgggaagggttctgcccctgaatttgatgctacgaactccgtggcgttgtttctcggaagtcaatattataaaccttacgggagtcttgacagttatgcgaagtacgccttgtatgctcaagggatgagtatgttgcatagtgtatctacacgagttattgacggaacgttcgatggtggtatgtcagattggaattggcgagtgtttttacatcataattcaaaatttattgacacgacgttggatgcaagtaaaggctatagcgggcagttaatcacggtggtaaatagcaattacgataaccaaaacttgattgtgagaggcttttatcagttccggaacgatggtagcgtaattgatgatgcggtggagattacagatggtggggcggaggtgagttttgtgaaatataagggaaagtggtttttcctcggaaggtctgggaatgttaagttttaaggagcgcagtttgaaataaaataaaaaaagtgtgaaatgataatggagtttttaaaaacgggagatttttcaatgatcttgacaagggtgtacgttatccttgcgatgtgggcgatcatgtgtatcggggtttgtatggacttgtgggcgggggtgaatagtgctagggctaggggagaagtgataaactcgggtgggttccggcggacgatcgggaaactgggggattattggcggatacaggtgatggcgttgatttttgacgtgatcgggagttgtatcccgtggtatgaatatccttatgcctcgatgatcgtgacggcggcgatcgtgctgatcgagggacggagcgtgtgggagaacgagcgggcgaaaaagggaaacgtggcgaagttgccggcagcgatccgggatattatcaattgcacgacggcgaagagtgccgaggagttgttgaaaaagataaaagaactggatgatggacaaaaggcaacttaggaacttgattcgacgagtactgatcgggatcggggggtactcggaggaggcggaaaacttgctgatggggacggcagcccaagagtcggcattgggtgaatatatccgtcagttggggaacggtccggccttggggattttccagatggaaccggagacttttgatgacatcgtgcggaactatttgtcgtatcggccggatttgtgccggaaagtgctgatcgtatccggcgtgatcaatttgaaaagtgaatacttggaatataatctggcactggcaatcagcatgacccggatgcactacgcccgggttcgggaaaagattccctcggacctgacgggatgggcggggtactggaaacggttttacaataccccgcaaggcaaaggtacggaagaggaattcgtgtataattataaacaatacgtgttatagatatgggaacattagatataaagaattttccggctcatggcgtgtcggatgaagatacttttttgatgacggatgcgaagaacgggtttgtggcggggagcatgacgttgaaggatatgaaagagaaggttattaccccgttactcaaggccttatcactggattacgagttgttgactcaagcggaatatgacgctatcgggaaaaagaaagaagggacattgtatgctatcgaggaagacgggaaactggtaaggacatatatcggctcgttgcccctgacggtgggaggcacgctgggaagtttggataacgtggacgaggaggcggatcatgccggaagcgaggacgtggtgctgatgcgggcgaaaggaagcgggacgtggacactgaaacgcctgtcggaaatcggcggcgggggtgggggaaccggggtgcaacgtaatgtccggatcgtgaataatttggatagcaagaatatttcggccagcaagggagagccttgctggttgaatttcaccttcgtaagtcaagaacggtacgcagattccgagccgtacgaggacaccggggagcggggactactgcaaatatcggtgaggaacggggatcattcggattatttggtcgtgaaacaggtatacgtgaatagtgcttccccggtggcccttgacgtggccgagtttttgagttcgggagccaataacgtgatgatcaaggtgacgggggaggttacggaaatcacgacacccgcttttgtttataccgttcaactgacggcgttgtctatttttgccgataatttccggtggtggacagcttactcgggggcaattatcttgccgttgaatatcgggggaaatatcgcgaagacgttgcacgtttcaatgtcgggaaaagattataacgagtcgtacgaggtggcgatcgggacgaacgtgtatatcgagacagcctataattacacgattcctcacccggggaagacgggggtgttccgggtgtcggcatacgtggcgaattcggacgagagtatcaagacgaagacggttgctttcaacattatttgtgctgttgccgaggagcgggtgaaactgattgccattaataacgtgttggagaaggccacgaactgggtggagaacacgttgttcgattacgccatgtacgacggggatagcgtgagtacgtttgcccggttcgtgatcatgaaggaggggcaacaagtgttttcctcgaatgaaaacagcattgccgtgtcgaccaagcacacgttctctcttcccctagaaatagacacgttggacaacagcgagttttccatccaagtggaggtgcttgacgagtcggttgcactgacgtcaccactcgttttccccgtgaacaactcgctgggatattccgccgttgcgggggcgaccttgtacgtcaacccgcgtactcgcaataaccggcaggagaattaccgggaggtggtgaacgagatgaatgggacggcgattgctgccgggtggaagaatatgaactggggaaacgacgggtgggtaccggattcggacgggaaccgggtgttgcggctgatggcgggttcctcgctgacgatggcttattatcccttcgcgagggaatgcgcccgggtcggaaagacactggagattgattaccgggtggatcacgtgacggattactcgaaaccgatcgtgacgatttccatgcccgacggggtgtcgttcacggggctgaacatttacgcggatcagatcgtgatgcactcgcagtcgctccgggaggacagcgtgcagagcctccacacgttcgagggaaagcggacccggttcacgctgacgattctcccgatggcgtacgggaatccggattttaatctctgtatcctgtatatcaacggggttaagaaccgggagttcgcttacgaggataatgattattttgcccagagagggggcatcgtgatcggctcggactgcgcagatgtggatatatacggaatccgggaatacgattccggcctgacatcgcagggtgtgttgacgaattatatcaactggttatccgattcggcagaaaaggcccgtgtccggctgtataacgatattctggacgggaacggttcggaggtggatttcgacaacacgagggatcagtttaattgtctcgtgtttgacaacacgattccctcgatggccgaccagacagcacgggtgggtaatttggacgtgctgttcacggaccacccggaatggaacgtttcgatttccggagtcacggcgaaaggacagggtacgtcctcgatgaagtactggatatggaatacccgctaccaactggacaaggcaaaatcggtgatcactcatgccgacgggacgacaagcacgaagaagtggcagatggtgccgtggattccggcaggacagaagtttacggcgaagaagaattttgcctcctcgatgcagtcgcacaagatcgggtcggtgaatgcttataacgatttgtaccgggaagtcgggttgaggaacgaggcgatggaaacggagcaatacgcggatgcccgcgtggcggtgtaccagatgcctttcgtgtgtttcgagaagtctgtgaacgaggagggacgcacggtgtacacgttccggggattgtacacgttcgggcctgacaagggggacaagtacacgttcggtttcgacacggatttgttcccgaacctaatcagtatcgagggatcggataactcgccattatgtacgctgtttcgggtgccttggaataaaaacgtgttgtataatagtgatgaagaggctttccagtataacggggcgaatagctgggatgccggagagggtaaggtggagagtatatcgaagtttatcccggcatataatatcgtgtatgaatgttctccccgtttgttgccttttgacgggaccccggaagagttgaacgagcaggccgccgcgatgagaactcggccatgcgaattctggattgccaaggcgggagacgggagccgatttgacgtgtattatttcgaggcgtcgttgaatcgttttatcccctcggacatggggaagggggagattaatctggtcacgcaactggtggataaagggtacgggctgtcggctgccgacctgtcgggaaagacgaacgacgagttgaacacgttatttgtgaatgcccggattgccaagttcagggcggaggctccgttgtactgggacgtggatgacacgttgtttttcatgaataacgtggagtttaacgcgggaacggatgagcgggcgaagaacacgtatccttactcgttcgggacagggacgagtcgtttccgctggcgggtggacgatgcggacacccggtttgacacgacgaaccggggattgccggacaaggagtatagcgtggagacgcatgacacggatgaaaccggggcctcgatctggaacggggaaacgaataatttctttaacctgatggagttggctttcccggaggagaaggtggccagtatgcgacggatgatgacggccatgcaggcgttgggcggtttgaagtcggggaatgatctggaaaagatttacgctttctaccagaagtatttctttgacgaggcacaggagtatttcccggcaaattcatacaatgccgatgccagatattgttacgagaacgggaaactggcttatagtgccggaatttattcgaacgacacggacccgatcacgcagtcgcttggcgaccactatcaagcggagcagcgatggatcacgaaacgtatcctgtatatgatgtcaaagtatagtttcggtttgttctcggccgcgggaacggacacgatcacggtacgtgccgccggaaacacgatcacgtacgatctgaccccggcgatggacatgtatccggcaattgccaacggtacatcgattatccggggcgaacggacccgggcaggggagacttgttccatggagattgaactttccggaacgggcgaccagcagaatgcgatacagggtgcctcttatttacagaacatcggggattggtatgacaagaacgtgcaagggtccatggtgatacagggacggatgctccgggagattcgcctggggagcaagacggggcatatcgtgatctcgatcacgtcgttgacaatttcgaattgcacgtcgttgcaaaaactcgtgttgtcgaatattgctacgttgagtggtacgttgaacctaacttcctgcacgcacttgcaagaggtgtatgctgacggaacctccctttcgcagatgaaacttccgacgggtggtagtatgcgggtgatcgagtttagtccccgcaatcagtacctgtcactgtcgaactacccgttgctcccgacggagggagtcaggatggatcaatgtaagcatattatcacggactttttcgtggaggattgtccgttacttcacccggtgaagttgctggtagagatgatggaggcccagaaagaacaggggacggaacacgctttgaaacgggtgcggctcgtgggatttaacgagacgtacgatagttcggatatacttgataagttggcaagtttggcagatgggagttacgagggattgagcagtgaaggaattgccggggaagacccggttccggtgctggacgggacgttgaatattcatgcggatgtttacgaggagtcgatcaatgctttacggagtaaatttaataggttggtgttgaatatcacaggaaattattatgtccggtttaaagacccggaattccaccggctggtagtgaagagatggagtacggacggggtgggtgtgactcgtaaacagttggcagccgtgacagattttcctaatgattattttaaggataataaggaaataacagacctgtctgattttgcagagaattttgtgaatgtcaatttgtttaagcaaagaacatttgaaaattgtaccggattaaagacaataagtttgcctaatgaaaagatagatacgtcagcaatagctatatttggtcatacttctttggatgaaaatggtatagatttatcttgtttaacaacattagggtttggtatatttaaaaattgtaagtttgttcatatttttattcccaatacattacttctggatatggattattctcaacaatggcaagataatttgagattacttaccatggaattggaagaaggtctttcggttgttccgaattcgttatgttctggatgtagttcattgatgaccattacttttccttccactattacaacaatcgggagtagtgtcgtacatggatgtaataatttgaaaagttttatatgtaaaccaataacacctcctgcattagtgagcgatttgggttatatatatgctgatttcaatatctatgttccggatgagtccgtggaaacatataaaatagcttggacaaaatatgagagtaaaataaaaccgatgagtcagaaaccggagaacgtgtaaaagattggattgatatgaagactctgattatatgcggcgtgatttgtttgttgttgggattctttgtcgggaggttcacgatgaaggagggggaaagaacaacctacgtgaagggtgagacgattcgagatactataacgtgctttattccggacacggttcgcttgtccggagaagtacgttataagtacaggtacaaaacagatacggtttaccgggatgttccgaccgtggaccgggaaggaacgctaaagagtacgatagaggattggaatttaattcgggattacaagaggaccttgttcgataatgaatccgggaaattagctgtggagctttccgtgcagtacaatgaactgaaacatcttacttatgcttatactcccgtgcgggaacgggttatgattgtaaaaaagagtgtgtgggtgccgtttgtttcggcatccttctacacggaaggtcatgatttgtcttttggtgggggatgtttttatcacgacttgggattccgcattgaatacaaatttgacggttttaacgtggggctgatgtataagttttgatgaaaaaacacttatactacctgcacgctttgtcccaaagcggtgatgatttctcctttggtgattttagcccgtttgcggaattcgggttctccattgcgggtaacctctccattttccacgagaatcttggccatggcaccgctgtcagcgatgcgggtggcctttagcagcttgattaattcaatgtattcggtgtctatttcaaacgtgatcatggtgtctgtattttggacgcaaaggtaaccaatttttgttgcataccgtaaagtagaaacaacttaaggagttgaatgttatttttgcgccttaaaatttagaaaataatgattagattgttttaatgatttgatcgttaagtaataatgtaaaaaagattctatgaagagattagtcattgtagtattggcttctattttgagcatgacggtttttgccgaaggataccaagtcaatttgttaagcacgaaacagaccggaatgggacacgtggggaccgggatgaaattgggtgcggagagtatgcattttaacccggcaggattggtgtttttgcgtaccaatatggatttttcactaggtatatcagctatcatggccaaggctaaatatagttacgacgggtattcggccaagacggataacccggtaggaacgccgttatacgcttacgccgggttcaagatttacgataatttggctgccggaatcagcttgaccactccttacgggaactccttgaagtggccgaagaactgggccggggcagggttgattcaggatattagcctgaaatcatacgtgattcaaccaacgctttcttacaagatcacggatcgtttgagtatcggtgtcggtttgcaactggcttggggaaacgtgaatctttctagggcattgatgggggcgagcgatttgcagggaataggaacgaaattcgagagtttactgcctaagttggcaggtgttccttcgagtataatcccggatgaggataaaaaagccatgcaggaaatggttgcattgatgaaagggacagaggttccaccggcttatgctcgtttggaaggaaatgctcacatgagagtgggttttaacgtgggaatcatgtacgatatttgtgacaaagtgaccgttggtttgtcttatcgttccaagatcaagatgcgggtgaaagaaggtgaggcttcgttgacttacgctaatcgtcgtattgaagacttgttcgctaacatggaggcattacttgcaaaatacgggccggtggtaggacaaatgggaataacgatcccgaatatctctatcccgaagtatgatcagggaacattccatgcagaattgcctttaccttccaacacgacgttgggcgtgagctatcgtcccacggatcgttgggagttggcgttggatttgcaatacgtgggatggaatgcttacgattctttgaacgtgtattttaacgaggcggaattgggaatcgcaccgattaaagcggagaaagattataagaattcaatgacttaccgtatcggggcaagctacaagacaaccgatcgtttggtgttacgtgccggagtatattatgaccaaagcccgattcgtaagaagttgtacaacccggaaactccgggaatggacaaattagggctttctgccggattgacttttgagccttacaagggattgcaatttgacgtggctttcctttacattcaagggttcagccaacacggaaagtacccgtacaagaacgtggtcacgggagcggatgaaatgttcgagggaaaatataaatccacggcattctcgccatcaataggtatttcttaccgattttaatataaggggctgttaaaaagtcaattttaaacaactacccccactaactcccccttacacagggggagttagtgggggtagttggcaaatacaggcaggactttttggacaacccctttgtttataaaccttatcgactttataaacttttatttttaaccgggaacggaacgattcaatgaaatatcacgtataactgaagataaaagttattacgtgtatggaaacaatgagcaatattcctagtaaaggaaccaaaaaacgagttgttattgtgggtggtggctttggagggttgaaattggctcgtcggttgaatgaccgggattttcaagttatattattagatcgaaataattatcaccttttccagcctttgctgtatcaggtggcaacatcgggaattgagccgagtgcgatctcttttcctttccgaaagattttcaagagacgacatgattttcatgtgcggatatgcacggcagagagggtgatcccgcaggagaaccgtttggagacttccatcggggatgtttcttatgattatttggtaattgccacaggggcaggaacgaactatttcggggatcagacgttggcacaacggacgatgcaattgaaaacgacgtcggacgctttgtttaaccggaaccggatgatcgagagtttcgagcgggcgctgaacacgtcgaatgcagaggaacggagacattggctgacgttcgtgattgtgggaggtggggccacggggatcgagttggcaggggctttggcagaaatgaggaagttcgtgttaccgaaggattacccggaactggattggaacgagatgcggattctcttggtagacgggggagaacggttgctgaacgctttttcacagaaatcttcggaggacgttattcggaatttgaaggatatgaaggtagaggtgctgttgaaaaagttcgtgaaagagtatgacggaaaaaaattgacgttcgtggatggtgaacaggttgttacgaacaacgtgttctgggtagctggggtgaaggcgagcagtctggaagggttacctcaagatatctacggtcggggaaatcgtcttctcgtggacgagttcaaccggatacaggggatggcggatatattcgcgttgggggataccgccttgatggtggcggagaactacccgaacggtcacccgcaagttgtgcagccttccatacagcaggcaagtttgttggcgaagaatttacgacacatgatcaaggggaaacccttgcgtccttttaaatacatgaacaaggggtccatggccacgatcgggaggaatgatgccgtggcagagatttccggtattcgtttcagtggattttttgcatggttattgtggctgttggttcacttgatgagtatcgtgggggtgaagaaccggttgtttatatttatcaactggatgtggagttacgtgacgtacgatcagtcattgcggttgttgataaaacccgaggtgaaaaaaagcgacccgttttgagtcgctttcttaatcatttattctcccgcgggagcggttcccacggccacgcttttactgcgttcaacagattgcagggccaagtaattggctccgaatttctccaagttgtccagttctgtttcatactgatcttggtgaacttcttcttcggcaacaagcgtttcgaatagtttcttggatacggcatccgcattggcagcacattcttgagcccaagcgttatagtcgtttacactaccttcttccatggccgtggccaattccagcatttctttcggttcgtggattttctgaacatccccggaggttttcatttccacttctcctttcaagaacaagatacgttctgaaagctgttccacgtgcatcatctcttggatggcggtacgtttgaataacccggacaacaggtcgtaacccatatcgtcacaacggaaatgaaaatacatgtactggtgtacggcaagcaattcgtcggcaactgctttgtttaataattcaatgcttttttcctttctactcataatagctaaatgttagtagttttacgattcgctaaattaagaaataaaagtggcatatcctaaattttgtcttggaattaaaaaagtgtacatttgtttaatcataaattcaagataatgaatgtttcccctaaggtgttgctggtgacaccaccgtttacgcagttgaatacaccttacccggcgatgatgtatttgaaaggttttttgaacacgaaaggagttgattccgtgcaggttgatttgagcttggaagtgattctggaaatattttcatcccgggggctgcatgagctttttcaacaggtggcagcccgggaaatccgcttgtcggacaatgcccgacgtgtttttgctttgcaagaggagtatgagcgcacaattgatgcggtcatggcttttctgcaaggaaggaaccggacgctggcttactcgatttgtgaatcctatttcctaccccgggcaagtcgtttcgaacaggaggaagatacggaatgggccttcggggtgatggggttggaggataaagcccgttacctttctaccttgtacttggaagatttgtccgatttcttgcaagagacggtggatgagcatttcggatttagtcgctacgcggagcatctggggcgttcggcctcttcttttgatgagttgaacgcggagctggcaaagcctttgactttcacggatcattacctgatacggctacttgcgggccggatgaaagagtatcgtccggaggtggtggctatcactgtcccgttccccgggaatctttatagtgctttgcgttgtggggagtggatcaaggttaattacccggaagtcacggtggtgatgggtgggggatttgccaacacggaattgcgatcgttgactgacgtgcgtttcttccgctttaccgactacttgctgttggatgacggcgagttaccgttatggcgtttgtttgaacacgtgacggggcagatcggggattccgatttggtacgcacattttgcttacgaggcgggaaggtcaagtttttgaatgatgagtcggccgtgattattccgcagaaagaagtcggcgtacccgattattccggattgttattagacaggtatgtttcggtgatcgagatcgtaaacccgatgcataagttgtggagtgacggacgatggaataaactgactctggctcacgggtgttattggggaaagtgtagtttttgtgacgggagtttggactatatccggcgttatgaaccgaatgaggtgaaaacgcttgttgaccgtatggaacaagtgatggcacagacgggggaaggtggtttccattttgttgatgaggctgcgcctcccgctttattgaaagagctggctctggaaatattgcgccgacgactgacggttgtctggtgggggaatatccgttttgaacgggcttatacacgagacctgtgccgtttactgaaggcatccggctgcattgccgtgtcgggcggggtagaggtggcgtctgaccgggtgttgggcttgatcaataaaggggtcactctggagcaactgacccgttcggccaatcatttcacggggacgggaatcatggttcacgcttacttgatgtatggtttcccgacggagacaacacaggaaactgttgattcgcttgaagtggtgcgccagttattcgagctgggatatatccattccggtttttggcatcgttttgccatgacggcacatagtccggtgggtttgtgtcccgaacgattcggaacccgggtaactgaaccgcctttcgggggctttgcccggaatgacgtggcgttcgaggatttacaaggtggtgatcatgacgaactgggggatggattaagtcgttcactatataattatatgcggggagtggggtttgatttgcctttacaaaagtggtttgactgcaagattccggcaaccacgattccgcctcgctttgtcgcacacatggcggaagaacaggaacccgtggaaaaattacattcccggcgcctatactggttaggaggtcgggtggagttggggccggagagcgtgaaaaaaggaaaatattcgatcgttttattgctacatacgaatagccgggagatggcgatcaaaatgagaggtgactgggctcattttatccacgagtcgctgatgcaggtgggagtggatgccgtgaatccttatctgctggaagactttagtcggaattacgagatcctgtttaacgatgacttcctgcctttctggtatagcaaagagatgcaggcgatccgggatcatggtttgttactgctttaaccacatccccatgaataggggttggcgggggtaaatttaatcatatatagggatttaccggtattgtcgggtgcgctatctttgtcatgtacaaaataaaataatacatcgagatgaagaaagttggaatattttatggctccacgacgggagcaaccgaaggagtggctgaaacgattgcggctcgtttgggtgttgcaagtgaagatatacataacgtgggaactacaaaagtggacgaggtcgacaagtacgatgttttgttgctgggtagttctacatggggaatcggagagttgcaggatgattggaacgatttcttggataagctgaaagcgaagaatttgtcgggtaagaccgtggcaatcttcggatgcggggattctgcctcttttggcgggtctttctgcgatgctatcggaataatttataacgagctacaaggaagtgggtgtcaatttgccggttcggtggataccgatgggtatagttacgactcttccgaggcttgtgtggatggtcagttcgtgggacttcccttggatgaatccaatgaatctgaccagactgataagagaatagatgcttggattagtggtttaaagcaagtgatctgttgagtctagttgttgtttttgatttaagaaagcgtgttaaaaggcattttaacacgctttctgcttgtaaagtctatactctccctctcttttcctcctcgtatagcaaccggatgatcccgtcagataatccgagttttgggacgatgatttcatttatcttgcatatttttcccacggtgaggaatattttcatggcgggtatgatcacgtcggcccggtaggtgttcagtttcatgatccgttcccgttcttcgaggttgaaggatttcatgtattcgtaaagaatatccagttcctgatatgtgattcgttcccgttcctttttattcagtaatttatgaatcttgttgatatttccgcccgacccgataatggcatccggggtatatttttccgtgatgtttttcaaccattttttgaagtgtttcatctcctctttgtccacggcgtcatttaacatacgcacggttcctagcggaaaagagcaagcctcgaccttgacggatttgctataaacaattacctcggtgctaccgccaccgacatccacgtataagtaggttttgtcatcatccaccacctcgttcatgcctccggcgaaaatggtttctgcctctttggtcccgctgatgatttcaatgttcaggtcacactctttttgtatctgttcggccacggatttaccgtttcgagcctctcgcatggcacaggtcgcgtatgccttgtagctttccacgttgaatgcagacatgatatacgagaatccctgcatggtttcgcataggcgttttcttttctgttgccctatttctcctgttgtgaatacgtcttctcctaaccggatgggtactcgcagaaaggctatttttttgaacagggtttccgtggggtattcttccacgttggatatgaaaagtcggattgcattcgtgccgatatcgatagcggccagtgttttcgtgtttatggtcatttttgtgtctcgttttgtgatgcgtaaaaattgtatagtgccacttgtgagcgagtttgcaggtctgtttcatccggtgaggaaggtgacacccgctgatttatgacctctaaattcaggttccgggcttttaccttgtctttccactggatggaaaatgtattttttagcgtgttcagtatggttttatcttgaatcgggataccgacttccactctgcggcttaggttgcgggtcatccagtctgcgctgagaataaatgccttttcttttcccccgttgtaaaacaagatcaggcgggcgtgttcaaggtatttatccacaatactgatagccctgatgttgtcgcttaggccttttacttcgggcatcaagcaacaggcacctcgcacgattaagcgtacacgtaccccggctttactggccttgtagagtagtccgatcatccgttcgtccgtgaggctgttacattttacgtaaatgtaagccttttttccgtctttagcgtttttgatttcgttgtcgatcaaggattcgaaacgttcccgcatgttgtagggggagaccagtagcaggtctgtatcgagttgtttgtaattattttgtaggaactcgaagacacgttccgcatcttccgccacggtccggttggcggtgaacaggctgaaatcactgtatattttggcggtgtcctcattgaaatttccggttcccacgtgtacatatccctttaattgagagccttcccgacgtttgaccaaggcgagtttgcaatggactttcagtcccggtatcccgtaaattacttttaccccggcttgtcttaatgcctcggcattgtcgatatttctggcttcgtcgaatcgggccagtaattccagtaacacgacgacctttttcccgttcttggcggcattgattagcgtgttgatgatttttgacctttcggccgtgcggtatagcgtgatgtaaattgaatccgtgtgcgggtccatggcggcttcccgcataaagtcgatgaaatggttgaacgtgtgatagggataatttaacaaaatgtcctgtttccggatcacgtcgatcacgctggaaaaaggtttaaaggctggatggcgtaacggggaaacctcttcgtattctaattttggattaattttaggaaatttcatcagatctcgcatcagatgatagcgcccgccgggggtaagattaccacttttacttagtcctaacttgtcggtgaggatgttgagcagatctccgggcatcgcttcgtcgtagacgagacgaacgggacgaccgtaaagtcttttattcaatccctgctccattttttcaacaaggcttttcgatacgtcgtcatctagtgtcagctctgcatcccgcatgaatttgaaagtgtaggccgagatctcgtcatacgagaacatgaaaaatatatcatccagacaaagacggatgatgtcatcaatgaagatgatccgggtattgtcgtttggggaaggcagtacgatgaaccggggtgagaggctgttgtgtggtatttcgatgatggcgtatcggttgttcttggtagaattcttgttgaccattttaacggcatgatagatgcgctcgtcttgcaggtaggggagccggacgctttttcttaacatcagcggaacgagtaacggactgattttctccgagaagtattgtctgcagaattgtttttcgttttcatctagagcattttcatgaaccacgtaaatatgatggctgaccatttcgtccagaatttgcgtgtaggtgttctcgaattctttttgggattcacagactttttccgacactttgcgttgtagttccagcgaggttaggtttccggagagttttttatccttttctttctttttcttgtccagccgttctaggttggcaactctcaccttgaaaaattcatcttgattgttggaatagattccgaggaaacggaggcgttgtataagcgggacgctcttatcctgggcttcctgcatgacacgttcgttaaacgaaagccaacttaattctctattgtataacatacttcatctggtataacatactgttttttacgagtacaaagtaggtgtagaattgttacattcgaatgaaaataatgttgcaataaagttacttttgcttggatggggccgtgtcgggtgtttccgggtggatctcgatgatttttcccttctcccggatatattcgtacaaggccttgtaaaacggatgggaggtgagtgtggtggcgtctcccagaatgatgagtttcatgcgggctcgggtgatggccacgttcatgcggcgcaggtcattcaggaatccaatgtttccctcgctgttggcccgtacgagactgattaggataacatcccgttcttggccttggaacccgtccacggtgtgaatcgtgatgagtttccgcaaggggataaagaagcggttccgtttgataatttgccggatatattgtacttgcacccggtaaggggatatcaacccgaaatcgattctttcatccagcactcgttcgattccgattttctcaatatattcctgtaattgttttaccaacaattcggcttcaggcttgttgattcgtccatacgtttcgttaacacaatcttccgagaactcgcagagagccgtgtcgaaccattcgatgggagtgtcgtattcgagaatattacggtggcgtacttccggagatgcctgcaaacggcctttgtagaaccatttcgagggaaagtacatgatgtcttcgtgcatccggtactgtgtttcgagcatggaaacagtttcgggtttacgctggataatcttttggagtagcgtgcgatccaacccacctttcgctgcttcgtaacatttgatggtgggaggtaactggcagtgatccccggcaagtattacccggtaggccttggatatggcaatccagcaagcagcctctaaagcttgtgcggcctcgtcgataaacaaggtggagaacattttcccgtttaattgtttattggcggaaccgaccagcgtgcaggcaatcacgcgggcctccccgaagagttgggcatcaatcttgatttccaatttgatggcttggtcccgtaaatcatgcagcatccggcgggcggattcccgtttggctcctttcaagcgtttcaggcgtccggagagttcccggatggatgctctcgcggctcgcaacgtggggtaggcaggatgggattcgaatttgcgttcgtacgtgaatgacagcatcttgtcgtttacccgtgtgggattcccgattcgtagtacattgactccccggtccagtagtttttctgcgatccagtcaacggcagtattgctttgggcgcaaaccattacttgattctcccgtcgcagtgtttcgtagacggcctcgacgagcgtggttgtttttccggttccgggagggccgtgaacaactgcaacctctttggctgccagtacccggtttaccgcttgttcctgtgaatggttcagccacatcaagtgaatcggttgaagtttccgttgttccaccatctcgtttcccagtatggcttcccgtaagcgggcaaggcggttattcttggcctccatgacttccgttagggcggaaaacatggttttataggaggtcccgtcaaaatagagttgtacgcccagatccgggcatccttgaatatccagaaggctgttggagttaggcaacacgacaagcatcgtgttttcatgaacgtaactgatggttgccgcgaaactgaaataacgcagatcccccgtttggtcaaaacggaaaaagcaaaccggacgaccgtattcgaaattatgatccgtgtcatcattctcatcccgtttgatctcgatgatgagctggtttaacgagttgtagtaacttttattcgctgacacgggataccaacaaacgccttgctgaatccgtttagggattcctgcacgttgtgtttgttggtagaatgtctctttttcaaactcgaattcctcttgcaatagtttgtattgccgcaggagatcaaccaagggggaaggtatttgttcgctagccatgttaaacgggttaccaggttaatatttcgttcccggtttccgtgattaatatggtgttttcccattgagcggaaggttgttcgtcttcggtaataaccgtccaatcattatcttcatcgatgaatatatcccgttctcccatgttaatcatcggttcgatcgtgaagatcatgcccggaacgagcagcattcccgtaccccgtcttcccacgtgttctacttccggaatctcgtggaatttcaagccgaccccgtgtccgcagaattcccggacaaccgagtacccgttactttctgcatgttcttgaataacagcgcctacgtctccgagaaaacgccaaggttgtgcggcctcgatgcctttttccagacattctttcgtgacacgcaccagtttttggcgatcttccgcaacttccccgatcatgaacatacgggatgcatctgaaaagtaaccgttgtatatagtggaaacatcaacattgataatgtctccacttcttaaaatgatattcttgtccggtattccgtgacatacctcttcgttaatggaagtacatacacttttggggaagccctcgtaattcaacggtgcggggatagccccgtgtgccaaggtaaaatcatataccaacgtgttaatatcctcggttgacattccttcccggatgttagccgccacgtgatccaacacggccgtgtttatttttgcactttcacggatgccttctatctgttccgcgttcttgataatctttcgggggggaacaatgtgaccctgacgacgatagagttttattttttcctcgatggaggatgccggtttgttttcgtttttactgaatagcatattgctgtctccttattgtaataaggcactaaggtagtgtttttagagacaggttattccgttattttgaaaattgatagttaccgagtttgtccacggagatatttaactcctttaaatccttgataaatagattataccctgtttcaagattcttccaaaaatctaatatgttaggataggcacgataggtttcgctgtaatttttattcttttcgtccgagaatttaaaaggaaagatgtacacgggtatcttttcctgaccggattgacgggcttgtatggcatagatgtatatttccttgatcttgtcgtctgtcatgggaagacagcctaccgttacgcaatttccatgaatgcagatattgcctccgaggtgggaggctttgcttttcagcttatctgaatggtttgggtagttaatcatcaaagagagatgatagttacttgtgggattaaagtggttgatgtggtagaaaccttccgggatttgtaagtctccttgatgacgtttggggccgagagagccggaacgggcacatatcttatacgttgtaatctttttatacaccttgtcttcccgtttcttggcatagatgtccatgacacattctgttttatacgccatgataagaatattcaggttgtccaacgaaaggttgtgttcttttaatcttcgggtcagtaatgcctctttttcgtggtaggcgtttcgtacccggggatatttcttttgctggctgacgaagtccggttcattgctagcgataacacataacaaggtgagcaaggctattttcatgagtccgtgtaattaggttattacaaataacggtaaaataaagggaaaaaacaaacgggcatgaaaaaaggcgtccgggaggaccccgaacaccttacctgtgtgtgttgtgtgtatatgagtgtgtgaatctaaggctactcgttgatcatcactaccaagtacttcgtttgtttccagaatgcactcgggttgttaatcttcaaagtctgcataccgtcatccccggtttccagtgcgtatgattcgctagggtgaacagaaagtattttggcttttttagtgtttaacgggatggatgtcaattcacgcatatcggcatccacgaattttgcgttttgagcttgagaggaaacgatcggcgggcagaagattccttgtcttgaaatcacgttagcctcttttaaactctttctggaacctaacaagtagtggatcgtgttgagtgatttgtcttgactggaaatcgtttccttttgggaagttgattcctcttgtaaattactcacgttttggttaagttctgctatttgttgagtcttgatacctagttccttttctttggctgctaaaatctggttgatttcgttgatcttttgatctctgatggctaactcttcgtttaatccggcaattaatttcttgaattcagcggattgtcttttgttagtcccttccagtttagcaattttttctttgtaaccggcgatagcgtcagaaagcgcttgcacgtcattttttaaagcggtaatctggcttttactcttgctgtttttcgtgtcactctgtgattcgatggccagaatgtgttcggcctcgcggatagattgcattccggcggaaatgtcattcagatctgctaaaagtttatccatttcgtcactttgtccgttgctaacggcttgtagagaatctgcttttgcttgtaaagctttatatttttgtgaactttccacgcaacttccgaggaaggcgatgaaaaacaaactgactgctaaaaaaataaacgttctcatagttttttgttttgatgttttattctatgcctaaataaaggcaatgcccgtgccattcgtgttgtaaaatgataacgtgttgaaaaacagtttgtacgtgtgtttatctgaattccacgattggggaaaattttgccccagttgtggaatttctccccaagttacctgtggaagggacttttctccaaatgatgcctgtgttggagatggtatggtcgtcccggatttttttagtagctttgccttgataccaataattgaacccatgtaccaagaatatccccctcatcccgtgttatctccttatatagacaaatattgggaggtgaaaggttcaccggaaatgggcgagaagatgaaaattttgcctgatggttgtaccgatttcatttttaacttggatgatgcgcgtaacctagaggataaaaatcggtttggcgttgatcctttacacggttatttcgtgggagcgatgaagacttactcggagttgtcggtttgtgccggatcactacacatgatcggggtcagatttactccctgcgggttgactattttcacgaaaaagcctttaggggagctgagtgggcagagacttcatttgagggacgtgggatttctttttcatgaagagttcgcctctcttttaagggagaaaagtacgctggcggaaaggttgcaagtgatcgaaacttttctgatatcccggttaaaatatgccgaagaggttgacaagcaaatcgtgtggacaaccggggtgatccgtcaggccgggggattgttgcctgttcgggagttgatgagtcgggtgtgtatatgtcaacgtcattttgaacgtcgttttaaacatgccacgggttacacgccaaaagagtatagccgggtcgtgaaatttcgtcgggcaatggatgtacttcgtcaggtttccgggaataacctcttttccgtggcggtcgattgtgggtattatgattcttctcacttggtgaaagagttcaagaaattatcgggtagttcgccgatggttttcacgtccttgccggcagatactccgatcacttatttgggggaataaaagtcgattttttacaaaagattcttttcccggaactctacttttgtatttataattaaataagatggatatatgga

SEQ ID NO: 6 - DNA, 28759 bp, Butyricimonas faecihominis
caaatacgttattccttgtttttcatccttaatttttaatttattaacaaataaaatgatgaaaaaacttttattcttacttttatttttcgctacattcgtagcttgttctgatgatgataatactgactatgacccaagtaaacacatcgacatgatcgtggtcaacgagggagcagctactacaggaagtggggctttatccgtgatttatgatgatagaagtaccacttttgacctattccaagatgtaaacaacaggcctttaggtgacatcgcccaatcaatcacctatatcaatggtaattactttgtggccctaaatggttctaaaaaagtagaaatcgtcgagcctcaaacattcaactcgattgcaactatcgtttttgaagacagcaacatatcacctcgtttcattcaaccgatcagtgcaacagaagccattgtctcctccttaggaagagaacttgcacgtatcaatataaaagattattctgttatcgaatatattgacatctcagaaacagaagccatgcaaattgaaaaaatgatcacgattgacaagaaattattctgtgcagctatcgacaaaggtattggcgtctttgacgtggataacataaaaggttcatccatgcgtctagttgaaggactacaaggtagtatcatgaaaacagccaaaccgatcctcgacaagaaccataaattatggatactaacaacagaaagtgataaagtcatcttgaatggtattaatccggaaacagagaaagtagaagataccatcgaaatcccgtacgtgaaggaaggagataaggactacgttgatgattgtatcacaggaacagattggtacacgagaatggacacagaccggacaaaaagtaaactatacttttacatgaccatcctatctgaaaaaaacagcagactcggagctattttcaccatggatgttgattctcacgaaatagctctctatcgcagacttccggatttagggatgatgtacggtatgggaatttctcctgatggtgacgtattcctctgtgattgtctggattattctagacaaagaggtttcctccgggaatacaaggagaatggtagtatcgtcagtcaacgagtaggagtatatcctagaatgattcattttaccgaatacgacaaataaataatttcccgcccatgaaatacacgctgtttctcctgttactaacacttatatccctgttcgcccagggccaacaccgtgatagtattgccatgtatggcacaattgacaccgtactcgtacaggagaaacagcttgataaggcaaaagacgctaatgccggaacacgagtcagcacgattgacatcgaaatattaaattccaaccggacaaaatccctagctgaattactttccgaaaactcggtcgtgtacatcaaaagcttgggtcaaggcgccttggcaacctcttcttttcgagggaccagttctactcacactcgtgtcaactggaatggtctcaacatcaatcctcccatggcaggttccttcaacttctcacaaattccagtcttcttcaccgacaacgtggaattacaatatggtgctggaaacgtgaaaaacggaaccggatctatcgggggaagcatcaatctatccaacgcccccatctgggacgatcagatacacacccgtgcatttgtagaaggcggttcatactccacttacacgggagcagcatccgtgcgtgtcggcaattcccgccactcattccacacgcgagcttattaccaacaatcagacaacaattacacctacacgaacaaagtactcatgaaggatcccttccgggaaaaacgaaaagaggcacaatacaaacaagccggatttatgcaagaggcttacttcaaaacttccgccaacacgatgctttctgccaacgtgtggttacaatacggtgaccgtaggttaccccaacccatcatggtaagcgtcacacaacatgaaaaacaggaagattttgacttgagaagttacattggattcgattacctttggggtaaacacaagctattcctgaaaggcgcttatttcctcagtaccctacaatatgataaatggagtgacggaacatacaaatatgccgaagaagcctttaatcgctctgtcacctaccacgtgggtgcagactatcactacaatctctcccgatttgtgaacctcaacacgaccctcaactatacccgagatcagattaaagccgctaatttttcctctgacaacatcgcccgaaacgtcatttcatggcaagcaaacttccgttggtccgcaaccccttggctgttggtcaatggtcaattcatgggagagtggaacgacggggaattcgccccgacctattccatcgggctctttgctcatttacatgaaaacgtgttaaccttaaaaggtaatgtggcatacaattatcgtttcccctcaatgaacgacctatactggcagcccggaggaaactcgaacctaaccccggagaaaggtttctcctatgacctgacactgggatatacaccccggttaggagaccccttcaccctaaaccttgacgctgccctatatttgatggacattgacggctggatcatgtggttacccacaaaagactggttctgggaacctcgtaacgtacaaaatgtgcgtagttatggagcagaattatccgccaaggcaattttccggacaaatcattttcatgctcgcctgaacatcaactataactactccccttctgtcaaccgagaacgcaatttcgatgaagacgatacctacaaaaagcaactcccttacatccccaagcacaaagcaaatgctcttttaaacatcgaatacaagaattgctttctcaactatcaaacgaactatacaggtattcgttacacgatggcagacgaatcctataaaacgaatgcctacacgatacacaatattaccataggttacaaactctctttacacaaaataaaaatcacgcctcaaattcggatagaaaatctatttgatgcctactacgagtccacgcaatattatcctatgccattgcgtaattgtttggcatccgtcatgttcgaattttaaacaagcatctattcacatcttcatttcaactcctgtaaaggccttgtcgtaaacacaatgtgagcaggaatatctcccgtttgcacatcccatttcttctttccgtcggacccgaaacaatacaacctccccggagtaacataatctccggcatcgcccacgaagatctcgcccgtttctggatttaccgccaaagcgtaaggagtcacgatagacttctcggttccgtccttgataaaattccgagaaacaatacgtttcgccttcgtgtcataaatcgtgtaattgaccgtccacttactcgtaatcttactatattctgtactgtaagaatagagcgaatcgccgcacaaataaagttcgctcgccgggaaattcaaagctccttccacgagatcattcttcgcgtttatcacgtaagtattcgaatgtacgttataataatccccgcgggaagtcacgtaaatcagtccattttggtcaacacgcatacgatgtagattaatcgccaccgtgattttcttcgtctccttaaacgtttccaagtcaatcacggacaccgtattatcgtaattcggcacacggtatcccccggagtttgcaacatacaacttattcccgacaatcaccatctcttccggttggtaccccacggtacaactccccacgactttcagcgtggccgtgtcaatcttcaccacctcacccaaacgggcattcggatctatctgtaccggtccggcatacgaactgacataagcgaatccctcatgaaaaacaatataacgacaattcgttaccgtgatcttcgtaatttccttcgccgtgttcacatccatcacctcgatcaagtgagaacaattaatcaccgcatacaatttattcccgtaaatctgaatatcattccccacgtctcccagctcctttaccacgcccggattccgctccgcgaatatattcttatgataccctccggaagcataattgaaataatccaacgtggccttattacttcccatattcccctcgttcaacaggaaaaaaccttttacaggccccggcaccgaatcgctcggggtaaccttcgttatcacggacggaataatttcatcatcatcattccgacaagaaaaaaacaataacattcccaacgcgaggaacattaacatacccaatttcattcgattttcacaatacatcattcgatctttatctaaatttctatgttgataataaacttcacgttcgtccccggcatcgggtaacactgcaccacctcgtactgttggttaaaaatattattcgcctccgccgtcagtctaattgcagtctttcgccacgagaaattcttcgataacgagaaatcactcgtgtaccactctttagccctgttctccgggatattcgcgctcgcctcgtaacgcttccccgtgtatataaaactataattcaaaaaccagctcttgtacgtcccgttcaaaatcagcgaaccactatgccaagggatataaggaatctgatctccataatacgtactctctttctttgtaaaatcctgggccttctggtatgtgtaattcacccgggcatccaacaaccaatgttgacagaacctccaattactctgcaaggctacatcaatacctcgaatttccacctctcccaaattcaccatcgtccagcgaaactggttggaagtcggcatggcaataatcttatcggacacctcgttatagtaggcgtccacctgtacgtccagcccctgcaacacccctttgtcaaagttgcgattataagtcactcccacgttatactggttcgtgtactctggttccagatttatattcccgataaaagtataatacaaatcattcaacgtcggcattcggaacacacgcttataaaaagccctcacgttaaaatccgccacacggaacggctgccacgccatcacgaccgtgggagtatattcctgcatatcatcggctgccccattcgccaccttcgtccgctcatgcacgaaagtccccaacacgcttgcctgaaatttaaaacgatcaaaatgcaaggccgttgccacggcccctaatgtcgtgtaacgggtcggatagacaaaatccaccaaatccgcattcagcttgttccactgaaaatccacggacacatccacgttccaaaaaggcaaaatggcaaacatattggctgacgaaacataaatttcgtgttgccggaaatgattattcacgtacatcgtactcacgtccaaccggggatcggaaagataatgcagaaaatcataggcatacttcgcgttcatctgtaaactataaccactaaaatgcctcaaaaaagaaccttgaaggaaaaaattagaatcccattgacgatcctgatgcttgaactttcccggctcttcccgtaccgatgctccgggataacctctttcggaatcataaaaatacgccttggccttccactccccgtcattcatccggccaaacacaccgtactctgcccgcaaggcacgaacatccccgttcttacgcacctcggttgtatcgtaaccgttctttttccggtaactgaacttgtattttcctgtcgtgtacatatactccgaactaaaagccccgctcacgtgttcccccaaccgatgttcaaacaacaccgatggattcgccaccccgaaagatcccgttttaaaagtaaccttcgcgttatatttcttcccgtctgtaaacctcggtgtacggcttgtcatgtaaatagacccggccgagccaaaatctttggcagactggaatatggcactccgctgcccgttatacaaagagatcgcctccatgttatccagtgaaaaacgtcccagatccacggtcccgttctgcgcatttcccaactcgataccatcataaaacacccccacgtgttgggtccccatcgcccggatattcacggtcttcaagcccccgattcccccgtaatccttgatctgcacccccgaaaaataacgcaaagcatccgcgacggaatgcaccgtcaacctttgtaacaccgggccttccatcgtttgaaccggaatcacctccttctgaacccgcttggcggaaacaacaacctcatcaatattgtacacctttgtcgtgtccactttttgtgcccacgaaccattcccaaacaaggaacaccataaaattacaccaaaaacgattaatttcatttactctgccattacaacgataacaaatccgatcattccatttccggcaatcgctttcatttgcaatcaccttggacccaatcattaattcaagaaagatttatttttcttgcacctcgcaaactctagtcccagagagttacgaactcatgatcttggcaggtcttctgacttgctccgtccttgaacgcccttcccatttcgtgtcgaaacagtggatgtgagtcttgttcacggactttggcggagcttacagcagcgggtctgttcaggattcgcacctgattcccttttcatcacacgcccgaaacgaggtgtgacaccaaaatcgttacgaaaatatataaaaaaacaaatactatttggattttagaacgaaaaattcaattattcacaacatttcttgcttacaaacaaaaaggaatttctatcctccccctatcgattaaaattcgaggggaagcgctcgatacctattatcatgagcacttcccctcgggcattagtttaacaaccagcttacggtttcaccaattttccagcctttgcctcctcgaaagtcgggttgtaagcattccctccaacgagccatgacatttcatcgtcaagagacccgattgccttttccaaacctttgaaagaaacaagtcctccttgtttgtgtatatcaataacatcaacacgttccaaagcagaaaaacaatccaaatccgttatcgtcgtattatattgggtctcgtcattcgccctcgaagtcatgacaagtttcccgacacgtttcaacacgggagtataaatttcctccagcatcgtggggtacatcccgttcacgaaagaagttgtgatctccatacttccggtcacctcctctaaggcagggaaacgcaaggcttcagccgcacccacataagtcatactacccaccttcttgagtttaggatattccgtgggctgcaccctcatccgtgccccctgaccttcagtcaatttcatagcattatcaacaacttcaagatcaggaagacgaatgactcccttattctcactatacccttgagtaatatttaaagtcccaagttccttcactccggagaaattatattctacacgatcagtcttcgaaaccgggacatcattaatattcaagctcccaatccagtcaaaaccaacaaaattcatcccgggaactttattcaaagtaaaagctccttcaaaagaacccttccctttcaacgtaatcacatgactggccgaaatcgtaaccgtggccgtagtcaaccccgtaagatcaagctcttgtaaagcatcaagtccgctgaaagaacaagtagtaagagaacctgtctgaagttgagccaacaaagtaaagctttccaactttttcattcctgataaagaaagttgcttgcccacggaacgtaaggccgtcaacccgttgatagccgaaatctcattcaagttactcaagaacatgttccccccgatcgtctctaaacggctgaacccggtaaaagataccgctacctgcatatcggatagtgtgaaatttcctccaaccgaagtcaaattagaaaagccatcaatcgcggtgataccagacatcgaagaaaacgtgaaatcacctcccacttctttcaacgcttgtaaagatttcatatcagtaaaaacaccactcttcaattcatacttaccgaccacggaagtcaaagcagaaagatcaagagaagctaacttgtaacaaacttcaatattcaatccccccttccccaaagtagcaagattatgcaggtcaattacttcgagatcttcaatataatacacccgaaaacctcccgcagaacgaagattcggcaggttaaattcctttacccgatgggtccattgcaacgtgatctgatcactgaccgaggtcaattgactaaaatcaaactcctcaaccacctccatcgtctcaagataaagcaccccaaccgattgcaataccgggaatgcaattttcctcgtattataaatacgtgtaagatcaagcctgttcccaacaaccgccaaagaggggaatacaatttcctctggagcaacaatattggaacttgactgccttcccatgatatagaaattagctcctaccgtcttcaacgccgaaaagtccaattccccaagcttccaagtctggacattaaaattgccactcacgctctcaagagcaggtaaattaagattataaagcgtatcggcagaaatcgtaaaatccccaccaacagcctgcaaattaggcaaattcacttctcgtacgaaacgtattccccacggcccattctcatatggccgcggagtcataacgaaccctcctgcccgttgcagattctgcaatccatcaagagaagttccccggtaagtaggattaatcgtcaccacgcccgtaacttccttcaaagccgagagagcagcaatggaagtaagcgaatcctccttcacgcttcccgccagcttaccaataacaagattcccctctattttaccaataccacgagctgcgaaagcctcaacctcctcaggggttgtcaaacggacatctccctcactagctaaaaccgttctggtaaccatatacttgtaaacccgctgattattgttataggaagtaaccgtaaaattaaacgcctctccccaattttccacttcagccggatcaggtgaaacgctggcattctcactacaaacgatctccacttttgccccctcaagagacacattttcgggaacaagaagcaacaacgtatctccggaaacaagtccggtataagtattaccatcttgaagaagacggaatgaagtaataaaattttcgtctccggaaaaaatactgtcatcatcctcgcaagagacaagtaaagccataaagcttacaacgagtatatataaaaatctattcattttcatcattcttattcttgaatatttggtttcgtccattgtccttcctccaccaactgtttataagtaggattataaagattatcctcaacctgccatttatcctccggacaagtcagcacggcagccttaatcgcggcaaaagaagcaagtttatcatgttttcggatacgtagccccccaattttctccaacgaagaaaggaaatccaaattctcccatttcgtattcttgtaattaacatcatcgttatcactcgaaacattcggtcctagtggacgcaaatcaagcgtgccaccaacctgtttaagagacgggtagagaatttccagaggaccgcgatccccgtaatacgagtatcccgtctggataatcatattcccacccacggttgccaacaaggggaaagtctcttcatcataaagatcaatactcatggttgcatcccctccaatagttgtcaacttgggaaaatgctctttcacgctcgaagaatataatttaaaattacctccaatttcctcaagatctgagagagacactggttttatgttataattcacccagtaagaaaaatccccgtttatcttacgaataccattgatttcaaccgtcccctcccgcaagctcaacgaactgatcgtcaaccattcaatttcatgaaatccttgtaatttaggcatatacccacctaaattctccaacttaataccaccattgaaacgatcatccgcgataaccgtggtagtttcaagcccggtaccggtgaatctcagttcatcaatctgaacaccccgcaaatcaacttccccgatcccattcgccaagacaagagtcttcaagcttttcaaactggaaggaaactgcaaacgctccgcactacttttaattgtaagagttccccccacactctcaagtgatgcgatattatcggaaagaatacccgccgtcgctatactgaaatctccatcaacagattgtaacaacggtaaattaaattgattcacaccggtacacgtcaagttaatacttcccgcacgggttaagacagggaatgtaatctcgtataacggattttccaaaatactcaatgcagaagcaatggtttgcaaattcggacaataaagcaacaatagagaccctttcgccacgttcaagttatcacaagaaatcaattcaggaaattccagacgcacgacaggcatattcacgctaacagaacctccaaccttatcaagagattgaaaaaccatcttctgaacagtggacttaccattcaaggaaagattaccactcacggattgcaaagccgaaaaatctgatgatacaaaaggagttgccaaagtaaggctaccacctacagactgcaatttcgggcaagaaacctccgcggcagaagcactcgtgatattaaaatcaccgcctacacgagtgaggttatccatcaccaccacccacaagctatccgctgaattgatttggagggaaccacctacctcttcgagattatccaaaccctcgaactgattccctaaatagtaacgattaaggaccacattctctgtcactttttttaaagaggaaagcgccgccagcgaagtaatcgtatccgttcctacctgacgcccgataataagactgccatcaacacgagaataccccttcgcaccaaaagcatcaacctcctcttgcgtattaagcatgatgattccctcggcagaaaaataactccgggacggaatatacatatacttccgttccaccccggaatgtgacgttacaacaaaatacatctgttgttcccagttatcaatcattgacggatcgggttttatcgtcgtgttttcactacatataacttctgcggcaagtcctgaaaaagaaacattctcaggcatattcaataaaatcgtatcaccccgaaaagacgcgacaaaaacttgatcgccctgtttaagggtaaacgaggtaataaaattgtcatctccggaaaacggatcattatcatcttcacaaccgataataaaagaaagcatgagaaaaaatccccaaagtatattcttattcataattcgcttgtttttagtcctattttttagcttttaaacgtaaatcaatagcagccgaggattcagtagaaacttctccgacagcagccccctgtcccatttgcgcggtatgaaccttcacgaaatctatgtatttaagattagccggggaaccgtcttgttggatcgcgttctcgatgcgaaaacctgtcggctcgttaatattatccacgtatccccaatcaaaaccccagttcgtttcaagtccctcggttttaaattgatttcccaaacaagtacccgtcaatatataatactcttctttaaggaaccatgggaaataaccgctatccgggtgataagcattacgggccaagaaacggagattcccgtcattatcgatagacagcacatcctgtttctccgccgtgggccggaaatacttcaacgcatatcgctgagtgatgccgggcttaccagtttcactacctttaagctcgtaccaagtatcatcaggaatgccattaccattctcgtcctgactcacccacacgacaccacattcacaccaatgtttaccaagagggttccccacgatatcaaaatcagcctcacctttaccatcatctttaacgctatggtcaaattgcaagataaaataaccgccccaagctcccaaagaagctatccaagactctcctccaccgctatccaacgtcttctgtattgacatccgggcatcctctgccgtctgattctgtgtaaacctgataaattgaccgggagcaggaataaattcataacaagtattcgaaatatagctacttgtagctttcgtttctctaaaatgagttccttccggagcctcgcaaacgacattcacggtggccatcgccgtcttttccttatcgtttgccgtcacggtaatctcataagttttcccttcaacagaaggggtaaaattataacaaattgacgtttcaccctcttgcacgacaccatccactttccactcgtaaacagccagatcactgatcgagaatttcacgggagcgagtactacatttttcccgatcggacaagtcatcgtacgcacatcattcaactgagaaggcaaaacgtaacgcccgttatcaaagaataatataggcttttcctccggaataactgatatattgatattcttcacatcggccccatcctcattcgtcacctttaacgccaccgtgtaaacattaatatcatcctccttaaacacataaatagaatcatgcccaacaactttcccgttatagctccattcaaaagtagtcgattcatccgtgtagtccgtcatggccgccatctccttctccaaaccacaatatgccactgccgaagccgacattgtgatagaaggtgccaaacgatccaccacggttacttttacttgtttctccacgctaccgttatccgcatcaaggcggaaattcacgaaaaactctcccaattgactacctttaaaaagataaaccgtgtcatttgccacgatcaccccctcctgtttccaagaataaacaggattcactgcatccgtcaccgaagcctttagtgccacctctttacctatcttcaccttatactctcccgtctctgaattaaaagagaaatcgggattaccgacgagaaccttttcatcatcgtcatcacatgccgtaaagcccccgataaagaacatcacaagcaacactagcctaatctgatttttttttctcataatcattaatctgttatttcgacaattcttttcatcctatttttatttcaacctcctgtttgcaatacataccacatatgcccgcggtaacaccacaaaagcaagcattcaattcatagctgacacaaaacaacagctttccggtccaaatagatacaaatagcaataattgtctatcgcacaacagtctgataaaaataatgttttctgtatccaagctctagtcccagaaagctttagatccatgatattggcaggtcttctgacttgctccatccttgaacgcccttcccatttcgtgtcgaaacagtggatgtgagtcttgttcacggactttagtggagtttacagcagcaggtctgttcaggattcgcacctgattcccttttcaccacacgcctgaaacagggtgtgacaccaaaatcgtcgcaaaaatatataaaaaacaaatagtatttgaattttaaagttataattctagaattttacaaaatttatcatttacaaatacccgacatgattattaattattacaatacaatccgttatagctcatcgttctcataaaacgaaacctcatcacatttcgtatcttccatcactcatttacgattcagcctcccacaggcacaccgaatcggaaacatccttcccgtcggcatttttagcaaagacataaatgacaaggccttccccggctattttttctgaaaagttcacgcttttttctatcgtctctccccgaagtcccaactcctcgacacgacaaatatatttcgtcttacaaagaagcacggcataaatcttatcatccagaaagcaatcaacggactcgatttcttccttctcgtgagtgaaaaagattctccgattttccatatcaacctcggcacgaatttctgggatcaccaacgaacccgctgccacgcgtaatttctcgtagttgatcaccccgttaaattccttgactgctttcttacggctattgaaaggtttttccggatttgctttctccacggtcaccgcatccatcacgttcgcactggtaaatccccgaaaacctttcgggtaaccgttccctccgggaaatcccaactggacggcatttctcatccatattttccgttccgttatcgtcccgaaagccgcggactgtcgtttttgcggttcctgactcggtttacgcgagatgcttgtcccccggcaataatttttcccgcttggtcccccgtaagtgatcacgttaccgaacttaccccgaatctttccaagtggatttacaaattccgccatatcctgttatttttatgttcctcgccagcaaagatacacaaataaaccgatgtagtcacactttcaaactaaataaataaattattacatgtattattcatgagatataagtgatcactttcatgtaaagcgctattaaaacgctattaaagcgctatatataatagcgttttataaaagatttatttgcgtattaaaaatattctatctatttttgctcatgaattaatacacgagtgattatcaaataattattatcatggaaaacacattatctattccagtagctctcttggcacaaggctctatccggatcgacgggataacctattaccgacacggcaataaagttcgggcctgcaaatcacgacggagccctaaaaaaacaagaaccgagggggaagaggaatcctccagccgtttcacggaagcccgtaaaatgtggagaatctatcgtcgtgccatcggggatttaccgatatggaaactcatggccaaggagatgggaataaataaaagcgattccttattccattctcaaaacggaggatgttttcgcccgggagaaggggtatgggctttcccgacattccgattctcgacaggcacgctggatgcaccggtgatcacgggtgtcacaagggaaggatggtccgtgaccctaaactgggaaaatgacattgactgcccgaaagcgagcgtgtcagatcaagtgtacgtgggatatttttacgggaccttaccccgcgccccgcaaatgatcacgtgttttaactcgtttcggggcgatggcaaggtgaccgtggacattccggcagcaaaacaaccggaagggacacccctgcatctctacttgtttttcggcaataaagataccacccgtttctctccaagcgtgtacgcgggagtgtaatgtccatacgctcccccctctctccgaaatcgtgattaccggacgttacgcccgcgggaattcatcggcatgggggaccttgtgacagatatgcaagaagttaaacattattacacgcttggcatcctcccccgtgacgggattgatcatcgaaaacctcgcctaacaggtggttcataccaatgaaataaaaatcttttatccaatttattgtctaattaaaaattacgacctattttcgcaccgtcatagtttcatacaccacttcgtgttgtattgaatgaaaaagggaatccggtgcaaatccgggacaatacccgttgctgtatttcccccttttaaaggaaaagtttatcgtacgtttgccactggttagaatgctgggaaggcacgataaaagggataagtcagaagacctgctatgatgagggacagatttgcatctgcgggattcagatggtagtcaggttggatggcaaggtcattctgttttgatttaccgtttcaggtttttcccgctcgcgtaaatatatctctcgaagcataaaagctattatatatgaaacgagtactatttttattcacgtcaatcgttctgctgatgctatccggttgtcagacgaaaacaaagtccacgaccgccttcacgaaggaagtttactcaccggaatacgccgcgggcttcgacatcatgggagctgataacacggaaagcacgattattcgcgtgcgtaatccttggcagggagcggaaggcattgaaatgtcctacttcgtggcccggaacggagagcaggcaccgaaagattttgacggggtgattattcctgcgggagccaaacgaattgtgtgcatgtcatccacttatatcgccatgctggatgccattaaccaagtagatcgagtagtcggagtttccgggatgaattatgtttccaacccgtatgtccttgcccacaaagaaaccataaaagacatgggggcagaagtaaattacgaacttcttgtcgggttggccccggatctcgtgttactttacggcatcggggacgcgcaatcaaccgtgacggacaaattaaaagaattgaatgttccttatatgtacgtgggggaatacttggaagaatctccgctgggcaaggctgaatggttggttgccatttccgaattgacggatagccgggaaacaggtacaaaagtatttaaagaaatacccgaacgttataacaacatgaaacagttaacggcaaacgtggaaaaacgtcctaccgtcatgctgaacacgccgtggaatgacagttgggccatgccttccgtgaaaagctacgtggcacaattaatcacggacgcgggaggggattatatttacaagaaaaacacctctaacggggccgaacccatcggactggaaacagcctacgggttgattcgcgaggctgacgtgtggttgaatgtaggcatggcaacaactctcgacgagttaaagatcatgaacccgaaattcaaggacgcgaaagccatccaagaaaacaagatctataataataacttgcgcttaacgcccgaagggggaaatgattactgggaatcggctgttgtacgcccggacatcgtactccgggacctgatcaaaatcctgcacccggaactggtgacggaggatttgtattattacaggcacttggaatagtttagagtttaaaatttagagtttagaatgaaaaaagcatctacccccaccggctcccccttacacaggggaagagacgaacgcgagaaggcgctacgatattacaatgtagcgtatcctccccctgtgtaagggggagttagagggggtagttaaagcgtccccccgtgcggctggaatctaaaatcataaatcaagaaattaataacggtgatgtcattttcaattttatcgtgaaacgcaattcgatcatattccttttcctgagcctgctggttttcgtgctgttcgcgctcgacttggtgtcgggagattcggcactttccgtcgggcaggtttggaacgtgttcacgggtaacgagacggatatgacaacccggaatatcgtgctgtcgattcgcttggtaagggtgatcgtggccgttctgatcggtgtggcactttcgataagcggcttgcagatgcagaccgttttccggaacccgctggcagacccctacctgctgggagtaagctccggttcgggactaggcgttgctttctttatcctaggggctcctttgctgggactggcacattccgggttctggcagtcggtaggtattgtcggagccggatggggcggggccgtcatggtcctgttactgattgccatcatcagtcgttacgtgaaaaatatccttggggtgttgatcatgggagtgatgatcggttacatcgcgggagctatcatacagattttacagtacttgagttctgccgagcaattgaaaatgtttttcctgtggtcgatgggctccttgggacacgtcacgaccacgaaactgtttatcatgattcccgtgatttgcgtgggcgtcattctctcgatttattgtatcaaggcattgaatcttcttttactcggggagagctatgcccagacgatgggactgaatatacggcgtgccagaacgcttattttcgtgtcgacaacgttgttgaccggaaccgtgacggcattctgcggcccggtgggctttctcggacttgccgtgcctcacgtggcccgtatgttgtttaacgacgcggatcaccggacacttttgccgggaagcatattactaggagtcgtggccatgttgatatgtgatattattgctaaaacactcgtgctacccgtgaattgtattaccgccctgctgggaattccggtaattatttgggtggtatataaaaatcttcgaccggcatgatacaactggaatctttaacactgggatacgggcaacaaatcctgctggaccgggtgtcggccagcttggacgggggcgggctgatcgccttgctgggacgtaacggcagcgggaaaagtaccttgctgcgggccacggcggggttagggaaaatcaagtccgggcgaatattgctggccgggaaagaccttgccgggttgcgaccggaggaactggctcgcaccgtcagtttcgtgactactgaaaaggttcggattcctaacttgaaatgccgggatgtagtcgccctcgggcgggccccctacacgaactgggtaggaagactgcaaccacgagaccgggaaatcgttgataaatccctcgcattactcgatatgtccacctatgccgaacgaacaatggaccagatgtcggacggggaatgccagcgaatcatgatcgcccgggccctcgcacaagacactcctatcatcttgcttgatgaacccacctcttttctggacctgccaaaccgttacgagctgggagtgctattgcaaagactggctcacgaacaaaacaaatgtatccttttttcaacccacgaactggatattgctctcacgctctgtgattccatcgccctggtcgatcgtccgcatttgcattacctacccacgcgacagatgattaacagcggtcatatcgaacgcctgttccgtaacgagaccatcacgttcgacccgaaagaattgcgtatacgtgtccggtgaaaggctgtttaagactggcattaaacttgtcgctcattttcgataatcatataaaattgagtatctttgttctattattatccataaacgaacgcgcatgagtgagaaaatttatcccataggtatccagaatttcgagaaaatccgaaaagaaggttatttctatattgacaagaccgccttgatttaccgactggtaaaaacaggtagttattactttctcagtcgcccgcatcgttttggcaaaagcctattgatctccacgctcgatgcctatttctggggagaaaaagaaatccatgacaagcattacgctcaaccattccaatcagacaagcgcaagatatttaaaatcggtgtaaatttcagttcgaaaacaaggaatatcgagaaatggatcgtggagtcataacgctcggattcatccagccaagagacaatccgaaaatagatttattccacaaattgtctcttggctatgactcgcttgaatcaagcaatctggattccaagtttccggaagttcttcggatgaccgaaaagtacaaacacatccttttcaacaaaaacggtatcatcggacgggttattcattaccaatgatttatcgactttagcatcatagcgttttaaggctatcaattttaacccaaattcttcttcgaatttcgcatcacctaattttcgcccgataaaacgaggtggaatctcccactcgataatcaaatgatcgtcatcaacaacataggaatctatagttgtccccaactccacttttgtcgcgaagaaatcggcatactcccattccggattgatggtctccgtgattcccatagacttcagaatcaccttatgcaccggcgaaatggcccgtgccacgatacgtttcacgccaaattgtttcaatagcgcaatcacgaacagggaggtcccaaaatctttcccgaacaccacaaacaccacatccacttctgtcaaaggtagcgtttgtaatgcttgttcatttttcacatccaatgccacggtattcgtgatggaatccttgtacaaattaatcttactgatgtcagaatccactcccaacacctcgtttccccgtttggtcagacgttgcgatagtgcaagtccaaaattacctaatccaaatacgatacacttcataataattgaaaattgagaattgaaaattgaaaatgtgagacggagcttggttttcaactttcaattgattaaacgattacggtttcatcgggatacgtgtaaagtttcacttcctgatggcggatgaaacaagccaaaagggtgattaagcctacacgcccgacaaacatggtgagggcaatggtcattttacttgccacacataaatggggcgtcaaattcaaagtcagccccaccgtccccaaggcagaaacgacctcgaaaacagcttgagtcagcgttgccttcggttccagaatcacgatgacaaaaacagccagaatgatccacagaatagatagcatgatgattgaatgcgcccggttcacgttctcccgagtcaattgacgatgcgcgataacaacccgatcgttccccgcgagattcgcccatatattttttaaagcaatcacgaaggttgtcaccttgataccgccccccgtggacatcggagccgcaccgatccacatcaagacaatcgtgaggaagattgtcggaacgtgtaacatggacatatccacgttgttaaaacctgccgtacgaggggtgacggcccccataaacgaagtggcaaattttcccgtgaatgacattccgtccaacacgttatgattttcaaatatccagaacaaggctgtccccacgacaagcaggattaaagtggtcggtaacacgattcgcgttgtcgtactcacgatgcgaggttcgtggaccaccttgtaattcatacccaacagacatttgatcttattccgaataccataatgcaggagtcgcccgtaattgaacaagatcgggaatccgataccaccaaatataatcaaaaaagccaaaatgacttgcaaaccatacaaatgcctgatcaaaggatcatagagattgcccggcaacgtggagaacccggcattacagaaagccgaaacaccatgaaacaaggcgaaaaagagtttattgtcaatttccgctacatcctgcacttgcatgtagacaaggtaaacaccaattccctcgatgataaacgtggtcagaatgatatacacgaccgtccgaaaaatatcgctcaaagatgcctcgttcaataggtttttcatcatgaactgatcgtgaaaggaggtgccactcaagaatgacatggcaaaaaaactggtaaaggtcatcaccccaattcccccaacttgaatcagcatgagcagcacgacctgcccggtcaacgtaaaagtggcaccggtatcaacgacagtcaacccggtcacacacacggcactcgtcgaggtaaacaaggcatccatgaaactgatcccctcgtacgtggcattaggtaatcttaacaaaacagcccccaaaaggatgataaataaaaaactcgcggcaaaaagaacttccgcctttacccgacttcgcaagacaacaaatatctgtttcgagagttgtatgatactcaatagtaataccacagcatacgtcaatattcgctcgaccttgaaaaggaaggggttagtctcctcgaaatccggtcggtcgaagtgtttggagaacaaggtcaaggcaaacaggaaaagtaacactaacacttctatccaaaatcctttttccgcccgtagcagcctgaaattaaacaagaaccgcaacaagccaagcactacgaaaagacgaattatcgctcgataggtgtagtatatctcatgagaataatcagccggcatatcaaagccgaaacgataaatgactaaaataattgcgagaaaagaggctagaaataataacacattacttaccagttcaacaatctgttttacagacttataaatctttctcgcccgatagcggaattccactgaaaacataacaccaactttttttaataaataacgttaagcagttaccgcaagttacataaatcaccgataattcttcactttccgataacaccgggaaatgtctccaagtttactcattatttttcagttttccgctagacttttctatttttgattttcacgaaaaggtaaaacacaagaggggataacccaatatagttatttcatgaatacaaagtaaactgccagcaccaagcaaacacaagcggccaagtgattccactggaaggttacccctttgaagaaaagcatggagaagataatgaaaatggtcagcgtgatcacttcctgaaccacttttaactgcatcagcgaaaaaggccccccgttcccaatgaatcccaaacgattagccggaacttgggcacaatattcgaacaaagcaatactccatgaaaacaagattaccccgaagagaggccagttatctatccatttcatttcctgtaacttcagatggccataccaagcaaaagtcatgaatacgttcgaaacgatcagcaataatatcgcataaagtccttgcatactgtattttttaatctatttataagtcttcagaagacggcacaaaaatacaaattctcaaagaaattcgtgaaatagaccacaaatattacatcactcgactattcttccactattcttccactattcattccataaggaaacaaatagcatactatattgcaatatttgcaagcaaaacttccgtacttttgtaaaaaatataaaggacaatgaataattacaagcatgtatgcatgttactactaggatggttgacgtgtatagtattgttttcagcctgtaaaaaggatgtctacgatccaaacaagaatgaaccggcaaaagatatttttgacttcgccaccaccgtcgataagtctttggacattgattatggcatgaaaggtaacaaagccgtgttcgaggtattcacggaagatcccgttattttagaaaacggaaaagccaagaaaaaagaaaatgtaaaatccattttaaaagcgtacacggatgaagattgtacatactccggtattgtcaatttgccaacagcttgcacgaaaatttacctgtattcggagaattatattctaccgaccagcgtggaagtcgaggtcgaaaattcgggaattaaattcaacctgaaagattatatcaaaaatcttcaaccaagcacgccggtcatgacatcccagatggcgatcatggacaaagcgctatccagagcatacacggaaacgaacccgtacaacattcagttccttggaggatatgataataacgggatgccggattatcttctaagggaagaacataacgggatcacgtacccggttgccgttgatgtacccaacggactagtaaaccggttaaacgatgttttgaccgccaaagataactctagctttgctgtttcgacaaaagttataaacacgaatgtcttgaaagatgctagcattaaattgacattccttggagaagaggccgaataccggaatgcaatcggttactactattacgaaacccagaatccaccaagcgcggaagagttcgaatccctacccaaatacatcgctttcccaaattgttctacatgggggtcaaactccggaatcacaagtaattatatgcccccattatggtctggtcatcagattcaactcaaatattttgacaaaaacgggaaagagacaaatgtattcccggcaggcatcactatcggatggtttatgattccggatgggtttgaagtttacaaacaagcatcaggaaataaagttaacattgtgaatccgaaatatggtatccggtattcgaataatgaattcaataaagacaataaaagtgtatgcataagcctatacgacgagaaaagtaaaactactgtaaacggtttcgaggacggaggagacaaggattacaaagatgtttttttctacttgacctccactcccgaagaggcgatctatgacccgaacaagccaacaaccgacccggatgaagaatatccacccattgaaagtgacgccctcgaaggtacgttagtattcgaggatttatggcccagtcagggagattatgacatgaatgatgttgttgtcacgtatcataccacattcacaactgacaaggacaataaaattattgggatcaaagacatattcactccaatccatgcaggcggagctttaaaaagcgctttcggttatcaaatgaacatggacaagagtgatattgacaatattaaaatcgagaattcctcatcaaccgccctcaacgagaatggaatggaaatcaaccaagataaaccaacatttatgttgtttgatgacattcaacaagctgttaaaaacggagcgataaccgttaccttggaactggccggaaagaactcgatcaatgatgtctcaagaaaaaaactttacaatccatttatctgtgtcagcacggatggattcaatgcaacaagcaaagaagctcgtcgtgaaattcatctcacaaattatcccccgaccccgtttgccaatttgtatttcttcggacgtaataatgataaaagttcgttggatcaagaaggaaatcctatcggacccaattactatgtcgctgaagataactatcccttcgccatcgatcttcctatcacagattatcagataccggatgagagtgtaaaaattgacaagttctacccggggttctataaatgggcaaaaagtaaaggcgaagaaaataaagactggtatgaatacccagcctccaaataatactgattttaataagtatttcatatcacgatctcagagacaggcctaccagcctgcctctgatttttatatatccacacccatcgaaagaagcaaatttttgtttaaaaaacaagaattttaagagatttcagtctgtaaacactatctttgttcaaataacggataaactttaccatcaaagtgcagtatcatgaaagcgaacaagattcagaaaatagagatccgcaatatatggggaaaatataatttccggtgggaaaatctcaatcccgacgtgaatatcctgacaggtattaacggtagcgggaaaaccacattcttcaatattattgacgccttactttcggcagatattaaacgcttgaaattgtacaacatcgaggccgaggtcactattgacgacatcttgatcagtttccggaaagatagtaccctagcatctgtaagacaaaagttagccggggtgaactatttaaagatcagcacctttgacgtaccaatccgagaccgtcgaaaaatgggtaaagaagatagtcccttactcagcgagttaaaggaaatcgtgtacagcgtgggcgagaataacaattcgttttctgattaccgccttcgggccacgaattttccggatcaggcggaaaagatcaaccgcaggattcgcaaattttacgacacggtgaaccacttgtttgccggaacagggaagaccatcgagattgacccaatgacgaatcaattggtcttccgggatggagatgaaattatccatctttacaagctatcgtcgggagagaaacaattactaattattctgctccgcgtgttcctgatggacgaacaaccttacatcctgcttatggatgaaccggaaatctcgttacatatcgagtggcagtaccgcctttttgaagaaattcaaaaactgaacccgcattgccaaatcattacctctacccactccccgagcctgttcggtgatggctggggggacaagttggtattcatcgaagacctattgattcactaacctgatcaattttagatttatgattttagattccaacccagctcttttaatcgtagattgatggtctttttacattttcaattctcaattttcaattgttatgttttctcctcccgtatctaaagaaaaatattattatcacgcagccaaacgttttatgatggacgcacagctcttgcgttgtagggcagctattcacgtggaagataaagacgatattgttttctggagcaatattttcaagcatttccgcccgaatgaccggtttcattttatcgcgggttcccggaacgaacggggccatgaaaccagaggcgtgacgcaatgtctgaaatatgtcaaatacttaaacccgaagttttttatctgcatagacagtgactatcgctatttgttgcaagaacaagggattgatgttaaacattacattttccagacctatacctactctttcgagaaccatcattgctatgacaaggggttgaacgagttatgctaccggatcacgaccctacctaataacgtgttcgattttcaccaatttctgaaagagtattcgaatatcgtgtacaaattattcctgtggcatctatatttcctagtggcagatcccaaacgattctcgatcgctgatttcaacgaactgatttcgtttcaatggcaacgtcgaccggacatccgacagaacggacgccacgagttaaacaagttgaaaggacggatcgaacaaaaacttgcccaactccggaagaattaccccaaagcgaacctttccatactggaagaaaaataccaaaagatggggctgaccccggacaccacgtatctctttatccgggggcataatatttatgatatggtttacatgctgaaccgggaagtttgtaaaaaggtactgagaatcgcgaaagattcgtattccggttcacaacaaccgcctcatgtcaacctttttggttaccggaacagtattgacgatcaattgaaaaagaatttacatttcggggcttatcccgccattcgcaagatagaggaagacgttcatcttctattctaaggtttcctcccggaaggtaacacctccaagatggctttatgggattcgccattctttccaatcgtgaaatgaatacgggcttgtattcgcttaccggatggcgtgttctcccatttaggcccctcggccaacaatcgaataacctctttattgctctccttcgagaaaccatcctctatccggattcggctggggactttcttcctgttcaactcgaatgaaagtattacagcccccattttattcgaatccaagtcggttttcggatagcgcaaagctttttccatatattgattgaaatggaggacatcatctttagataccaacgtatcaagtacaacattttgtcgactggttataacagaaacttcctgcatttttatattggacatttctacctctttcttttttgcaacaccataaccggtaacaacaacctcattcattttttctgcatcttcttccatcttcacttgcaattcgtctcccgccttaaccaaaatatgctgagatttcatcccgataaaagaaaaggtaagtaaaccctctgatgtaggaagatccaaactaaagtggccgttggcatccgtgactacccccatcgtcgagccggaaaggagtactgtcactcccgctaaaggattgtccttcccatccgttatcatacccgacacgtgattatcgtttactttcattttccgggttaccagtcgggaagtatcttcaatctgaacacttgccaaagaaacttcttgatcagcaagttcctccatcaccatctcccgtacagaatccttttttcttgctacccggttatccgagcgtaacaactgttttttatcgcccggaggcactgtcaaagaatccgttttatcaaataaatctattgtgtttccactttcaagtgtcagtatcgctctctctttggttttcaccgaatcagataattgagcaactaccatcacgggtacatcaaaagttttctcttgccgggtaaaccaccatgtcccgcaagctagcaaaatagcaaacgaggctgcaatatacatccatgtccgtttttgtttacgagatgaacgggagcgctcgttcaactggcgttccagacgaatcaggccatcaagaggatcaccgggagtcgaagtcaacccctccaatgcctcgaacaagaacggatcggacaaagcctcccgctccatacggttagcagccttacctttccggttgccatgcaggtattcttttatgtcgtcaatccgtttcatttgatgttattcctttacgttccaaacacaatttcaagttccgtttcccattctggataaaactctttaccattttcgaagaaaaacccgtgcgttcttccacttccttgtacgaaagttcattcaggaagaaatatttcacgctgacacgttgtctttcaggcaacccctcgatacattcccgcaacgatttctctcgattctccctctcgtttacaacagtaagatgaaaatcatcgcaaaattccataaaagaatcgtctaaagaaacggacaaatttttactccgtttccggatttccatcaagcagttattgcgaatacaagtatatagccaagctttgaaggattgtatttccgtctcttttaccttcacaatcaattcttcgaatagttgcataacggcatcctgcgcatcttccggtcgcttcagatactttaaggccaccccatagaccaagggcatgtatcttttataagcctccacgaaatacgccaagtcaccgctttcacaatatcgtttcagcagttcttcatccgttatgttctcttgaccccgcttcactatttatacattgatttttac

SEQ ID NO: 7 - DNA, 28280 bp, Butyricimonas faecihominis
atgaataagaccgcgaactatcaattaactatcattgttccagtgtataacgaggaagggaatatcttaaggttagagaaagaattgggagagtttttaaaggatgcgaaggtgtcttcttgcgtgttattcgtgaatgacggttcgaaagatgatagcgaacgtttgattcgggaagtttgtgagcgtaatgaggcatttttctttttaaatctggctcgaaacgggggactgagtgctgccatgaaagccggaattgataatagtttttcaaaatgggtaggctacattgatgcagacctccagactactccacaggattttaataaattgttggagttcgtagaccaatacgagatggtcatgggcatccgtaccggacggaaagatagttttgtcaagaatatgtcttctcgtattgcgaatggattccgccggatgatgacgcatgacggggttgaagatacaggttgtccactgaaggttttaaggacggattacgccaaaagaattcctttctttacggggatgcaccgtttcctaccggctttgattcaattgcaggaaggacaagtgaaacaggttccggttcgtcattttccccgtattgccgggaagtctaagtataatctggtcaatcgcttgattgggccctttaaggattgttttgcttaccgctggatgagaaaaaggtatatcaactatcaagtcgccgaaaataatttgaattcttgagatatagttccgagcttttagtttttatctttaaacttttagtttacaaaatgatttatgttataggatttcttgctcaggtgtttttttctgcccggattcttttacaatggattttgtcggaacgggctaaaaaagtgatctctccggctattttctggcagttgagtatcgtgggttcctacctgttatttgtatatgggtggttgagggatgactttgcgattattctgggacaaatcatatcttactatatctatatctggaatttggacaaaaagcatcaatggaagaaattaccgtttatcatccggacgttattgcttttgaccccggtggcggcaattttatacatgcttaaagacgcaagcgcttttgtcgatcagttcttccggaacgaaaagatacctttgtggcttttgatctacgggtctatgggacagattattttcaccctgcgttttgtttaccagtggatctactccaagcgaaaagatgaatcacttttgccgataggcttttgggtgatcagcctctttggttctttgatcatcgtttcatatgctatctatcggcgtgatcccgtgttaattttagggcagtcaaccgggttaattgcttatagtcggaatatttatttgtctagaagagccggaaactaattggtgtccgagtagataagataaaagtttccgatcttctcgtgatgggtttgttgaatccagttggcgagtgccggggaacgcgtaacgttcttttctttgacgaaaatcatgcagtcgcctttctggtagatattaaataaagaatcctcattcgtgacctttatggcctcttcttttaaataaacgtccatgttttccccgctgcggaatttgtaatagtaataatgatcgatattctcttcctcgcatatatgatatgcttctttcgccatagtggtaaaaccgatgtatggattaatccggggtaaggcaaaggctcccgtgaacagggtggctaggattcccaatgcggcacaattgatggcccggtacatttgtttgcgatatagtaaataacaggctgttaaactgaagataaacaatgttatgatggcgacataaataaatggcgagtcgggaacattaaatttgttgcggatgaaaaatgccacgatgggagcaatggtaagggctatcacgggaatatacacggaaaatgcgatccatttctccttgatttttgggagcaacaggattgtcaagtacgtgaagaacgggaacaggggtagcatataaatgtccagttttccgctgaacagggaaagaatgacgaaagtcgagacaattgccgagaggaaaagtttttctttatctgtcgtgagtagtttcttttttaccgcgataacgattgtcgtgatgtacaggatagaccatggagccacggagtaccagaacgtcaccccgtaataccagaatgcttttttgtggtcgaacgaatcaatcgcccggtttatagtttgatggaaaagaagattgttcaagtaagttgatccaccttcgagataaataccgagaaaccatatggcacagaatcccgataaaataccccattcccgccagccgaaataccggcagaaggaacggatgtctcttttcaccagtagaaagacgagtatggttatcaagggaacgataaacccgataggtcctttcgagaagatggccatgaaaatatagaaaggcagcaagaaacggtctctcggctgtcccttgcccgaatagcgtttataaaacgtgtacagggcaagaagaataaacatacacatcagcatatccatgcgcaggacaaggcctgaaccgataaagaaagcgcttgtgaagagcatcagcgaaccgttccatctcaaggatgtggtggtttcttcttccacccatttattcatgatataaatggaaatcagtgcgggaatgatagaaaaaagtgaaaggccaaacatattatattcaccccaaatccatttgctcaacatgagtaaccagaaataaaggggcggtttatccgcataaagttctccttgatggaagaaagtaaagaaatgcccgtctcgcagggcctcatcaacgatgctgaggtatttcagttcgttgtttggagtgaaatcccgtaggatcaacacgggaatcactaaaatgagcaatataagataccgttctattttcatgattgtgagtatgccaaatccttttcgcgcaaaaacaccaccaaaaagtataccaaaaacatttcctttttgttacacccgggtaaaaaaattcttcctgcattatttgaaggatatgcccttgaaaatagttttattattataaatttgcactctaatctaaacgtgtacatgagattatgcagaaaaactatattcattatctttttattcttatcgtttgttggttcgcctttttcgtgaataatggttctgtttatgaggatattatggagtctcgtaatttagtgacggcacacgaaatgattgaatatgacaattggttggtgcctaccatgaacggggaactacgtttggagaaaccgcctcttccaacgtgggtagccgcgggaatcgagtatttgcaaccggataatatatctttacagcgtgcagccgccgggattatggctacgttgatggctttttttctctatttctttgcttcggctttaagtggcaacaggttattgggtttgctttccgcgttggtactggcaaccagctttaatgtcattatggcaggacgggtggcgacgtgggatatttattgccatagttttatgctgggagccatatttttcttctataaagggataaagagcgtgcgaacgagttgggctaattttgtttgggccgggatattcttgggcttgtctttcttgggtaaagggcctgtggctttctatgcgttattatttcctttcttgatctcttatatatggatctatcgtccttctctcaagagaaaaggctggcctatcgtggtcatgttgctgttatttatagtgattagcttttggtggccgctttacctgtatgtgttccatcgggatacagccttgttcgtgctggcgaaagaatcaacggcttggatcgagagaaatgtacgtccttggtactactactggctgttctttgcagaatcgggaatttgggctttgttcctcttgaccgggttatgttggccgtggttaaaaaagaaaatcaagatgcgtaaggagtacacgtttgccgttttgtggaccgtggttaccttggtgttactttctcttttcccggagaaaaaaactcggtacttgttgccgttactgattccggccgcgatggttgtggcacattatatcgtttatatattcaccgctgcgaaggaaaaaacgctcacgacgagtgatcgtgtcgtatttcgtgtgaatgcttttatcccggcattgatcgctttaggaatgccggttgccgtctatcttctattttaccgggaaggagaagtcgggttgacccttttgattattgtttcgatcctgttccttgttgccgcctattcaattttcgcgggtggggtgaggataaaatccatgaaagtattcacgggagtcgtgctattattgatccttgtggaaaccctgttgatgtctcgtgttgccaatatgttcaataacacggagatcaagagtatcaaggccgtccgtcagattgaagagttacaacacgtacctttctattatccggcggatgaggaattgagaatcgagctggtatatgaggctggtcgccgcatattgccttgggatataaaaagcgatacaacacttttaaattctttgcctgtcgtgttggtttccggtaagccggcaacggaagttctgcctgtggggatacaggagaaagtaaatcttcgtttgatagatgtctacgacaataataatcgtccgaaatcagataaaaaacgctattctcctaaatttgttcgttacgtgacgatcttggaaaagaaataaagtaaaagagcattttaaataactaccccactaactccccctgtgtaaagggagttggagggggtagcttgtagatgctggataagacttttggggacagcccctgcttttgtatgggaatgttaagggaaagttgtttttctgcaaatgaaccattatgaacttgatttttgaatgatatgcccctacctttgtataaaaattacaagttttattaaaatgaacatcatgtcaggtagaaagaagatcgggtttatactaatagctttgctgtatgcatgttctggaggatccggtagtgaggatccggagctaatgccagagccaacaccggaaccggtacggaaagaaattaaaatgctttttggcgtacaggatattgcgagggcaacagatgccactttcgaggctggtgacaagattggattgtatgttgtgaattatgacgggcaacaagcgggtaatttgcaaaatacagggaatcacgtgaacaacatgcggtttgtttacaattcttcttggacaccggatcagaccatatattggaaagatgatgaaacgaaagcggatttttacgcctattacccttattctgcatcggcaaacgtgtctggccatgtttttaacgtgaaagcggatcaggcatccgtggataattacaaggcgagcgatttcctttggggaaagacctcgggggtaagcccgacggaacaggccgttaatatcacgttgaatcatgtttttagttgtgcgcaggtaaaggtggagccgggaaatggtttcacgcaagcggcattggatgaggctgcaatacaggtaaagtttaatcatgtccggcttgcggcatccatcaatctagccacgggagaagttgaggctgtaaatgaagagcaaagcgttattttggggaagaatgacgggttatacagggcgcttgttgttccacaaaatattagtgagaccgatttactggtgatcaatgtgaatgggaaagattatacgttgaagaaaggacatcatttcgagagaaataaaagatacacttttaccgtgaaggtgaataaaacgagtagtggtattaacgtcaatatcggccaatgggacgatgacggggtggattatggcggggtggcagaataatctaaaacaatatttatgagaaaaataattcttctggttgcaatagcgttatcgtgtgtgtgctgggcatgttacgataacgaaatagcgggtcctgatgccggtcaggcctgcttaatttcactttccggggagattgatcaagtggctttatcccgggtgaatgatggtggtttttgtcataatgatgtgatgggagtttatatcgtggactacgagggaggctctcccgggactttgttggatgaagggaaccgggcaacaaatcttcaattcacgtttgatgaagccaataataaatggaattcggcatacgatgtgttctggaaggatagtaagactcccattgacgtgtatgggtattatccggtagggactccggaaagcgtgaatgcctatgcctttgaagttcgaaaggaccagtccaagttatccgagaacggggagatgggaggatacgaggcgagtgattttctttgggggaaggcggagaacgtggctccttcacctgttgccgtgcggctctcgttccgtcataaaatgagtaatgcccgggtgacattgcaggagggaacaggttttagtgaaggggaatggaccaagttggaaaaacaagtgttggtcacgaacacgaaacgtggtgcgcgggtcgatttggccacgggtattgtaaccgttacaggcgaagtggcggcaacagggacgattccttataagcatggggatgaattccgggcgatcgtcgtgccgcaggaggtggctgccggggtgaaattatttagtataactgttgatggggtcgcgtattcgttctcaaagaatgaaacgtttacttacgtgccttctaaaatgcataatttcacgattcgggtagataaaaaggccaatgaggggaaatatgagtttgtattggtcagtgaatctattagggcttgggaagatgatctggcatcacatgatgcgacagctagggagtatattgtgattgagtccgaggcaggtaaattgaaggagtgtatcacggctgccaaaaaagattttaggaatttgcagaacttgaaaataacgggcgagattaatgctttggatttttatttcatgagggattcaatggatcggttgcaggcgttgaatttgaaggaggtgaagatagtgaagggtggagcagatggttatggaagacctacaaaagacgatgtaataccttctatggctttttttggaaaaaattcattacaaagtattattttaccagatcaattatgggaaatagatgatgatgctttttatgaatgtaaatcattgatgggatcattgacaataccagaaggcgttataaggattgggaatggggcatttagttggtgttctgggatgcgaggaattttgtctttaccttctactttgggatatattggtgataatgcttttaatcaatgtggtattattggtgagttgaaactaccagataagttgaaatatattggaagtcaaactttttatttgtgtataaatcttacaggaaatttagtattaccggaaaatcttcagtatttaggttcttcagcgtttgctcattgtagtggaataacaggaagtttaaaaatacctcaaggaataacagaaattccattacaagctttttctagttgtggctttgatggggtattgatactacatgatggaattacgatgattggacagcgggcttttgagagctgcaaatttaaaggagaattaaatcttccttcaaaattgttgatacttgaggatgatatttttagtaattgtaatttttcgggtgaaataaaattaccacagaatttgcggagtgttggtatgagagcttttgaaaacaatgagagattaagtggtacactagaatttcccccgagtgttacaagtattagcgcaggtgcatttgctagatgtggatttgaagaaattatatttcctgaaaatttagaaaatataggatatatagactcctatataggaggggctttcgctaattgtttcaacgtggggcgtattgtttgcaaggggacgattcctgctgatgtggtggattctagagcatttgaaggtgttccgaaggataattttacgcttgaagttccagaaattgttgttgaacaatatcgtgctgcgcccgggtggcgagaatttaagagaatagctgcacatagagaattaacatgtcgtccgactatggtgaaagctttgaatgggaagtctgagcgtaaattaattttggatgcagaaggagaatgggaagtagaaagtaaaccggaatggtgtactttatctgcgatgagtgggaataagaaaacggaattgacccttacgttagagtccgggacaaattatcgggagggggagattatttttaggctaaaggattatgattacacaacatcttgtcgtgtttatcaatatgactttgagtatgctgatgatgaagtgcttgttttacaaaaccataaagtgggacaagggattaatttaatctttttgggtgatggttacgatgcggaagatatctcaagaggtgattatttgcaggtaatgaatgaacaaatggaacgttttttcgctatcgagccttatcggacgtatcgtgattatttcgatgtttatacggctattgcagtttctccggaaaatgggataggaggtgtaaatactattcgagatacaaaatttggaacaacttttacaaatgatgtcggattattaggtgaatacgatgaaatttttgcctatgtgatgaagattccttccgtgaatgaaagtaatttgagtcagtcgctgattgtaataactcctaatacaacagattatgggggtattacacaaatgtgggaagatggaagtgcaattgctttttgtcctttaagtggagacaattatccttacgatgctaggggaatcgtacaacatgaggcgggaggacatggttttggaaaattgggggacgaatatatttattacaatagttttattgatgattgtctttgtttgggtacatttaagtggggaaaagcattaggatggtacgagaacctttctcttaccgggaaaatgcatgaagtgccttgggctcattttatatttgatgatcgttatagtgacgtggtggatatttatgaagggggatttacgcatacccgaggtgtttttcggtcggaacaaaatagttgtatgaataacaatatccagtatcatagtgccattagccgggaggccatcgtgaaacgtatcatgctttacgccggagaaacgtattctttcgatgagtttgtgaagaatgataagcggggttcggataatttatcacgttccacccgggacatggactttggtacgaaagctcgtggaaatcaatatccacccgtgattcacaagggacgtccttcaattttgaaatgatggtttgactaaattagagaagatatgaaatacataaaaataacttgctgtgtaattcttttatacattctactgattccgtgcgggtgtagtgagaccgaccaagtgcaagaatcggatgaaatgttgatcacgtttgatatgcaacatccggcgttggcgagggcaacgacaagtgcttttgaaaaacaggatcagattggagtatacatgaccggacacgggattcctttagaggttgccggaaattttctgaataatgaacgactgacctttgacgggacaaagtggaatcccgctagaaagttatattgggatgagggttcttttgatgttttcgcttattacccgtacatcccttctccttcgggagtcgacgatctgcccttttccgtggcattggaccagtcggttacttcaactgattccggcttggatggctacgaggcgagtgattttctttgggccacggatcagaacgtcacggcaagcgattctccggtctccttgtcattcaagcaccggatgagtaaaatggttgtgcgtctgatgaaaggtaaagattatgatggtgatattccggaagatgccgaggtgtacatccataacacggtaccttctgccacgatcgacttgagcgtgggaattgttacccgaaacactcacggaactgcacagacgattaaggcgaaaaaagtcaacaagacacaatatacggctatcgtggtgcctcaacgattaaccaatcaagttcctttggttgaagtggtgatgaaaggagtgtcctacatggtggaaagcaagtttgtctttaaacccggcatccagcatacgttatccgtcacgatctcgaagaatccagaacaggtgaaaatcgaaattggtggagaaatcgaggattgggaggattagattggctatttttcttacttttgtaagataattaactggcaaaagagatggatagcaaggaattacaacagatagtagcatgtggggaaacgagtacggtccaatttaaggaacatttttctaatcaagacagtattgctgctgaaatggtggccatgtctaatgcttgtgggggaatgattttatttggaataaaagacaagacgggagaaatcacgggtttgccttacccggaaattcagcaaattaattcgatgttggcaaatattgctactaatctgttgcgtccggttatttacatacaaacggaaacggtcattattgacgggcattccgttcttgttgttcgtattgcagagggagataataaaccttacaaggatttgcatggggtaatttggacaaaacagggggctgataagcgtaaggtcatggagaatagtgaaatcattcgattgtttcaatgttccgggatgctttatgctgacgagcaaccgattcctttcacttccgaaaaagatgtaaacgggagtatattggatgagtttatccgtaaagaatatggacgtgagaaagagtcttttggtgttccttatacggagcttttgcagaatctaaatattctgagaggagataagataactttagccggattattgttttttggtaaaaatcctcaacaatttcgtccgacttttatgataaaagcggtttctttctttggtaacaatatcgcgggggttaattatagagatagtaaggatataaccggaaccttgcctgaactatttgaaaaagggatgtctttcttgaaagcaaatcttcatagtgttcaagccggacaaggatttaattcaatcgggcaacttgagatctcggagatcgcattagaggaattacttcagaatgctcttgttcatcgtgattataccagaaacgctccggtgcggttactcatatttgataatcgtgttgaaataatcagtccgggttgtcttccggatggattgacggtagaaagtattaaattgggaaccgctgtcgtgcgtaatccgttcatcgctagtttctgtgctaaaatcatgccttatcgcggacttggttcggggattattcgagcgttaaaagaagaaccggatttggaatttatgaatgatcccgaaagaatgcaatttacttctgttataaatcgtgtttatgatgataagataaacgttgatgagggtgcaaatgatcatataaatgataagataaatgttgatgagggaataaatgataagataaatgataagataaacgttgatgagggtgtaaatgataagataaatgataagataaacgttgacgagggtgcaaatgataagataaatgataagataaatgttgatgaggaaataaacgaggctgaaactttaatccttgcttttttagaaaggaatccgggggcaaaaggaagagaaattatgttattccttcaaaaaggaagagcgacaatagcccgctatttgaagtcattgcaagagaaagaattaattgaatatagaggttcgcgtaaaacgggaggatatttcaaaaaataggaacgtgtgtttatgagaaatattatttttctatttgcactaatatacgtgtgtgtctcctgtgagaaaaagcgggtggaaataaatggttttcccgtgaaaattcttcatggaggctcttctttcgggatcattacgcccgatgggaacgtgctgatagattctttattttctggtaaaccttccattgttgtaaatcaagtgtgcgttcttccctgtgggaatggaatgttccggttgtgtgatatttcaaaagttccgatggcaacaagttcccggcgttttatccaagtgggaaactttatagaggacgtaaccattgcccaaggagaaaaggaagggcctttcattttaatcaataaatcgagtgaaaacatcgcggtaatagattcctaccggggagtacccgttcgggtgatgcataattttagagatggacttgctctggcttatactgaaaatcaaaaatatggctacgtgaatactcgtggggaatgggttattgcccctgagtatgattttgcttgtgatttttccgaggggatggctttggtcgggatggcagacagggagggacgaatcgcctacgaggtcattgacagggagggacagaacgtttttcccgtgatgttaacgaattgtcgcttacagggggtattttcttgtggtttactcgtgtacaaagatttgcggcaacactattgtgcctgtttggataaaaaagggaaaaccgtgttgtatcttcccgccgagatacaggaaatgacagaattccgtcacgacgtggctttctgtttaactcgaaatggaatcggggtggttgataaggccgggaaaatgatcgttcctgccgattacgatgatggagaatttataaattcggaacgactggcattaaagagtaaagggaaatgggccctgtttgattttaaagggaaccgtgtgactccctttatctatgataaaatatatccgtggagtcatgcgaaccgtgtttttgttcatcaagacagcatggacctcttgattgacgagactggaaagaccgtcagcacggcatatccttttgaactggactggcaatctttggaaacaacttctcccattgtacaggtcttttaccgttacccgctcccggagacggttgaagtgccggaatcggaaaacacgatactgtcagtaaagaaaccctctttaccccggaaagaaaggattcaggcgatagatactaccagcccgttttatcaagaggcacaaaaggtcctgaaaaacggattctcagagacagattcggaaaatcggagagtaatcctaaactatatggaacatttccggatgtcgtacgagacgaaagatattgacttcctagagcaactttttagcgagaaagcgttaatcattgttggtaccgtggtgaaacaactgccacaggaaggacattatcttccagccgatcagatccggtacaatataaaaacgaaacaacaatatctggatcgtttgcgtcggatattcaaggcaaataagaaaatagaggttcgttattctgattttctgatccggagacatcccacccgaccgggaatttatggcgtctccgttcgtcaggcttactcttcggatttgtactcggacgaggggtatttattcctgttatgggatttttctgacgagacggcacctaaaattcacgtgcgtacgtggcagccccggagaatagatgatcagacgttgttgccggaacgggatattattcacttgggaagttttaattttgaatgatgaaaaaaatcttatgcacgatcatactcttatggctacttgtgccgggatgggctcaagagtttaaggttgcttcgtttcggttgttacccaacgatataacagcttgggtgaatcccgtgagagacttgaatgacgaggcgtgtgcgttaatcaaagtggtcgggaatcgtgatttcgccttttctactcctttgggaatcgtgcagcgtaagaatgaagtgggtgaaatctggttgtacgtgccgaatggaacccggaaaataacgataaagcatcctcgatggggtgttttgcgggactataaatttcccgttatccttgaatcgagattaacctacgagttggtgatagaagaaccgcttttgaaggtcgaggaagaatacccgagagtacggaaagttcaccgcccgttacccaataccccgctggatgagagcttacgggctatgccgacgggcaaattgaaatcccaaagacctgcttttacaagtttgttcacgattggatgggatcacgaacgtcccgctttcggggtcatgctggcgtgcatgaaaaaacatgggttatacgtgcatgggcaggctgatttcaagtctttgtccgtggatggggaatgtcggaaggacgggagcataccttctaccggggacacaccttattacacgggttccgagaagtattcccggtacgcgtttctggccgggggaattcattcgatcgcgtcgttatgctatctatacgaggggttgggttacgggaaacggcaagtggtgtgggaaaccatcgaggggttgaaactgagaaataaagattattcctacaagggaattgccgcggaacttggcttgcttgtcaaggttcgcaaaatggccctctcgcttggagtgatcacgataaagggggaatactgggaacccacggttggagtcggaataaatttttagggatatgtacaaatggatcattgcgtgctgtttactgttacttgcttgtaaaaaggaagaggaaccttctgtgctggctccccgtatctctttaaatgaggtgacagagattactcgtaacacagcgagaatctccgcggagattgaattacggggagagggaacggttacctcgtgtaaattcctgtacgggacatccgaggatatggcggaagcgcttcaacaggaggctgaaggggtagagggaaacgtggagacttgcctcacgggtttacaagctgggacatcgtattattattgcttggaaatatcaaatggtcatagcatcgtgcgaagtgacattggacattttcagaccttacccaacacgttacccgttctgggcgatctggtcatgatatacaaggggccttttagcgcggcattccaatgtaccttggtggatgatggtggggaagccttgacaactctggcgtttacgtatcgggagaagagtacggaaaacgggaaattggtcgaggtaccattgggtgatgagggtgctttcacgggaaaactgcaaggattggagatgggtaccacttatatcgtgagtgcatacgccgtgaattcgatcggggaaacttactctacgcccgtggaatttacgactagcgaggccgtttacaattccgttcccggtatgttgccggaaatcatggggaatcaaaagtacaaccttgcctccttaaccctttccggtttcttgaacggaacggatattcgtttgttgcgtgaaatgctgggatgggacattgagggacatgaaactccgggccaattggtggaaatggatctctccgaggcaaagatcgtggagggtggaagtagctattacggatcccgatatactcgtcgagacacgctggactacgggatgtttcttcattgcagtaaattgcagcgaatcgtcttgccgcacagcttgaaagtaatcgagaaagatgcattcaaaggatgttccggtttgatctccatgacaatacccgatagtctagtcgtttacaaaacttcaagtggttgcagtgctttgcaggaattgtccgtttctcctttgaatacagttttttcaagtattgatggcgtgttatacaataaagatgcgagtatcttgatccattacccggaaggaaaaacggccgaggaattcacgttcccctcttccgttcggaagatcggggtggcggctttccagaattgtttgttggattccatcattatccccgtatcggtggaggaactgggcgaacaggtattccggggttcgagattaaaaaagatcgttatttccgatggagtttatactattccggaggcagcttttaaagagtgtgccgaattgaaagagctggtgctgggaaaagagatttcggcattgtttgactattgtcttgatggttgtaatttgcaggagctttacctaatggcaacttacccgcctgtttgttactcgtcgacgtttaccggggcaggggatattttcaatgtatgtactctttacgtgccttccggacgtaaaccgatttaccggcaggcgaaaggatggggaaacttcctgcggattaatgaacagtgatggctttattggacctcttttcggatggcttcaaagatttgtccgatttcagattctaattcattcacttgatgtttgaacaaacgggactcttgctgcgtggcgtctgcgaattctgttttaatgatttgcttgagcgccttttgcgtgtttgtactatcttgcacaagggatcgttcgttctttttgtaagcaatcacgtgccgattcaagttattctttttctgtaaaaggaacttttggcaggtcggtgcgatcaccgaattgctgtacacccggtttatgctacttttatccggttgggacgacaagttcttcaagtaaaaggttgtcaggaacgagagtagcgcgaccgcagaaatataaagaatgctcttgctatgttttctaacgttgagtgcttccagtacctcttgggcggaatgaaatctcttgtcaggatttttctgcgtacatttctgcgcgattcgaaccaatcttcgatcctttatcacgcttgtgatgtcttggatgataactcccagcgagtaaatatccgtgcggcaatcaagcgatgcgtgaggaagtaattgctccggggcgagatatttttttgttccggcaggaattttcagtgtgtcataatcatcccgatccgagagaccgaagtcgattaatttgacgttattcccgttgtgggtaatgatgatattctccggctttaagtctttatgaacaagttgcttactatggatatagtgcaatgcttcacaaagttcccggataaacttatatgcgagaggttgcgttaattttccctgtatcataaactctttcagggaaatcccgtcaacgtattccatcacgatacataaccccaagtcctcttgttgttcccagtcgatcgtgtggcggatattcgggtgatccaactggtagccgatattgaattccttatgtaataactgtttgtagaactcttcttgtttaaataggggttgtaggcttttgaggatatgtaatttcccgtaccgtcgacacagatgcaggcaactataacccgattccgaacgatagaattcggaaatattgctgaacatactctcttgacttggaatatcttctcccacgaatcccgatgacaatgaatccttatttggcatggatgcgattaattaaagtcaatcccccgttacgccctgcgataaatggcggcgttttctggttgtctcttaaaacatagccgagggataacggttgtcccatcaaaaagctgactgcctcgaaacgatctccttgtacgagcttggagtgttgggcctctaccacttcaaaccacgaatccccttggtattgcaggtgaaggtagcgattgggcgaccatccgatttcaatttcttctcctgccgagagatttctggtttgaatctgtttcgtgacaaagaaggatgaattgcacaaactgttgtctttcaggtaagcgcagaactcgttgaagttgaaaaagccgatgtattgtgcgagagaatcaagtgtctgattcctcggtttgtgcttgtctttgacataaccccacaaccgctttagggtcgaagtggatatggatacatcgagttgaagctttaagtgaagagaaaatacatcaaaatcagtggttgtccttaaattttgagagtacttcttttcaacggcttttaataattcttgtatttccggcttaaatgtattcatcaataaaaattattaatcgagtaaacaaatatagtacaataactcgatctgtacaagactgtttactgattatgtaggtggtttttgggtaataacgcctgttttaattcctctaccgacgcgacgatccgtttggctccggcttgggttaattcttcccgatccccgtaaccgtataaaaccccgatacagtcaattccggtcttccgggccccgatgatgtcgtgcttccggtcccccaccatgaccaccttgctcaagtcccggatgtcattattttccagcacgtgacggatcacctcgtctttgtgagacaacgagccgtcaagcccgcttcccccgacgaatttgaagtaatcgctcaagtggaaatgatcaagtatctttttggcgtaataagccggttttccggtagcgagcatcacttgctttccggcctcgtttaattcttgcagaagacgttccatgccgggataaacggcgttttcgtatatgcccgtgtcggcgaatctttcccggtacttccggatgccttcctcggcctgatccgcgctgaaatggcagaattccatcaaggattctttcaacgggggacccacgaatttacgtagttcgttcaaatcattcacttctattccaaagtgtttcaaggcgtaccggattgatttggtgattccttccatggaatcggtgaccgtaccgtcgaggtctaacaggatgtaggtatattcttgctgcatatcgtgggtgtgagtggataaaaaaacaggcctattgctaagcctgtttctatatttcaaagatttgtttcctgtattaggcgttcaacgtgaaacgtaagaaagcggtaacagttaaatctttatctacgctcttcaagtactcttttacagacattttaccgtcttgctcgaaaacttggtttaacaaggtagactcttggaagaatttgttcaagcgaccttgagcaattttatccagcatattttccggtttaccttcttcacgagctttttcgcgaccgatctcgaattcgtgatcgataacgttttgaggaataccgtctttatccacggcaacaggagccatggctgccacttgcatggcgatatttttcttcacttgggggtcagctgctttgttgaagccaacaacggttgccaacatgtttcccgggtgaatgtagatcacgcaatcttctgcttttacagagccgtaatagcttaattccagtttctcaccgataacaccggtttgttctgaaatctggtcagcgatacttctaccgtccagttggatagccaacaaatcttcggtagttgcaggcatattagctaaagcggcgtcaagaattttggtcgtgaaagcaatgaatccctcgtttttagccacgaagtcagtttcgcagtttaaggaaaccataactgcattctttccatcggttttggctaaaacgcatccttcttttgcttctctgtctgcacgtttgcttgcaacaacaagacctttcttacggatgatatcaacggctttgtcgaaatctccctcagcttcttgtaatgcatgtttgcagtccatcattccggcgtttgttgctttacgcaacttcatcacgtctgctgcttttatttccatattctttaaacctccatgttaattcaatttcagaagttagatcattcaatctaaaatctgaaatctaaagtcaaaaattaatctattcttcagaagcggtttcgcttacttcagctacttcatcctgagcctcaactttttcggcacctttcttgtctccttctttctctctttcggcttttctttccgtcagaccctctttgatggctccggctaccttgtcgataattaaagaaatagaagttgatgcgtcgtcgttagctgggattacgaagtcaattccttccgggtttgagttcgtgtccacgatagcgaatactggaattcccaacgtgttagcttcttttacagcgatgtactccttcatcacgtcaaccacgaaaagagctgccggaagacgagtcaggtcagcgatgctacccaagttcttttccaattttgctctttgacgagagatctgaagtttttcccgttttgaaaggtgagagaaagtaccgtctttttccatcttgtcgatggtagtcattttcttcacggctttacgaattgtcgggaagttggtcaacataccacccggccatctttcagtcacgaacggcatgttgatattagaaattttttcagcaacaatgtccttagcctgtttctttgttgcaacaaacagaattcttctacctgatttagcgatctgtttcaaagctgcacttgccttgtccaacatgatggctgttttgttcaggtcaataatgtggatatcattacgctccatgaaaatatacggagccattttaggattccatttacgggtaaggtgtccaaagtgacaacctgcatttaataattcgtcgaaatttgtatttgacattttgtgtctcctttaaagtttactttcttaaatttaatcaattgtcgggtagttctccacagaagtcccgccaatttagatactaaactcctattaacgtttagagaattggaatctcttacgagcgccaggacgtcccggtttcttacgttccacttcacgcggatctctggtcatgaatcctgctgctcttagttttgatttatcctctgcgtttactttcaccaatgctctggcaattcccaaacgtaaagcttcagcttgtccgttgaaacctccacctacaaggtttaccttgatgtcatattgtcccaacacacctaatagttcaagcggttgttttacaatatattggagggtaggcaatgtgaaatattcttctaggcttttcttgttgatcgtaatattgccttttccttcgttaagataaacgcgggctaccgctgtttttcttctacctactgcatttactacttccataccttgttatttaagtgcgtttatatcaattactttaggctgttgtgattcgtggttatgctccggtcctacgaacaggtgcatgttcttgaatacagctcttccaaggcgatttttaggaagcatacctctaacagcatgttccagaattctttccgggaatcttttcatttcttctgccggggtagaaatccgttgaccaccggggtactgggtgtgtctacgatactgtttgtctgttaatttgttacctgtgaagataactttttctacgttgataatgattacattgtctccacaatccacgtggggagtgtaactgggtttgtacttgcctctcaatagtttcgcaactttagcggcaagacgtcccacaacttgattctctgcgtcaatcaaaacccattctttctgtgcagtggctttgttgacataagttgttttgtaactaatctgatccacttttttttttaattaaaaattaaacttctgtttgtatttctttgtggggactctgggcattctatccggttgaaaataacgaggtttatcgggcaaactgatataattttcaacggagacaggtgcattgtaaagagcatggctaaggtatcccttacaatttagcgagtactccactccaaaatgaggggcaaaattacacattaatacgtgaattccaaaacattctgcgaaaagatttgttccagagcattttgattgacttcggaattatttatttgggggtaaatggtcggggggtatttttcgttcgtatggagggacgtaccctgtttatgccgacgagctaaggtaatagtcggataatcaattaattctagctgatctattccggatctctttcgtgtaaagcgctattagaacgctattaaagctctattaaagcgctatactaagaatagcgttttataaggattttaaaaatacactttaaataatttttccgcattttgtcctgtagtgatcatggtttgataatcaaatgattacttaaatcggcttcacatccggatttatcgggtttaaagaatcttgtgagatgggatatgttattgaaaattttcgcgggaaacgaatttgtaatcttccgtgtaacaggtgaatatccctagcgcaccctgtatgttcccgataagcgggacgggagaggtgatgctgccttggttggcgctgttggcctcgtagagagaaacttgatagttgtaacactcttcggtgatacgtaaaagaagaatgacgacggcttctgcttctgcgatttcttggcatttgatggtgcgttcaatcgtgacacccccggtatggtgggataagtcaagataactggtttcttttttcaacaggttgtcgtccccggctccttcttttcttgcctgcacgctatatatatagtaattctgcatgggattggatgaggttgggaagctgatcgtgacggagtttgtcaccttggaaacggaataggaagagatggcgatggggtccggtatggcggttttggccgtgatgtgttctttttcaggcgtgtagatgctcaggtaaagcgagtctagcccgaattgattgaacttggtgtcgtgcctgaaatttccgaggaatgaggggctgaacgtggggataagtttgatgatggagtcagcctttatggaaacatccagattgaccggatcgctcaggtcgatgatctcgtggattggggagactttggccgcgttcaacgtgtaaaattcacccggtttgcagtaacattcgatgaaataaccggagatctcacccatgtctttcatgggaagttcctcttccggcatgcaggagaggagcgagagaaacaagagggttaagattccatttttcatgtgattaccagtttattcgaagtgaaacatacgggataaaggggagcatgaccttggatttcgggataatcttggtcaggttgtccgtgctttctgcttgaaaataaacgaacgaagggttcgattgattatagacgttgtaggctccgacgctgagtttgaacaagaggttcttgccgccgaatttatagtcgaggctggcatccagccggtgattgttgggtaatttgtagttatagcgatccgtgtacacggggataagaatgggtctgtcatcgttgaattccgtgatgttctgggcgataaccatccccttggggaaggtcgtgtaaaccccggacgaaaaggtccaaagggtgttcaacaggagccggggcgaaatctggtaggaaaagttgatcacaacattgtgtttcacgtcatacgggggattaaaggctttcccgttattgatttccgcgaatttgcgtttggattcggagagcgtgtagttggcccgcatgtagagggcgtgatggttgagcgttaggtcgaattcgagacctttggcatggccttttccttgaatttggcgattgcttagggcggaatattcggtttggatgtccgaggcaaaatctttcacgttacgcatgtccttgtaaaaaatgcccgcgtagaaggataatagttgtccgatctcttgattaataccgatggaatactggtgacaggtggcgggctgggttccttttgcaaggggataccaaatgtcgatcggggttttaaccgtgaaataggggtagaggcttaaatattgaaccgtcttggcgtaatcggcccagatggtgaatttgttgaccgagtaactgatttttgcccggggcgaaaaggtgtgttcccgggtctctcccgcgtaaaattgataatttcctcccacgtttaaggagaagttttgattcaattggtagtttatatccaggtataattcatatagattgaagtctttgtccgaacttttgatcagaaggttttgactgtcatcgcttttgttggctgtttcgaaccgggagtattcaaattttgccccgctgttcaggttcaatttatccgagagtctacgggaataggttgcttgtccgagaagggcgtagttgcgatttccgcctcccatgggaacactgccgaaggcgtcaccctcgctgtacgtgtttttcccgccgaattggaaatcccattgctcgttggcattgggcgtgtaggagacattcacgttgccggaaaaggtgtgccagtcgaaaatgtattgcacgtgttcgctgatcttcattttcatgtggtcgagggagaatagtccgaaggcggtcattctccatttgtcggaaagacgtgaatcaatggttgcggtaatatcactgaaggagtactccggcatgtagttaggattcgtcttgtcgtccatggaccggttgtataaccgggagatatgttgtaaataagaggtccggacagaggcggcaaaggacgtatgatttttgataatcgggcctttggctttcagggcggaagagacaagtccgagagtcagttctccctcgtgttcgtgcttgtttcccggttcggggcgcatattgatgtaggaggataaaaaactgttgtaccgggcggggaaaccgcttttgaaaagggtggagttgttcagtatgtaggggtcgaacgtggacaggattcccgtgaggtggtccgggtaggcgatgggcatattgttgatgagaaatccgttttcgttgctgtttccacctcggacgtagatgccggaattgagcgcgtttgtcgtcacgatgccgggcatggtggcgaggtatttcagtacatcctgttcgccgagaatggccggaatccgttcgatccccttgatggaggagaggattcgcccgctggccggaagggccgtgacgacgacttctttcaggttgttctgtttgttacgcaaggtaatgacgaagggtgcgtcgcttttgttgagtttgtaagtttcttttttatagttgacgtgtgaaaattccaacgtgcaagggatgggacattctaaccggaagagacctagagagtctgtcgtggagcctttttcgctctcgacgcaatagatgtgtaccccgttgaccggttcgccggagtgggctataactttccccacgatgaccgtttgggcgtcaagtgatatggagatgaatataaataagattgcaaccaatttacccatatacacgcgttgtgagttcgaaattttacaaatgtagtaaacaaatccctttatgccttatggttcatgtgaataattgttgttattttgcagggtatctattaaaatttgatcatgggaatatacgtgcatgtacctttttgccggagcaaatgtttttattgcgggttttattcggtagcttcgttgaccttgaaggaggcatatctggaggctgtcgaacgggaaatcgttttaaggagggggtatttgccgcggcaggaaatgaagaccttgtatttcgggggaggcacgccttcttacttggaacacggggatctggaacgaattattcggaagttggaggaaaattatttgtttgctaccgggatggagcgaaccatcgagttgaatcccgaagatctggtgccgggaaaattgcagggaataaaggatttggggtttaaccggttaagtatcggggtgcaatctttttcggatgaacaattgaaacgaatcaatcggacgcattcggcccgtcaggcgatggatggaatcgcgcttgctgctggcatgggatttgataatataagcatggatctgattattggtttgccggggcagacggatgaggggttgttgggagatgtggagaaggcaagtagtttaccaatagctcatttgtccgtgtacatgttaagtattgattcaaatacggtgtttgaacacatggtgagaagaggcgagttccggttggaggatgaagaggtgatggccgggcgttatcagcgggtgtgtgaacggttgaaagagttggactttgaacattatgaaatttccaattttgcccggaacgggaagtactcccggcacaatacatcttactggcaacaaaagccatacatcggtttcggcccttcggctcattcttatgacctgtattccagacaatggaacacggcgaatttgaaaacttatatagatcatttaaatgaaggagcgctttcatttgagaaagaggaattaaaacctgttgatttgtataatgaatacgtgatgacgagcttgcggacaatgtggggcatggagaaacaaaaattggagggagattacgccatgttttgggaacaggtgcaggaacaagtccggaaatacgagcgttccggggatttggtggaggaaggtggaaggtggaaaatcagtgagaccgggtgggtaatttcagacgcgattttgagtgatttattcgtggtctagttttttacatgaaaaaatactatttttgcggttgtaagtttaatatttaaatgtttttcagatgaaaacgagtagaatgtcagtcaaagaactgttgcaatcaggagattgcggtaaagaggttgaggttaaaggttgggtaagaaccaaacgcggtaataaacaggtgaattttatcgcgttgaatgacggctctacgattaataatatacaggtggtggttgatatggagaaggtggccgaggaggtgatgaagaaagtaacgaccggggcggctattcacgtgaaaggtttgctcgtggagagtgccgggagcggacaggctcgcgagattcaagcgaacgaggtgatcgtgatgggagaggctgatccggaaaagttcccgattcaaccgaagaagcatagcttggaatttttgcgtgaggtggctcatttgagattccgcacgaatattttcggggctgttttccgtattcgtcacgcgatggcttttgccattcatcaatattttaacgatcatggtttctattatttgcataccccgttgatcacggcctcggattgcgagggggcaggagagatgttccgggtgacgacgcttgatccgaagaatccacccttgttggaggacggaagtgttgatttcagacaggattttttcggaaaatcaaccaacttgacggtgagcggtcagttggaaggtgagctgggtgccatgtcgctgggtaagatttacacgttcgggccaaccttccgggcggagaattcaaataccacgcgccatttgtcagagttttggatgatcgagccggaagttgctttcaatgatttggaagataacatggatttggcggaggactttttgaaatacctgatccgttatgctttggagcattgcatggacgatttgttgttcttgagcaagcgcttgcaggaagaggagaaggataagaaagccgaggaacgttccatggagttgatcgagaagttacaattcgtgttgaatcatgaattcgaacgggttacttacacggaggctattgatatattgaaaaacagcaagcaaaataagaacggtaagttccagtatccggtgacaggttggggtgtggatttacagagtgaacacgagcgttacttggtagagaaacatttcaagaaaccggtgattttgacgggttacccgaaggaaatcaaggctttctacatgaaacagaacccggacggaaagacggttgccgcgatggacgtgcttttcccgcaaatcggagagattatcgggggatcacagcgcgaggaagactacaacaagctggtgactcgtatgcaagaagttgggattccggtttcctcgatgtcttggtatctggacacgagaaggttcggttccgcggagcatagcggattcggacttgggtttgaacgtttgttgttgttcgtgaccggaatggggaatatccgtgacgtgatcccgttcccgcggacaccgaaaaatgcggagttttaagaataatttgaaataaatagaaggatgctcaagcaaaatttacaacagaaattagggttaaaaatcaatccgttgcagatacagctgatcaagctgcttgagcttcctacctatcaacttgaacagaggattaaggaggaactggagtcaaacccgcttttggaagagggagaggagaggccggagccggaagttgatatcaaggaggacggggatgaggtggattatgatgaaaattcacaggaggaagataattacgagtcttcggaggatgagttttctttagatgattatatcagtgatgaggatgatattccggactataagttgacagcatcgaatgcctcgaaggatgatgatgcacgggagttcgtgctttccggggggatttctttccgggagaatctggtggaacagttggggacgcagcacttgggagagatggatcgtaagatctgcgagtatatcattggtaatatagatgatgatggttatctgcgtcgggacgtggagaatatcgtggatgatctcgcttttggggcggggatcgaggtggacgatg

SEQ ID NO: 8 - DNA, 27922 bp, Butyricimonas faecihominis
gaattatataatatagctttttcatagtatccattttattgaatattaccaaattccaattcattatccggcatcgggaatacatacgttgcccggttcatcgtttgtgccgtgaaaggaattgttgtcatgttttgccgtttatagaaataaaagagctgcccctcggcgataaattctttttggtattctttccggagttcttccaataaattggcatcagccggtaaaggatttcccgcatatccccggaaaccgcgtaatgtttcaagaaaacgtatatccccggaagcctctgccgcgatcaagtacatttccgacaatttcaacaaaggaatccggttacccgtgatatacttgatcacgtactctgttttggaacccgaaggaatatcgaacaatcgcttactccgtacatcaagatccaatcctgttcctccaaagattcccaattttcgttcttccccgacaacacaggcataagttgccaaatctttaaaatacaagtctgaacgcccttttttcaaatcgtaaacgtaaagggaggtgatatactcatgccgtcctacactctcaacaaaagtatatttagagggttcgtcctgtaaaatcttatccgtgacacaggcaaaacgtcccgaatggatcacctcttcggcacacgccaaagcgttcgtcatgtcctccttgtacaagtacacccgggccatcaaggacgtcaccccataatagttgaaacgggatttacgatacaaccagaacccgtcatccgtgacataatcatccgccgagtactcgtcctcctcttcgtactctccaaacgacgggccgatcggatccaccggacgcaataactcttgcgctttctttaaatctcctagaatcaaatccaacgtcgcagcaacggttgatcgcgtcacgacctgattagtcgcctctttcacgtaaggaatccccggatcgttcgctcccatcttataagaaggtgcgaatccccgcaaaaggtcaaaatgcaagaaagcccgtaatgccaaagcctctccctcaaccaagggacggaccttttcactcaaaacaccaccgtgtttagagatgttttgtaatagataattacaattcgcaatcgcgtagtaattagaactccaaagtgtgtccaccactttttttatagtttcatcttgataatcatataccagcgctttattataatcgtacacgaccgatgaataggtctgtgacaatatgtccaagaatcccatcgtggagttccctccataagtatccgtacgtcccatcaaggcatatataccaatcaacgcatcccggaatcccgactccgacgtgaaaagatcatcttccttcacttgagatttaggacgtacatccagccaatcgctacatcccatgcaaaataacaatactagtaatgcagcatatctaaatatcttcttcataacatccattttttcatttcgttaaaacctgacttgcaaaccgatactaaaattacgggcaaaaggatagtctattcccctttcctgttttacagaggaagcatggaacacgtcattcatataaaacatcgctttcaagcgtttaattcccaatcgtttcaaacgggccacgccaaattcgtatgccacattcaaagtcgccagttccaaataattataatcctcaacgaaacgggatgtcggacgagtgacatagccgacattcatcccgtcataagtctccgagaatgccgcgaaacgtaccttatcacccggtttttgccaacgttcttcgaaagcccggcgatccacgttataacgcaaatccacgtcctgcaccttatccactaacgtttgattatacatttgccccccaattcgataccggaaagtcatgttcaacgacaggcctttccacgtaaaatttgtaccgaaagtcccttccacatccgaatccgtacacccgccaatggcataattggctgttgaccattccgacacgatgtcgccattccgggctttaaatatttcattaccggtagccggatcgattcccaacgattggttcacccagatagaattcatggaagctccttccatgtaacgaaccctcgggcgattcacgccatccttctgttctcccgttgctgtcaactcatcctgtgtctcgttgtaagcccgcaaggcatttgaaatcttcaacaatttattcttattatgaatcgcagacccattcacgctccaataaagagagtttttctgatttttcaaaatagccaccttcaggtttaactcccatccccggttttccacttctcccagattatccatgtaagaagaaaagcctaaagacggtggcaaggttacggccgttaacacatctttggaagtcttgatataataatctgcggacaaatcaatccgatcgccccacagggtcaaatccacaccataattctgttgtaacgtacgttgccatgaaagatcccggtttcccatcgccatcacgatcgcccccacggcgtagtgataacgttccccagtcaggtacccgtaagttgttatcgcctgatacgggtcataattctgacttccggtcaacccgtaggaacccctgatctttaattgttgcagccaattcacattcttcagaaatttctcatgatgcaaattccatcccaaacctgctgaccaaaaaggagcccaacggttatccgaaccaaactgggaagaggcatcctcacggaaagaaagatccaccaagaaacgctcgtcataactataattcaaattcccgagaaaaccgaccaaacgagaggtatattcatccccctccggagaacccgatttctcgtattgagtggcaaaactgatgtagtccaaattctcattcggaaaaccttccgtcctcacggtaaatgattttgtctggttttgctgcacattccatcccagatttgaattaatcacatgtttctgatgccgccagaaatagctcaaaacgacactggcatcataactgaaattatctcccctcgaagccgtgtaggatccccgacgatcaaaatcatccccggtatattccgcaaaatcagtatgcttggcaggtttaaacacatcctcgaatgtattttgaagcgtaaaagagaaactgcccttcaaacgtaatccttccaaaatataccaatcgatcccgaacaaattcgtcaaatcattatacccggactcgtccgtcacgtttaaagtcgcgttatacaaagggttataaataaacaaacttcgaactgtcggatgccaacgatcatcctgatccaccgtgtaaatcaaattaccctcttcatccttgtatttcacgtaaggattcattttcgtgtattcactgaaacttccataaggagagttctttgcctttacccgggaataattcaactgattcctaaaagtcaatcctttatagatatattgtaattccatccccaacccgatacgttcacgcccggactccttcatcacaccgggagtattattataattcacctccatcgcgtaacggatataatcgtttcccccatccaatcgcaaagagtgtttatgagcaagcgtcacgttattcaacggtttgtccaaccaataggtatttacaccttcccggacattagctaaacgataattataagcctcatccatgtacaccttatcggagaatttatcctgagtataatgaagtcgtttggaaatatcatacattcctgacaatacttccaagttcagtttctcttcggcattacacaaattatagtccgtcagatcagccgcataaaaagtcatatccccattataacttaccgacatcttcccaccggcaggagccaccgtcgtgataaccaccaccccgttcgaggcccgagaaccgtagatagccgtggccgcggcatctttcaataacgtgatcgtggccacccgataaggatccatatcaaacactttctccgcagtagtttcaaacccgtcaacaataaataccggcatattgggattcccggaatactcgtcccgaaccccgctaatactcccggctccccggatctggaaatccggaatggcattcggattcgaacccatctggttattcgctaacttcacaaacgatggatcaatattttgcaaagcactcaggatattctgatttccaccctgttgcaattcctccgccgtgatcgtacgggcagccccggtaaaactattttttgcctgagtataatatcccgttacaatcacgtcatccaactcactcacgacatccttcatcacaacgttaattccagtctgtttgcccaccaccacctctttcgtctccatgccgaccatggtgaaaaccaaaatatgattttcttttccctcgggtaatgtcaatgaatattttccatccatgccggtagccgttcccagttgagttcctttcacaatcacggttacccccggtaaagcttcccctttctcatccgtcacccgaccggtaatcttgatttcctttttttgttgattcaaggcaagcttacggacaatcacgattttatcgacaatctcgtaatcaaaaccattctgacgtaacacttgatccaaaacctgtttcaatgtcgcatctttcaattcaacactcttcactttgagattttccaaactttctctacgatacacgaactcgtaatccgtgttcgcctttaaatattccagcacgttttcaagcatctcgtcatggaataccacatccattttttgttcttgcgagtaacccatggcactaacagaaccaaacgcaacaagcaaaataagaactttcaatgtcataactaacagaatttttcgcaatcttctcccaagaagactacacgtcatactcttttttttcatacatttgtaaagtattacattaaacattcatctgcgaccaacagatgtttggtaaagggggaatcgaccaaattccccttttttatttattgataaacagtaacagattgatttttcacgttaaacttcacttcacccgttttctccaatatatccaaaaccgactcgaaagaagcataacgaggaattttacccttaaacgtagcctcctttaaagacgcgttctgatagaaaaccgtaaaatcgtaccaacgagctagtttcgacataatctcctccaaggtatgattctccaacacgaacatcccgtttcgccagcttatgacctccgccacgtttaccttccgggtgtacatcttttcatcattcaccacggattgcattcccggatcaagaatcacggtctgaccgtcggcatccaccttcactttcccactgaccaaagtggtataagtgttcttctctcccggataggcatccacgttaaactcagttcctaacacttccacagtctgttttttcacgacaacacggaaaggctttctctcatccttcgtcactttaaaatacccctctccctctaattccacctctcgtttatcatttccaaaagtaaccggatatttcaatttagaatcggcattcagccaaactcgggttccatcggacaaaatcaagtcaaactcggcccccttgggaacttcaatcgtattataggccaattgcgcttgctgtggcaaattctctgccgagtaagacaatgttgattctccggtcttctttaccaaaattccagcctcttcaaaatcccccttcaaactatccaacaacattgtagtcccgtcatctaaccttaacacgggacgttgtggtttcatcaaagcgattgccacctgttcctttacaggttcttctgtttccctctcgaacaaatataagctactgaacacggccactacaaatactgccgccactgctccccaacgtaaaacccgtaatcttacctctttcttacgttggagctgcactcgcttctccatatccagtaatgccttccgacgaccgattctttggtagtttttaaaaccaacttctaggaatgctccatcttgccagcgatcgtacaacagcttattttccggagaaacttctctccattcctccagctcccgaagttcttcttcagaaagctgtcctactcgctgtcgggcaagtaatccggctattcgaaaccatttttcgttctcacgcgtaatcatgcaatcatttttttaatcccccctataacgcaacacccctcaaaaggggcaatagaaaattgaagttttttcaaaataatttctataagcctgaaaataagaatagaaacaaagaaggttctagttttttacgcaagaaatccaaggccgtcgccttgtattttttcacggagctatcggataaacctaatttttctgcaatctccacgttctttaacccctccataaagctcatttcaaaaacgattcttgccttctccggcaactcctcgatagcgctatacaacaatgtctgagcctcttgatcaatcaccgaattggcaaaacaagatgcatcctccaactcccggacataccgctccctagctgaatttttccggtgaatactaatgatgtcatttttgatcgccatgtaaagaaaagccttgaacgtgtacacggaatcgaatttatttcttctttcccaagcactgaaaatggcattttgcacgcaatcctctgccaaaaactcgctttcctcccccaaatacttgatggcatacaagattaatcccgggtaaacattccgatacaacaaatccaactttcctcgctggaaatcaattaatatctgtgcattccaattcacttgtcaagttttaccgtgtaaacttacataaaaatctttgattttttatattacctctacaaagagaaaacaagaatagtaattggagtaatatttaacgactgactactttataagttacaaagtagtcagtcgcatcatttcatttaaatcaatatcgattcctacgaatacatatcaccgccccggaaacggctaacacgatcgcaattccccaaactaaaaacatccttacccaaaaagctccttcttgagtagtagaaattttagtatccgtcaccttaggatagttaaaatacaatggggcctgtccatgtgtcatccaatcactaagcacccaattcatcgcagaaggactatgcccccggaaaccctgtcgcccctgtaccagctcccgattactcatccaatcggcatcacccgcaataaaaatacgttgttcacggtcctcaacctgacgagttaatcccagcacggtagtatttgacccgacaaactctccttttgctgcatcaggctcaataggtcccataatccagtcaacctttcccactttattccacgaatccagagcactttccatcatcgggaccacacgaaaatcgcttgttcccgtaacctttaatgccgtaactccattcatggccaacgcttgtaggccaaaaggatagtgccgtccgtgaaaaagagctcttccctcgggagtaaatctactgcataccacgtttgccaactcgatgacgggtttctcagccaaacatcctgtcatcatgctcacgccaaaacgatccaataacggctgaactgtagcctgagtttctggctctactagcaagatcaagtttcccccacgagcaatataagcatccagatgagccaactcttgagacgtataaacctgtttcggatcagcaatcagtaatatcgagagtgattcaggtacaggttggtcaagtccgatttccatcccgtcaattccttgatttaaccaagaataccgattaaaaatactcgttgctacccgttcataaccacggttgctactatcatgaatagaacgttctccatgtcccgtgaccacccctattttaggcataccacccaacaaccgtttaaaagccaccataaactcctgaggagtaggtagaggaggaatatcatcaaagatacgcaatacactgcgctgcccgttcaactcgaaaaagcggaccagccggtaatgctccggtgcaagatccacgatttgatccatctcttctttcgttttgaagatagaaaaatccacccgactcaaccgggcaatctcccgtgccgtttcatcaaatgtcagattagccttcatcctctgtatttggtgaggcttatccgtcggggcataataatagacatatttaaggtcaatgtccggtttaaaccggacatacttatcaaaactagccctatcctttgaaatattggcaggtaaagctagagaccgataaggatccattaaattcacatacgtcgtgatcgttaatttcccttgatctttcaacgccagaataatatcacgacattctttcgtgatcgtgttcacgttattttccgtggaatcaaaataacagcgtaaaaccggacaattagaaatccacccgcataaaacaataacactcaggatacctacgtaataaagtaccttacgccacaccggataatgataacgccccaaccacaatttcaaaattgtaaaacagaggaataacagcgttatcgccacaaaatatactacattctgactggtcaataatccatccaaaaacacttttatccgcccggaaagagacaaccaagttgtaatctcccggataccatcccaattttgcccgtaactcccgattcgttccaaaacgataaaaaccacgaaagaaccaatcgctgccaccacgggatagcgagtcaaggacgacataaacaagccgatagcggaataggttgccatcgtcaaaaacattcccagaaaagcgacccaaatgcgagcataggcaaaattctctatgctaattcccccgtaaatcacaaagatcatccataccccaagtagcaccaacgcatacaccaacatcgaaaaaaacttaccaataactacctgaatggtactcaccggggaagaatccagtaactttatagatccactcgccaattcccgactgaataaccccatggtcagcaatggaaaataaatatagagataacgcatccctgcatgaaaaacaccccatccatgataatcccggctaaaaaaccaataggtaagccccggcatttgctgcccctctgccacggctttagccacactatccaaagtatcacaaaaagcgacagaacactgtatggtgaaaaccactaaaatcagccaagcaatcggagaataaaacaacgattgtaactcggctttcattatataatatacctgtttcatactactcttattgtttatttcgacgataatacaacataaacccaaggaatgccatgaaagccggaataaaccattcgtacaaataatatatccattccaaatccttgtccctgaaattcaggttgccatcgtccacccatcctctcgacgtgtttaccggagccttactatacaccaaccagctcatcgctgtcgaggcaaaccctccgggattcgggtatagtccttgataattagtagagagtccgatattactcatccattcggcatcagccgtcaccactacccgttgttccttcccctcaacctgacgccttaatcctgtagccgtcacgtaaggtctggcaatctctccaagggaaacatccggttttaattctccttcaagcaaattcaccttctcacgcttcaaccaactgtcgggagatgatgcgaataagggaaacacctcaaaacgacatcttgaagagtcaacgagaagcgttgttgtcatcttcaagggcaaagaatagcctgcccttatccaactctttaaccccggaagtatctcaaaagccgatggtaaaacagaacaaatagcgatatgcggcaacggttcatcattcaaatgcggttcaaccagatacccctcggcaaaacgaagtcctaaaggattggcaatctcattcattactttttcattcccggcatcccccatcaacaacaagtttcccccttgttctacatactcatagaccatctttaattcctctttatcatattcctccaacgggttggcaataaccaataccgctgtattttcgggcaattcaccctcgctaacagacaccgactgaactttatacccttggtttataaaagaagcccgaatatacggcgtattaaacatcgcatcatacccgtccctcaacttagaggtaatgtcgggagccccacgcccagtcaggtaaacaatcaacggtaaatcctgtgtcatccctttaaatgcggcagaaatctcggcctctgaaggaagtacttgattatcctcgaacaatcgtaaaggacgtggttcctttccttcaatctcgataatcttaatcaccggattttcctcttgccccaaattcacgggacacagtttctgagcctccgctgccgatatcacctttgagggatcaaggccctcaatagaagcaattcttttagccgcagaatccaagcctatactcggtatatatatatttgccgcctgactaaaaaaacgggttcccccataataataaacatattccaactccatatccgggtgaaaccgagtatattgctcaaaacgggcatactctgtatttacactccgaggcatactgaacccgctgtttttatgcaatatattaacaaacgtagtgatctttacatgtcccttcactctctccataatctcttggctggcaactgtaagcgtgttcctcttatcctccgttccatcagcataaaatttaaacatcggacgagaagacacgtatcccaaaaacaacacgacgatcacaaccccgacataaacactacatttcttccagaaggaccacgataactttgcaaaccgcaactttaaccacgtcaaggtcacacacaaaccaatgatcaaaaggtaataaaacacgtcagcactcgcaatcaccccctgtaaaaagctaataatacgggaactaatagaaagccagtgagtaatatcacgcataaaagcgtactcctgccatatactcccaaccatattcaatgccgccaaaaccccgaaagttcccacggctgccacgatcggataaatggaaagtgacgacatgaaaagaccgattgccgagtatgtacacatgagtaaatacattcccaacaaccccgtgaaaatagccttcatttccagattctccacggtaaatatacccagtattacaggaataaataaaacaacaatcagtaacaacgagaaaatacacatcgaaaagtacttccccaacaccacctgccaagtactaacaggcgaagaatccaacaattttatactaccactactcaattcccgactaatcaatcccatcgtcaacaaagggaaaaaacaatataacgtgtccaaaatagccgcataaatcccatactgatcaatatacaacctacgggtaacatgccctatcgaatcacctagttcctgagttcggaccaacaagtcaaacttatcgtaaaagacattaaacacccagattcccagtactaccagcattaaccaagccaacggtgagaagaaaagcgtttgtaattccgctttggttattttccaaattaatttcataccaactcttttttcccgattcgacttttcccagacaactgggcaaatacctcatccaaagatccccgttccagattaatctccgttaatttccatccaccttcaactgaggcacaaacaacccgatccgctatatccgttgcatctgaaaagaaaagacggtatctcttctctgtcagcttatcaacccgttttatggatggcaacgaagccaatacattcacgtcaggagccgcatccagcgtgatcaccaaagaattcggttctatataattgtcaaactcttctatcgtcccggaaaacacgcactttccttgcgtgatcataatgatattctcacaacttaattgtacttccggcaaaatatgcgttgaaataattactgcccggtccacggcaatctccttgatcagatttctgatttccacgatctgaataggatccaaaccattcgtcggctcatcaaacaccaccaccttaggattatgaataattgcctgagcaattccaacccgttgctggtatcccccggacaaattcttcaacaaacgctttctaaaatgcgcaataccacaacgttctttcgctgcctccacggcctgatgtacctccttcccatccattcgcctcaaatgggcgcaaaaatggagatattcatccaccgtcatatccggattcaaaggtggtttctggggtagaaaaccgatatatttctttgcctctatcgggtgttccctcaaatttatcccattaatataaatgttccccgaagtctgattcaatacaccacacataatattcatcgtggtcgactttcctgcaccattcgctcccaacaatcccaaaactccccgattcctgatttcaaaactcaaatcctgtacagcccactgcgtggtgtaacgatggtacaggttttccacttttacaattgcttctgacatctctttgttttttacattcatacatacaatacgagagtatgtgtcccgaaaaaacgggacacacctctagtttataaagtctataaagtcaaaccttcggttctgaaagttcataaagtcccaaaggactacagtaaaccttgtccgaagaactcccgtgaccttatgaactttatgaaccttatagactttatgaactcattttattcattacatagattctctcacggcatccacatcaaacccagcctcttccaatatattcttcaacaatctaaatcgttcgattacgaaaggaaatcccgtatatagccctttaaactcttctagggaatacgtgaaaacagccgccatatacgagtcaagatcagcctctttgctcggcatccaataagaattcaacaccagaatcccatacgcctctggacgacatctcgcatattcgttacgccatgttgtttcattcgttttggcagcctcccgaacagctatctcattaatacatcgaacatattccggatcgtcctccgtcaattctccattaccaacacgaatatccaattctgccttcaagattctcaaagaatccatatcctgttgataattttcgatatactctatattagtcagcacctccgaataaaaggggaacatggcactggaattcccataataggaacttccccacggactactggaataagcggctaaggccacctctgccacttcatagaacgggtcaactaaattctcgatcttttttgcacaagtctggttaacaaattccgcccggtacaattttttcgattctgcattatttgcaaaatcggccagggaaatccctaagaaattaaacccgcgatatacctttttagcactattactcacatagaaagtctccgtaatcataatcgccggaatatgcacttccgcactctttacaaaaggcaataacgaggcatctaaaaaatctaacaacggcaataatctcgcctttcctgtccccgtacttacatccactggggtccaagtcacccgattcgtgtaggaagacgtggtcatattgtaactcagatccaacacttcataatgataaacaatattcccgacagaatcccggcgtccccggtcctcccgtcctagtgtatcattataaaacaccccaatttcataacctttccagatgtcatatattttctgatccacaacatctatgttctcctttgctacgatctcaaaccagttctttacctccgtcggtctcaactccgcctcatccgaacaactggtaaaaaacaacaagcctaaactatataataataactttctcatcttcttgatttttagtttttaacgacaccgtttcctcgctcaaagttatacagcactggaaaacaataattaattacatcctcaggtacaggaatcatccaatcccccttcaatgtattatcataagccttcaatgtataacttccttccaaaaccgcctcactcgtagtacgagtatgccattcatgtttcacttgaatcgtctgtttatgaacagaattcacggcataccgacgtaaatcgaaccaccgatgtccctcaaaacataactccttctgccgttcccgacgaataaattcaatcaaaccactcccgctggcaggtatggccggtacaaccgtgtaccgtgtttccaaaaactgacgcatcgtttccaccgctcctgcatctcccgcacaagcctgagcctctgccttattcaaaaccacctcagcataacggatagaggcaacttcattaaaatccatcccttccacaacaggcatgaccggagtccccgtgatcggatctgtttctacaatcgcctcattaatagccgcccgatatttacgggaaaccaaataattcttctgataggaacgagcaaaaaaagcactatatctcacatcatttgcatcaaacaactgtaataactcatccgaaacgacatacgaatcccccatcacgtaagccacgtcaatgtaaccatactgaagattcccgttttcatcaatccaagaagaataggttttactcacgtatccggtacccccatgcacataactcataacttcccttccttgagtataaatcacctccggtaaagaagccgtcaaaaatgcttccccacttccgggagtatagcgactagctaaattatacagagtatatccttccaccttattagccgcttttaccgccaaatcgtactcttccatataaagatatacccgactcaacaaggcataagccgcagctgccgttacatgaacctttgattccaatacagacccttgctccaacaacgttgccgcttgagtcaaatcacgcacgatctgttgataaacctctccggtactcgcccttgcaaactttttatcttcaatggcaggatcaagctttaaggtcacgcttgccccgtcattcaaattacttttgtcataagctgccccgtaaatatttgccaacatgaaataattccaagccctcaaataataacattctcccagcaccctagataattgttctctttccgcgtctttcttaatcttacaattaggagcctcttcaaggatagaattaagaacagagatacgagtatagaaactggcccattctccatcactccgtgcaacaccggtataagaagtaaaaggattctcggcccagatataaaacccggccatcttctcccacacttgatcactcttgctaacagaactgttaggaaccggcatctctttcgattcgtcagccatgatatgcaagtaagccatcgctcccgtggcagaaatgctcccgacatttcgagtgagatagccaccgcccagtaataattcgtccaaatcgtccactgactccacgtaagtcgagttttgcgaatactcttctaggaaatcaccgcaagaagagcaaaagaaaaacaaaaccaccaacagatataatatatttttcatcatctctaaaattagaaattaacattcaaactaacagaataagtcggacgtaccgagatatttaccatgctactcgtacccgattgttccgggttctgccctttcagtttcttgtcacaaatcgtgaataaatttgttgctgacaaagagatataagcactcgtcattcccactttctgaatcaattccttgtcaaacacgtaacggaaactcaaagattgcaaacgtaaatagtcacctcgtactacccgtagatcagaataatcatacaattcatatttggatgcgttcgtactcgtaattggtgtccaagccgaataaccgcgccaccatccgtagtccaatgccacatccgcagaattaccttgagccgtcaggctggtacggattcccggaatattggtgttcttctcatctccgggacctctccaacgattcacgaactcttttctcaaattgttatgaggcttcggattcaccgcactataatccccggaacaaagtttaaacatccgaatcttattcccgatactataagccagattaaaagaaagactgaaattacgataggcaatataattatttaaacctccctgcaaagtcggcaccctcgtcccggactctcccaacacttccatccaaacatctttcttatccgacaaagccatctcgttatatttctcgattaactcatctttaagctcgtcttctaaacctttgaatgtcggaatacccattttatccaaaccattgaaccgataagaatagaacgtattcaacggagtaccggcaatataagcgtttccgtccaacaaatcctttaccgtaatctcatcctgtaacgtcttgttattcttattaatagccgtatttactaatttattcaaagtttgcccgatctgcggatcaattctccatacaaaaccccgtttgccgcctttacctgaaagggcattgtcaatcgcggtgaaatacaatgctaattcaacccctttattctcaacatctcccgcgttcaccacgtaattcgtgataccattctgactggccacctttttagacaggaaagcatcttttgtcttcttgtagaagaaagcaaatgacccgttaatcttgccatgcaggaaactaaaatcaagtcccacgttataagaatgtgttttttcccatttcaaattcggattcggataagctccaatcgtcgatgcaaaccctcctaacgtttcattataatcccccttcttgataattagccgagtaggttgattattcatcatatttccttgtaaaccatacgacaagcgaagtgccaaattttcaatccaatctatatccttcaaaacatcatttgaaatattccacctcccggatatagaccacacgggaaataatttttcgttactccgactaccgaaagcattcgaccaatccgcacgggcattgaaattcaaaatataacggtcatcataaccgtaagtaagcgtcaagaacccggacatcaaattcgtcaactgatccgtgtacaccggattattattcgcgttccaccgatgataagcataataagcttcgaaatcagccggttgattgatggtgtaagtcgggaacgtttttccccgatccttataatatcctctcacctcttccgcaaccccgttatactccgtcgaagacaactcatatcccaacatgacattcgtgaaatgttgccgttccatccccaagtatttactataatctgcctgcaaacgtaacgtgtaactattatttttcgtcgtgatcgttttcaacgttcccccaaaaggacaagtcgaagcatattttgactgattcgctcgcaaaagagccgtgtgattcgaatcctcaccaaaccactcctcctcattcgtgtaattaaactgataagaccctgttccgatcaatttaaaatcctccgtaaacttgtattgtaactgccccgtgatagaaacagagtattgatctatataccggctggaattcttcatttcatccacaatattaaattgggaatacatactcccatctttcttgtaccgccaatactccccatcttcaccataaagaggaatggcacggttcatactatgggcataactcatcacattcaactcatccggattatactttttattcgtcacactcccgttgataccaaactgggcagaaaacttgtcataggtcgctgtcaatttcaaagccgaagaatatcgtttattctcttctcctttcacgtttccttgttcatcagcatacccgattgaagcataataacgaacatcctgtgatcccccgcttatactcaatgaatgattgtgagagaacacatcttttgtcaaaatcttcaaccaatccgtattcatagtttcataccattgagactgtcgcttgaattcatcataactgattgaactatccatgaaataatccaaatacgctttctcgtacccaatccaatccgaaataccgtcatacacaccattatagcgaactcccatttccatcaattcccgtgatacatcaaccctctccttagaattcatcatataaaaacctcgatccgtgtatcggggacgttgcgtaaatgtaccactcatcgaataagaaactgtcggagctcctatttttcccattttcgtggtaatcacaataactccattggctgcacgagccccgtagagcgccgtagccgatgcatctttcaacacgtcaattcgctctatatcattcgggttcaaaccggaaatcgcatttcccaacagattcacaaagtccaaatcattcagttgagccgggtccacgttcaccggatcctgttgtatgattccatccactacccaaaccggttcttgacttcccagaatagttgatgttccccggattcgtaacttgggagctgcacctacttggcccgtattctgcataaatgtcaatcccggaatacgcccttccaacatcatatcaatccggttactccccggcacatcaatgtcatccatcttcacggtattcacggcactcgtcaagtgtcgtttgtcgatctgttggtaacctgtcaccacaacctccccaatctccttcaaatcctcttccaacactacgttaagactatcggatgtttccgtgaaacggacccgcttgtttttaaaacccacaaaagaaaattccaaaaaaccctctcgcacgggtaacatcaacgtgaatacacccatgctattagttgccgttcccacggtagtaccttccaatcgtaccgtcaccccgggtagtacctgtttcttctcatcagtcacctttcccgcaactcttaacatagactgttgctgttgtccctgaatctcatctgcccgacgttttaccacgataatattccctttaaaactataggtcagatccgtaccctcgaataaacgtaccaacaccgtttccacagtttcatcttttacctcaacagacaccttacccaaactatttgtctgttcagtattaaaaataaaatgcaaatttgtttgtcgctgaatctcatccagtaacatcttcaccgtcacctctttcatctttaaactaacccgctcttgctgggcaaatgaacttgccgaaagagaaaaggtgaaacaagacaataaaacgagacacattctcataattttccacaatttacgccaacatcccgaaagggatcgaaggcaaatccgatttttttccatacttttgtaattgatagttagattatttaccaatagaccccacacaataaggtttatcggagattaaactagcggaaggtgcttccaacgccttccgttttttatttggtaacaataataattcgttcttttatcgaaaatttcactcccgtagcctccgtgattgcatccagaatatctcgaatctctttatagcgtcccaagtgtccggagaaatgaagttgtttcacactgtctgtctcatagaacacatccacatcataccacagcgaaagtgtgttcataatttgttctaaactctcctcctcaaaagcaaatatacccttcgtccacgccacatattgctggacatccacgctcctaacttcaatctctccacgctctcgattaaaacgagcccaactacccggagataatatatgttcataattcggtaatttaatcccgactctcccttccactaaaacagtctgaatccccccttctttatgcgtattcacattaaaagaagtcccgtaaaccttgatctgcattccatccatttccacgtaaaaaggtcgtgtactatctttttgaacttcgaaataagcctctccgtccaaataaacttttcgctcctgtttcccgaacgtcacgggatatctcaagttcgtggcagaattcaatatcacggatgtcccatcggacaacgttaaacggaactctcctccccggggagtcttcagtgtattatatttcaatttctcttctctcgaaacaacatcattgtcgtacactaaccctttatttgtctgtctggccttcaatcccttgtcaacttcaatttccccttgtttcatgtcttgtagggccagcgttgctcctcccggaagtaccagcatagctttaacctgtcccggttcaatcaccttactaatcaaggtgttctccgctttctcttctcggttcaacaaccagacggaaagtcccaccgctaccggtacggctatcaccgccgcatatctcaatgctcgcctccataaagaccgtcgtttcggctgaacctgttgttcaaaacgtcgccatcccttttccatatcaatccggcaaaactcaggaaactcctccgcaaaccgtccttcttccttcatctcttcaaaaaaacgacggtttccctcgctctcctctacccaacgttccaactcttgtcgttcctcctcagaaataacaccggacaaataaagtcgaatcattcgaactattttctcattaaagatttccatatccattctctaattttgcaccacatacgacgagtatcccaaaaaggggtaagtggaaaaagacttttttcaagaaaaatttatagtccgaacgaaaagtaggctagaatcaaagcacccggaacataactaataggacaaataaattccccatccgctctttcaagaaacgaacagcattctttttatgggttttaaccgtttctatggaaagggacaataattcggcaatctcctcattttttttaccttttagatgcaattcaaatacttcccgacaacgatcaggcaattcacgaacagccaaatacaactcccggtaaatctcctctcgcatcaaattatattcccgttccctctcatcatcatgattggcaagctggtaagcaagataccgattttctaccgctttgtgctttaaataatccagacacctattctgaaccgcatcatacagaaatgccctgaatccatgaaaagaattatattccttcgaactttcccagatcgccacgaaaacttcttgcaccacatcctcagctacttcccgctgacggacacgtttcatggcatacagcacaagataattatagaagtgttcgaacaaaatccgaaacgctcctacttccttggcattaatttgctgaataaatttatcttctgaaatatccattcactccctaattggattcttgacaaatataaaatattccaactaagaaacaaaatccagcgaactgattattttgtaagttacaaaataatcagttctatcattttcacttaaaccaatcccgtttcaaccacgcctcgaacagaggatcttgaaatgtgatttcatttcctctcacatcaattacttcccgttccataagagcttgctttattctaaccacatttccggaagtaccaatccgataagcctgtaatgtttgttttgaacttaattgcttttctcccgctattaatgccttcaaaaaaccgagctgggcattactaaacgtttccatgctattcagaaaaagtaggctcaactggtcaatcaacccattatacgcttccttaacaacagatggcacgactaacttctctgtcctaagccacacctgttgagccaattgctgcacataatacgggtgcttatcgaccaatcccaccaataactgaatttcatcccgttcgataaccttattagtcgtttggaatttttgtcggataaacgggacccactcttccgtttctattttttgaagaaacattaagtctccaaacttataaaaaggcattgaaacattcgcaaaaacatccatcaacatgtgtcgcttgctaccaaacaagcaataagcaacgtgtgcgtgtcgctgccaatgggccctcaacttcttttgaaacgccaaagaatccccgaaattagccacgttctgaaattcatcaatacaaataattaaacgaatatttttagatacagccaaaacctctgccaagtccagaatatcatccggattacgtttcaattcctccaacccaattccaaaagacagctcactttccacatcagccgtaaaagaaatccgggggatcaagcgggcaaggaagtttttggcattcatcgctatttcttcccacttggaagatacagatgttaaaacttttttcgccaataacgtataaaactcctcttcttccctcacgttaaaaaggtcaatcatgcataatttcacatctccttcagacgctaggagttgtttggcagcatgcgttactagcgatgattttccccaacgacgaggagaaataataatcgtatttgtcagacttctgaaattctgcaacaaacgttctgtttccactcgccgatccgtgaaattctgatccgtagctattttcccaaaaacaaaaggcgtttccatatttattcgttttattctagaacaaatataactgattattttgtaagttacaaaatagtcagttcataaaatataatatggataaacgatttagctaaataactcccgacaaatatctctcacccgggaaacaaatctcacttttatatgtgcgggaacttttgtcagcgctttcttatttcccgccggaacaaatatttgttggaatccgagtttttcagcctccagtattcgttgttctatacgactcacggcacgaatctctcccgacaagccaacttctccggcaaatacggtattcgtgggtatcggagcatctatatttgaagaaagaaccgccatcacgacccctaaatccaaagccgggtcactcacccgtattcctccggcaatattcaagaacacatccttcgctgccaaccggaaacccacccgtttttccaacacggcaagcaacatattcaatcgtcgcgtatcaaagcccgttgcagaccgctggggcgtcccgtaagctgccgtgctaaccaaagcctgcacttccaataaaatcgttctaacgccttccatggtggcagaaacagcgactccactcaaatcttggtcatgattggatagcaacagctcggaaggattggccacctgtcgcaaaccggattgtaacatctcgtagattccgatttcggaagtcgaaccaaaacggttcttcatagagcgcaaaatacggtacatatgttgctgatcaccctcaaattgcaggacagtatccaccatatgttccagaatcttcggaccggccaactgaccgtctttcgtgatatgcccgatcaaaatagtcgtaatcgtattttctttcgagtaacgcagcaacacgttagtacattcccggatttgcgataaactccccggaatggcatccacactctctgttgccagcgtttgtatagagtcaataatcaataatttcggttcaagcgcacgggaatgttccaataccgtttccaacgagttccccgaaaggaacaggcaatcgtcattctccgcccccaatcgttgcgcccgcatcttgatctgcgacacgctctcctccccggagacatacagaactttcccacatcgattatgtaaggcaaattgcagtaccaacgtcgatttaccgatacccggttctcctcccagtagaatcatagaacccggtacgattccacctcccaacacccggttcagttctccatctccggtatccatacgctcatccgcattcgccttcacctccgacaacttcaaaggccgtgaagaactcgcccccacgatagaagccacccggtttcctttggtagaaacttccacctcttccacaaaactattccactccccgcaagtagagcatttcccaacccacttggattcctttgccccacaattctgacaaacgtacacggtttttgttttagccatacaattgaaaattggaaattgaaataagccatctaaataataacctctcctcacctaataggggaaaccacttggtaatcaactctccccctgtgtaagggggagtcggtgggggtagttctcaaataaaactttttcaatatcgttattcttactatattttctataaatcagattatcaacaaaatgaattttcaattaatcaaagatttcatctgaagaatcgtaatccgtcattccctctcgatccgcatccccacaatcaagcacatgatttaccccgttcggtttctggaaatcactttgcggtacggcaagagatttatccgcatatactttctgcataaacaaagcccaaatcggaagtgccatactggctccctgtccattcgccaaattctggaaatggatagaacgatcttccgcacctacccaaacccctccggcaagatcaggtgtaattccgataaaccaaccatcagagtgattctgcgtcgttccagtctttcccccgatctggttcttaaaaccataccgaaaacgcaaacgacgacccgttccttcatccacaaccccctgcaacaaattcgccatcaggaatgccgtattttcagtaatcacctctctggattccgggtagaaattcgccagcacgttaccatacttatcctcaattttagtcaccatcatcggtgcattatatacccctttattcgcatatatcgagaatgccccgaccatctctttcacggaaacctcggaagagcccaagaaaattgcgggaaccgggtctataaaactcgtgattcccatccggtgagccatttgcacgacggcctccggggtaaattgtttcaatacccaaccggaaatattattcaccgaatttgccaatccccatttcaaagtcaccatctcaccttcccgcttatccgtggaattacgaggcgtccaagtcgtcccgtccggcaagacaaacgtctgttgcacgttcaacacttgatcacaaggtcccaacccctcctgcatcgccaacgtgtaaagaatcggcttgatcgttgaaccgatctgtctttttccggtacttaccatatcatactggaaataacgataatccggtcctcccacgtacgccttgattcggcccgaagaaggttccatcgccatgaatccggcccggaagaatgacttgtaatgtttcaatgaatccaacggactcatcacggtatcccgtacacctttccacgtgaaaacagacatcggaatcgctttatcaaaggatttctttatctcttggaaactcttacccgccttattcattgaccgatagcgctcggtacgacggatagaagtattcaaaatatcattgatctcggaaaccgtcaaatcattcgaaaaaggcggatgagcttttctacttctctcggccataaatgccggctgcaacgttcctcccagatgttccgtcacggcctcctccgcatatttctgcatccgggaatccaatgttgtataaatctttagcccgtccgtgtaaatattataatgcgaaccgtctgatttcaaattcttgttgcaccacccgtaaagcggattcgtctcccaagccaaagaatctaccgcatactggtctttactccacttgctgtaatttcttttatccggtttggatgctgtcatgtataaccgcaaatattcccggaaatacgtcgcaataccctctttatgatcctccttgtgaaagtccaaccccaaaggcagaaccttcaaagaatcaaattcagcccgtgaaatcttgtcatatttcaacatctgtcccaacaccacattccggcgtcccaacgtcttctcttctctgcgtaccgggttaaaaagtgaaggatttttagccattcccaccaacatggcggcttgttccaccttcaaagaatcgggtgttgtcgaaaaatatatgtttgcggcagagttaataccaacggccaagttcaaaaagtcaaacttattgagatacatcgtgataatctcttccttcgtatagctcttctccaatttcaccgcaatcacccactcccggaatttacgcacggctaactccatgaaattctgattcgcctcccgaggaaacaacatctttgccaactgttgcgtgatcgtactaccacctccggcagaagaattcccggtcaacatcccctgtgctacccggaacaatccccgcacatcaataccactatgatcatagaaacgcacatcctccgtggcaatcaaagcatcaataacactctgaggaatatccttataatccatgtaccgacggttctcactcccctcgaaatacttccctaaaatcttcccgtcctcggaataaatctccgtggcaaatttattcttggggttctccaactcctcgaacgtgggcataaaacctaatttacccgccgaaactaggtagaaaaagaaaaacacacccgcaacaaaaacaataaatagcccccagaaaatggcaaagtctttccaatatcttttaaacatcacttctcgtttttattttagcatacaaagttagaaaattaaatttatatctctaccgatcaagaagaatctctccctgctctttcataaaaacgatcaaaacttcttgaaatcttaagagttttattccacaatccacttctcaatatttcgtgtcttgttgtcgaagttaataccgatcttgaacaattgacgggaatcagtctcgaacggagaaagccgttttattctcgttcattataaatatgagataagaaatttatcaaaccattctttcacctctcggtttggagttcccaatgtgtaaataccaaattctaaatcgtaatccttgatggtgaggtatccgttttagtaaagagccgagatcaaattatcgtccatatcatttaatccattggcatctgttgtccaagatactacccttctccggttataatggttctgtttcagcaactcgacaaggtaagtcggggttcccgtctcgaaccagtaactaccgaatttcatcttgtcaaacgtgttcaacacgctaaacgggttataaataccttcagagttttcagcaaaatggtaaccatcgtatgactcttttagtcgatcacacgtttcctcgtacgttaatccttgggcagaggctaaccgatgaatgtcatccttgaaataatgatgaatttcttcttcggtcatcccgcataaagcgacgtaccgttcgtccatggaaatatcgttcaagttgttaagatcactgaacacgctgactttcccgaacttggtaacacccgtgagcaaagcgaacttaatatccccatccatcgttttaaggaccccgtaaaacggtttcaaggtattacgaaattctcgttgtaattcctcattaccaatggcctgtaacatgggtttatcgtactcatcaacaagaatgaccgcccgttgcccggttaactcgtgggtccagcgaataatcccagcgaatcgtagcgagaaagacacttccgagggttctgatccatactccttttcccaacggattagaacattattaagaatatttcccaaactttcaaccgagtcgtatttctctatgttcaagtcaagatgcaagatcggatgtcgtactcattccttctccaactcctccatcgcgagaccttgaaataattcccgtttcccccgaaaataagcttcaagtgttgaaatgagcaaacttttcccgaaacgacgcggacgactcaagaaatagtaccgccctgttttcacaagccgataaattaaccttgttttgtccacgtagagatacccgtctttccgaaagctctcaaaattttgaataccgatagggtataatctgtcgctcatcttcttccttatatttatctaacaaatataggaattttcaatagaaaaacaaaatagtttccattcatactggaaactatttttcatttatactggaagctatttttctttgaaatcacgttccatcttgcttcgaacttaagatatttcaaaacatgactgaaccacttctgaat

SEQ ID NO: 9 - DNA, 27807 bp, Butyricimonas faecihominis
attatatatagcgttttaatagggatttaatagcgttttaatagcgctttacacgatagtgatccgctagatttcaagatgtgatcataaaatatgtgtgattatcagtttgtttaccatttatataccgacagacaaccgataaggtagtttttaaaattttcgtacggtgggtgaaatgggaattttatatttcgtatttttgcacgatgaagttacgaaaagagtgtaatttattggaaatgagcgtaggttaattgctcttgatagtaataggttacgatttagttagttatctactgcattatccttctgcgcgttgcgtaaccttcaaagaactcttcgtatgcaaaagtagctatttaattcgagattttgatataaactcccgttttttatcccctcattcataagaattttccgtaaaagcggtattgtccgtcggcacaccattgcccaaaacgagtttggaacaaacgtgtgccgactaccgcatagctggagaaaagggcattgcctcacgcctaaacgatgtttagacagatgaagcaatgcccctttcttttgcgcctatgccaagaggtgcttttacgggttttcaaatgatttttcttttttcgctgtctcttttgccggaagcggaaagtgaatgcagagtgtgtcagcctgccccatgaatgaaacaggcgcccacacacagccggacaaaccgggaagaatgattgttgccacccggctgaacaagttccgtcggatcggaaacaatcatacttcctttgttgtggtttgcccttttcacgcttccggtgatgtctttttccttttggtgattcttttttttacggattttcccctgaagtttttttctacacaatctgcctctgttttcgtttacctccattttgcgcctttcagtaagccgcatcagtcagtcattttcgttctgggcgcaaaggtaattccgggattggacgggaaagcaaggtcaagcctcctgttttcggtaaaaatctccagccctgcgggtagtattttgaccgaaaaaccttgcattccctaatccctaccttttcaagcacccgaaacgaaaacgaccgatgcgacagaaagacgcataaaaaaaatgtcggataaacgagaggcagataagatagtttgaaactcaactccctcagctcttgaatccgcattaaaaacaaaaaaatcaaaaacagcgaagatatgacggcaacggcaaatttcagacaaatggcgcaacacatcgggttggcgatatgcggcttgatgatgcgcaccgccttcggggtgttcggcatcctttggggcatcatcagagagattgtaaacggagtgttccgagtggcgataggtgtaatcgtggctatcctttccaccattgccttctttggcttcatcctttggttattcaccctttaacccttaccgacatggcaaaaagaaacagcaagacggcagcgcagcagtgcagatattacgaggtggacaacatcttcgtgtatatggtggaaacgtacatcaacggcaattttgaaactttccgaagattgtaccacgaactgaacaaggacgcacggagggatttcatggacttccttctcagcgaggtagagccgacctattggagagagatactgaaacagataatctaaaaatgacagcgatatgaaaggaacagaccatttcaagagaacgatatatatgtacttggaacagcgtgcggaggaagatgcgctatttgcaaagaagtaccgcaaccctgccaagaacatggacgagtgcgtgacccacattctgaactatgtgcagaaaagcggttgcaacggtttcacggacggagagatattcgggcaagccatccactactatgaggaaaacgagatagaggtgggcaaaccgatggactgccaagtggttgtgaaccacgttgtgaaactcacggcagaggaaaaggcggaggcacgtcagaacgctgtccgcaaataccaagaggaggaactccgcaagttgcagaaccgccacagaccgtcagcgagaaaagaaaaccaaccccaaccctcattatttgatttaggcttatgaaaccgaagaccaagatacagaaagaggtggcaagactttccgccaaccttcgccccatatcagcgacacaaatagattgggcataccgccactgcgttgagcatatcggctaccgcaccaagaaagggaacatcacctgttccgactgcggtcacgagtggcacagcgacagcggactatgcgacacccttgaaggctgcacctgccccaaatgccatgccgaactcaaagtgcaggacacacgcagacgcatctacaaggaaacgcagaatttcagcgtgataaccacctgcaaagggtatcaggtaatccgcgtggcgcaggtcagatgcgagagcaggaaaggcgaaccgatgcgtttctactgccacgaggtcgtgcagcgttggatttcacccgacggcaaggttacggacatggcgttgctccgtggcttccttttctgctattgcgatgtgtgggcattaggcagcgatatggaggtaagaccgcacaacagcctatacgatgatgtggtggcaagaagctgtgcatatccaaagatgaggatattgccccaactcagacgtaacggcttcaagggcgatttccacggcatctcccccgtgcgtcttttcaaagccttgctttcagacccaagaattgaaacccttatgaaaggcggtgagattgaggtcatgaaacactttcttttcaatacccgtactgccgatgaatgttgggcatcatatctgattgccaagcgtcacaagtatcagatagacaacctctcaatgtggtgcgactatctgcgtatgctcaaaaaactcggtcaagacctccgtaacccgaagaacatctgtcccgaagatttcatggcggcacacgacaacgcaacccgaaaaattgaagccatacacgagaaggaaagagccgcagagcaacgccgttgggagattgaaaggcgtgagcgtgagcaacagcgacaactccaacgaaagaaagatgcggaggatttcatcgccaacaaatccaaattcttcggcttggtaatcacggacgaggaaataatcgtcaaggtgcttgaaagcatagacgagtattacaacgagggcaagacgcagggcatctgcgtgtttggcagtggatactacaagaaagccgacaccctcatactatcggcaaggattggcgatgagattattgaaaccgtagaggtggacttgcgaaccctcgaagtggtgcagtgccacggcaagcacaaccaggacaccgaatatcacgagcgcatcatagaccttgtgaacaagaacgccaaccttatccgtgagcggatgaaagcggcatagcataacccctaaaacaacattgatatggaagtaagaattgaaagtatgatttgtgtgtgggatgatgcaatccccacgatgttccttgaatttgtgaacctcctcactctcacaacgagtgagggggaattgagaaagagcgtaaaggagtttgccgagaagcacgaacttgacaagtttttcctttacggcttcggctcacaccatttctacctgcaccaacgctacacaagcaaccccgaaatggtgatgaagaacagagttctgtcagtacatttttaaccatctaaaaagcaacattatgacaacacgaatgaccatcaacggagtaagcacctgcgcggaagcaggtacggagaaatacgagcgtttccaatcgggtatcggaagacgcaggcggacacttgtgcagtacgactaccgccaccccatagacagagaattgttctcttgtgtcaaacccacgttggacgagtgccgagccgcacgggacaagtggctgaacgcaaagaagggaaaggaggacagactatgaacacgacctatcaaacgctgatagtcaagttcagcgaacctatcacggcattggacggtatctttgacgataccggagcgtggggaacggacaccctcaaggggtggatagatgattacgaaagcacacgtttcaccgccaccgacagccatacggcagtcatcacgagcgagtacaatatggaatgtgtgaaagagtggctacaacggcagacccccatttccgaaatgcgagaattttgaacgggatggcggtgtccgcaccgccaatacttaaaaccctaaaaacaaaagatatgatagccaagacgatattacagcagataggcggaaaacgcttcaccgccatgacaggtagccgtgatttcatagatatgggcaacggcttacggatgagccttgcaaggaacaaaacaagtgccaaccgccttgacatcatctatgacgaaggggcagacctctacaatatgcgcttctaccgcaggacgttcagcaaaaagacctttgagtgcaagacaaaggacattgccgtacacgagggtatctattttgatatgctggaggaaatgttcacgatggtgacgggactttacacacgcttttgagtggcggggcggcgagagccgccctactttctttcagtgagcatgatggcggacaaagaaagtagcaaagaaacctttgtccaatctgcgataactaaaaaatccgcaagtaaaacttgcggaggctatatattgggtcgttattttttggtggaggggaatgataatctcgaaccgttgaactacacatttctgcttcgtctccatttcccccaacgatttgatacgttcaatcatttttgttgttcctttctgaattttcctaaatactttcttcataatttcgctatactttttatggttaataactatgttttgtattgctctcacaacacttacaacttgaagtgttatttggaaaccgataggcaaaaatggctcaacgatgtcaattaacgagaaaatcctacgataatctatcaagtgatagagcaaaagacgtgccaagttaaatatggcacgtcttttgccagttttgtcagtccttttatgggatatacaacagcgcaaactccgcctttctccgtttgagcagcatggcgtggcgttttcctttgtagttgcagaaggctatatactcacggtagatgttcctgtcaccagcttccagcttcttgattaaggtgcttttggggattgttttgctgcctaacagcttcgccggtcccacattgtaagctaacgtgccaagcaaaatcgaatcaaccccgaatttacggaacatggcgacaaatttgcgcaggtctttccgcaaaagttcatccgcatcccgttttgtcatggttcgtgccgaatacttctcgtttggcaaaagtttgtgaccccaaccgacgtatgggtagtgtttttctgagtgccagccttcaaagtagcggcagcataaaaaagcacgttccataagcggcagtcggtagattgccgcctgcccgtccgttccctcttggcggctgatctgcgcggacacagaacagaccgtcagaagtgaacagagcattgtcatgaatacacgcatcatttcaacaaggggctgaagttgccgatgggaacgatggtaagatcgtcgtcctttacattcctgttgttgaagtcaaattccagttcgtaggagttgctaaagttatcctccaccaccacgatgaaattatgcgcctcatcacccgccgccgtgtagtacaggcggaatttttcgttctccagcaggtagcggtcgttaggcaggaaggtgatgccgttatccattttgagcgagccttccccctcgaactggaaatagcggatggtatagagcgtacccgaaaagtcgccctcctttttcagttcacagcggatttccactgtctgcccctttactaccttgttcggcacgggcatgacctccaccgtgaagggataggactgctggatgtccatgtcatcgtcacatgacacgagggtgaatgacatggcggctatcaggcataacgccactgccttgaatattgatgttctcttgtttctgttgttcagtatgttcattgttcttcgatttttagatggttgtttttctgttttttcgttgtcagttgcaggtactcgttcaagtccttgcaaccgtcatagagggaggaacggtcggtgacacgttccccgtatcgcatggtaagtgcggcaagcgtccgccgtccggcttcgtcacggtcgaggaagcagccgatgcgcccgtatccgtccagcaatcccgccgccttctccacgttggcgactgagttcagcacaagacagtcagcgttaccggttacaccaagcgtcacggcagagagaaagtccatgaagccctcgaacacgaggcactcgtcagccgggatgtcattcgcctttaccagtgatacagacttcggaggtatgcaacccttgaaatatcggcttctgacttcatagccacctgccatgttcggaaagccaacggcaaaataccgtttcccacgcacaccgtagttcaagcggcagcagtgacgggatgcgatggcgtaagggatgccccgttcctctaaatactccgtcagcagtgagcggagcagcggagcgacctccacatcctcaaaaacggattcggtcggcttcgagagatagacgggcttttcccatccggcaaccgtcatattggcggcttccgctatgaacttcgcttgcttcatgaagtcatcgctttgcagaaactccccggcaagcgtgaagatgtcgccgcccttgcccaaaccgaagtcgtaccagagctgtttcgccacgttcacacggaaagaggatgtgcgctcgcccctgtacggggcaagataccacagctcgttaccgctccttctgacaggctcatgccccagccgtgcgagaaaatccgcaagcggcatccttctgacagcatctatttccgtcctttccatgcccgtgtcagttgatgatgaacttgataccgaccccgaactgcgtgtggaacttccgtgtgtcgccaccccaaaggcaacgctcccgcaggttggcaagcagggcgatacggtctgccacgtaacactccacatcgagcgtcagcgcaccgccgtagatgaaggcgtcccggtcgtgcagcgtggagccgtcatgcagcaccttcttcccccaatttaccgcctcatatccggcgagagccgaagccccggcatagacgaaaacaatctttcgggcgtccgacagtatcttgaagtaatagccgccctccgccgtgaactgcgccacgggtatcttggtgtccttgtagggattgttcttcaacaggtattcgccaccgaacacccacttgttccccttcttcgtgtaggtggagagagccgccccgaagctgtacccgccgtccttgccgccgagattgaagccgtccgccatgtccgccctcacctcgatgccctgcatcttcggcagacaccgctgggcgtgcgcctgccctgtaaaaagggcaagcgacgcgatgattattgcgatgtactttctcatggtcagcgtacttgaagttcgttgatggtacccgcgcgtaccaaatcctcgttctcaatcacgaaggactggtgacggccgccgttcttctcgttcaattccaccacgaggcacttgtcatcggggatggtgaacttcgccatcgtgaagaccgtgcgctcgctctttttgcccggcacgagggtggcgtagttctgcgcgcggagcggcagaataatctgctcctgcacggcagtacgcttcgcaaccttcttgtccacgattttccaagtgatgtagtccacatcgaaaggcacgttgctctggttctttatctccgtgtggaaataaagcaagccgttgtgcgtgtagatgcctttcaacaggtattggatgccgaaacgcttgcagccgatatgcttcacctcgcgcttgttctgtttgtggatggacttcatgataaggcgcaccagcatcgggctttcgctgcccagctctttcagatagatttcctgcgcgttgttcgggcggttcaccgtgctgccgtcatggatgaagtcgcacatctccacgttgagcaacagcggttcggcggcgtacttcacgttgaaggtgtagaaactgccgtcctccgtgatgacggacatattcgtttcgttgggaaaattccttacggtagccttcacacggatgatgttctccgctccgtcggctttcccggcaatcaggtcgggcgagcctaaatcgacatagcgcacctccgccggaaaaatgacgtggacggtcttgtcgtaggtcacttccagaccgtgcggcggtatcatgcggtcgaaggtcagcttgcgtgacagcccgtgatataggtcgccgtccgcctccttctgcggatagacctccttcgtcaaggtcggttgttcacttccgttggtcgtttcaacggttacattctcctgcgcgttggcagttatgatgcccatagcgagggcaaacatgatgattacttttctcattacttttggattttagtggtaatttttattgttttcaatatttttcttggtaaagcatgaccctgtacccggctttcagatgcaccttgacggttcgcatctttttggcgatgtactggctcgtgccttgtatcagccccttgcccaagtcggaggcgagctgcgccccggcattggtggagatgttgatgctgcttcccagcgagccgcccatgttggcggcgacctcccggacggcgttcatctccatcgagttcgggatgaagatgccgggctgtccgtccgtgtcatagaccgcaagctccacggggataatcgtgccgtcgtattccagcgaggtaatctcgatgtcgagccgctcaccctgtatcttgcccgtgccgaccaccaccgcaccccggggtattgtcctgcctgccaccgccataggctccagcaggcgcagccttaccgtctgcccgtccgtcacgctctgcgccccatgcacgcacgccggtatggtgttcctgtccaatacctccgccgtgccgacagccgtgttgaaaccccagttgcgttcctgcgataaggcggcgacaaactccgcgttactcataggctgtgagagtgaagaaactacttgatgctccacctgtctgataggcattgccttgttcttcttccctttctgcacggtagttggctctgccctctgttccgccgatggctgtcctccgttctgaccgcccatgtactttgccgccagctcgtaggacttctccataagagccacctgctcgtccatagaggaagccttgcccctctcgctttccagttccgactccagcgatgcgatgcgctccaacaattcgtccatctccgcattgtcgtttttcggctggtcgtagaagtttccgagcgtggcgttcaggtcacggtaggcggctgcggaggactggatggtctgcggcgtggctggctttgccctttcttccttgccgcccggattggcgaggtcgaagtccactccgttctccgttcccgctatctcgcggtcgaacatgtcgcccagctgcccgatggcacggttgcggctctcctgacgctcttccatctccccatgctcgtaggctttcagcttgtcgccgataatctgccggttcgccttgtcagcgtcgggcatctcggtgttgtatccgtccgttcccggcggttgctccttgccggaggacggggcgaatatcagccacatcgccccgatgaacaccaacaccatagcgggcagcacgatcatcttctgccgtttcagccgttgcgcctctgtcagcggttcgcgctcctttttcggtttccccgtttcgggagcagctttgttctctttcgtcggttcattctttgtctgttccatataaataaggtgttaagtgattgcctgtttccgccggggtcggcagttccacccgtccggcgtgtcccgtttccatatgtgagccgtcgttcctgccgatgtcatagacggctctgccgaaggtgtaaagggcaagcaccgcgaaggcggcgaacatccccagcacgatgcggcggcgtgtttccggcggcaagccgtccagataccctttgagacttgccgccaagcgtttccgtttgtcgtggagtttccaatacatgccccacattgattttctgatacttttcatgtcctgttaccgtttgatagtctgtaaatccttgttctcaatgatggtgaaaccctcgatggtaaaaccgttcgggttgtcatccgaccgcgatgcgttcagcaggcggcaggtggtcacgaggctgcgctcggtgacgttgctctgccggatgattttctgtgtggcgtaggtcacggcacggtagggataggcgttgaagtcgcacaccacgctgtccaccttcagcacttggttgatgttcccggcgatgatgcggttgtagtaccccttctccgcgaagtccgaataatagtggtacacgctcttgtccgccagcagcaaggcacgtttcacgttgtgttcaatcgcgcttttttcaggtgatagcgtgaagaacatctcgtggaaacggcgcacatgttcccgtgcctccgccgggcggttctgcgacaaatcctgagacaaggcgagcatcaggctcttgccgttgtccagcacatagattttctcccgttgcttctctgcgaaacggtaggagttccacacgctccacaccgtcaccacggcgcacagcgagaggaagacgataccgaacaggcgtatctgcctgaacgacgattcgatgtttctaagtgatttgaattccatttatattttccaatttatgattgcacattgattatttcagcaatttgccgacacgtccgactgcgtttcctgcggctgcacccgccacgctgcccgccatgcttccggctcgtcccgccatctggttcacgttgcgaccgtaaccgcccatgcctccggcttggataatccagcccgcaacggtgggaatggtaaagtagccgatgatgccgatgcagaggaatacgatatacaccccgtcgctcgaatccagcgagaagttcgggtctgcctgcatccgctcgatgtcgttttgcagcatcagaacctgtatcttcgccagtatggtgctgaacatgtccgataccggtagccacagatagacctgtatatagcggcatatccactgcgtgagcgtgttttggaaaccgtcccataccgacagggcgaaggctatcggaccgagaatcgccagcaccacgagaaagaaggtgcggacggtgtctatcacgagggcggcggcttggaacagcagttcgagtatctcgcggaagaagtcgcggatgctcttcttcatgttgtacattccccggtcgatatacattcccgccatcgtcaccatgtcggagggcgaccagccgagttcctccagttgcttgtcaaattcctcgttggacacgaggtaggcggtttcggggttgcgtaccatcgcctcgtattccagtttgtccttctgctcccggtatcggttcatgtccagcgtttccgcctccagcatctttgccgtgccctgtacgacgggtgagaggatgctgtttatcgtgcccagcaccacagtcgggaagaacatgatgcacagaccgatggcaaaaggacggagcatcgggaatacgtctatcggttcagctctcgccagcgactgccatacccggtaggcgacgtagaacagcgcacccagcccggcgatgcctttcgccacaccagccatgtccccacacagcggcatcatctgctcataaagtgaacgtaaaatctgatgaaggttgtcgaacttcataggctaccagtatctttcgttcatgttcccgtacagccccatgatgcggtcgaggtcgttcttctttttcgcacgcaggtaactcacggagatgttcttgttcgtgtagtagctcacgaggttgcggtaacgcttcatcttcgagtggcagcgttccaccacgtccatgcgctccttgtcggtcatggagagcgtggtgatgttcaccacgttcctgagttccgtcaacacttcgttgctttcctccagcagtttcgtgtagccgaaagcgattgcggaaagctcttcgggtctgaaattcccgtcacggagcatccgttggaaactgttcacatagatgtctgtgatgtcgcccaccatcaggatggtctgctgcaccttgcgggcgtccttgaccagattgttcaccgatttgagggcatcgtaatacttcttgccctgctgatagattttcaccgtctcctgaaagttgctcaccatgttcgtggcggtcttggaggtatggatgatgtttttggaggcattgatgatgccctgcgctagattgcccggatcgcttacgacccactgtgcgcttgccctgcccgcgaaaagcaggcacaggcagataatcattgttattcttgttctcatgttactttggattttagtggttgttattcttcggtcggatgtcccggctgcggcttcacccgcacatagtccccgtttggcgagaaagtcagcacatccgtggcctcgttgtaggacacgtcgatgcggaagccggtgttcatgaacaggttgccgttctcctcctgcaagagataggtttccggcttgagcttgcggcgcagaccgctacgacggaacaccgtcactttgtaggcttcgccctccttgtagataagcacgtcaggttttccctccacgctctcccagttcccgcacagcatgtcgcggcggttgtcggccacgtcgcaggattgcagcatcatgaccgccaatccgataaggcacttgctgacttgcagcattttcacttttggtaaattcatacgcgtttttcttttttggttgatacattctgttttttagttattccttgtttctccgcctttcggcaagctgccggatggcggcttcgatgtcgtcgcccagcttctccgccagacggtaaacctccactttttccgtttcctcggtggtgtacgccagatactcttccgcgctgacctccgtggcatagaccgccgactgcgtgccgcccaagcctatccacacctccttgtagagccgtgaagggttgttcgccatgttgatggagagtatctgcgacttctccttttccgtcagtccgagcaacgcctgtatctggtcgaacttgttcatatatttcctttggtcaagcaggattttacaatccgagttgttgataatgctctctttgaccaccggagaactgataatgtcgtccacctcctgcgtcaccacgattgcctcgccgtaatattttctgaccgtcttatacatatagcgcagatattcagccatgttcgccgatgagagggccttccaagcctcttccacgataagctgtttccgcacgcctttcagccgccgcatcttgttgatgaaggcttccatgatgatgatggtcacgacggggaacagttcgcggttttctttaatcgaatctatctcgaagacgatgaaccgcttgccgagcaggtcgatgttctccgtggagttgagcaggaaatcgtaacgcccgccccggtaatactgccgcatggtggtgagcatgttgtcgatgttgaagtcggacttctccaccttgatgtcacgctgtgccagttccttgcggtagtcgtcacgcatatactcgtagaaggtgttgaacgacggcacgatgctacggtcggattggatgcgctcaatataggcactcacggcactgcccagctcgccgctctccgtctttgtcaccttgtcgtcctccgacttccagagcgtcagcaacagggtcttgatgctgtccttcttctccacgtcgaagatgtaatcgtcggtgtagaacgggttgaagctgatgggcttatcttccgtgtaggtgaaatacacaccgtccgctccgcctgtcttgcgtcggatcatgccgcacaagccctgataggagtttcccgtgtccaccaataccacatgtgcgccttgctcataatattggcgcacgaggtggttcatgaagaaagacttgccgctgcccgaaggacccagcacgaacttgttgcggttggtcgtgatacctcgcttcatgggcaggtcggagatgtcaaggtgcagcggttttcccgtgagcctgtccaccatcttgatgccgaagggcgagagcgagctgcggtagttggtttcctctgtgaacaggcacaccgcctgttcgatgaaggtgtggaaactctcttccgccgggaagtccgccgcattgccgggtatcgccgcccagtagagtgtcgggcagtcgatggtgttgtggcgcggcacgcattccatgcttgccaactggctgcccacgtcgttcttgatatgcttcagttcctccgcatcgtcgctccacgccatgacgttgaagtgtgcccgtaccgaggtcagtccgtaggaatgggcttcgttcaggtattggtctatccactcgcggttgatgctgttgctccttgaatagcgagatagcgactgcatgttacgggcggacttctcgaacttctgcaaggtttcctcactgttgtctatcagcacatactggttgtagatatggttgcaggagagcagaagccccaccggggaggcgaatgacagtcggcagtcactccggtcggtggagagcttctcgtaacgggtgtcggtagccaccttgcccggcaggtcttccgcgtcggagagggtgtgcagacacaggcggttgtcgccgatgcgcatctcccttgccgaaagctcgatgtcctgcaaggtggtgtcaccttccggcatgagcgagaagtagcgttcaataagtcccgtctttccctcagtacccacaatctcatcggtggagaggcggcgcagcctgacaagcccgctgtcgttcatgatgcgctcgaactgttcgcaggcttccaagaacttggtcgtggtttccctgtccagctccttcgggatgatatgtccccggcacagcgtgctgaaattgctctgcatccggttacgctcctttgttgtcttggtcaggtagaggtagcaggtgtgtttcaggtacggacgctcgttgaagtgacgctcgaaagagcggcttaaaaagctcatgtcgtccttctgaagctccggtttgtagcgttccttgatgaaccagtcctgtttgtggacgacggagtagtccggcagcaccttgatagccttgcaccagcaactgtgtatcgcctcgtactccgcacccgtcacggtgtaaagttccggtagttccacctcgaaagccaccgtgatgtcggcgtcctttgagatgatgcagccatgctccaccgctaaaagtgggaacctgttttccagtgttgtcattttcgatgtattcctcattgtctttcttcctttcgttgtcgtttgaacagacgggttatccgccgccggttgataaggtatcggggatggctccgtgccgctcctaatttcatcagcccgtgttcaccgtaccgggcgttcagcgcgaaggtctgccatacaaggagggaggacgatgccgcgccgaagccgatacatatccactggtcgataccgaccatgtagaggatgacgaacaggacgaagagagccagcagacctccgcagaagatgaagaggtactgtgccttcaagcccttgaactctaccggacggccgatacccttgttgattgggtattcagccatacattatttattaaaggaagaatgagcgcaggatggtggcggcaacaatcaggaagatgcacgcgccgaaccacgaggcggctgtcttgctggtgtcggggtcgcccgatgaaaacttgccgtacacttttacgcccccgataagcccgacgactgcaccgatggcgtatatcagtttagttccggggtcgaaataagaactcaccatagaggtggcttcgttgatgcccgcgatgccgtttccctgcgcgaaagcggaggcggttgcggcgatgacaagtgccgcggagaggattgcttttctgtttttcaagatgttcttgttcataaactgttcttgttttttgccgtcaaaagggtggatggtcctttgtcgggcggttgatactttgtttctttactttggttttagtggatgcccgtttgtttccacggacgtgggcgtgtccgttgcggatggggatgcgccttgcgtttcctcgccgcgtgggttgatgtcattctttcatgttcatttcttttattgttgtcatacatagttgcgaatgtcgaactcctcgatgttgtccggcacgacgaactccttttcagatttcttcagccgaatctcgataagccccttgatgcggatgcctatctccgaagagccttccatcattttctcgtacaactccgtgccctccatgtcggtgaacaccttagccgccttttcacgttccgcctgtgtcgcgtccgggtttttggcggtcttgcaggcgtcgtcaatctcgtcaaagctgctgcccgaagcccgtggcgtgtccgaggcgtcctcttccggttcgtcgtccccgtatcccagttcctccggcggtatgctcgtgaaggtctcatcgagtttttcctccgggacttgtgccgggcgggatgcgtttcccgtttttccgtcgtcaaaagtagcctcttcctccgacagctcaatgcctttttcaatagtggcggcttcttgcgtcggtatggcagcggttgtccgggtggatgccatcctgaaacggctcttgccgatgatgtccgccttttccgcagggacttcctcgtgtgccgctatgcgtttagcctcattcccgtccagtgaccgccataatccgacaatgcccttgaagaagcggacaatccgcgtgtccatgatgcgctcgtaaaggagcaggaacaggaaccagaggttgcagccgaccgataccgccagcagaatgtctgtcatgctgattgtgtaattcatatccttccgtttttggttagaatactgaattgtaatttcgggcataaaggctctttatcgcatcttcgcactggttgaagtggtgcgtcagcacatggtcgatgtaagcggacagcgtaagccggtcatgcccgattacacgggtgatacgcatgatacgctcgtggtactccgggcgcacatacgccatcttcccctcacgtgcctttacttccgggtcgcggatgaacaggcgttcatagtccttctcactgcatttgccgcttaccgggacaggcgacagtatttccacactcgcctgcacttgggtaaacatacctccgcagtcttgctgtggtcttttttcattcggtgtcatttctttttccattttcaaatcagatcttcacgttgtttcttgtacagttcgttgattctctccttgtgctgttccagatgctggcgcagcacggtatccacatatccgcctactgagatttcccctccggcgatgtcgttcacgattctgaggatcttgccgtggacgtcacggctgatatagacacattggcgggtctttatctcgttgcggcgcaggaatagctcgttgtagtcctcgtcctgccttttccggcgtccactttccctctgcgctttttcccgtgttacgggttgcacaggagatggttccggtgcggcggtgtcctcttcggtcggtgcagctgcgggtacttcctgtgcggggcgcagtgtcccgtcctgtgtgcgccgcccgatggaggctaacagcagttcctcgtcgatgccttccgtgttcactttcctgctgcccatgctcactgcggtctgatgatgtcgcttatctcttcggaaaactcccggatgccactccctttcagcagtgccgtgtccatcgggaagatggtggagcggaaaacgctcttgcgctcttccgaaaggtcacggcggaacttcttgctgtcgggcaagcgggtggaaagtaccggaaagcccatttcggctatcacttcctcgtagatgccgtacaagtcgttcctctccctgccgtccaccatcgtccagaacagatgcagcccctttgttttcgcctgtccggtagtcatcagcctgtcgcggaacatcgtgacgaatttcagggtactctccacgacaaagcggtcggcactcagcggagtgaaaatgtagtccatctgcgagagcgtctttatcacgccgttgcttcggagtgtgccgggcatgtcgaagaacaccacgtcgggtttcacgtcctcagtggcaatcatcctctcggcatcgtcgagggcgttcaccgcattgcttttgacgatggtgtaggcgttctttttgatccggcggaaatggtcgcaagcgagagccttgaagtaggtgctgctgtcgataagccccatttcgtgttcgcgcagcccgtggatgctgtgctgcgggtcgtcgcagtccacgacggcgacattgtagcctttcacgttgtgcaggtagctggcggcaagtgccgtgacagtggatttgccgatgccacctttctgtgttgcgaatgcaacgaagatttccttactcatagttccatttattttaattgttgatgatttgtttttctgtttccatacggatttggctgtcgcaccatccgcttccgtgactacacacgcaggcgggtcgtcgcgtatccggttctgtggtgaagcggtgcgtcggacaaatggtgattgacgacattgcgtcatgaagtcattgaatccatacgtcaccgaattgtcggagaaccgggtttccgacggttcgggtatccgtttcggcaagtatccgaagaagcggatttccgggtatttgaatgttccgtttatcatatcttcaaatcgttcgtttcttgaatcatgctgcaaataaacaagtatattttggaacctgtatcacttctccggcaagtggcggcacgttgcgccggttggcagtcattgaccgggtcaagcatctgtccgataccgctttaagggcgtaactttgcacccggacagcagggttcgccgatgacgcgcggcccggagtcctgaaaggtattttcccaatccgtcccctgacggatttttatgttcacctgaacatagcaagatgtcttttcagccgctcaaaatattttgagcagccacgaaaagcacttgcccttgcagggggcgggctttccctccgaagtcgggaagcctttcagaactgcggtgctgtaatccgaagcggcggcttatgccgtcaatccgctaaatccaaagtaatatgaaagagaaaaggaaaagcaaatcagggagaaatcccaaacttgatccggcggtgtaccggtacaccgtccgtttcaacgaggaggaacacaaccgtttcctcgccatgttcggaaaatcgggtgtctatgcacggtctgttttcctcaaagcgcacttcttcgggcaaccgttcaaggtgctgaaggtggacaagacgttggtggactattacaccaaactgtcggattttcatgcacaattccgtgccgtgggtacgaattacaaccaagtcgtgaaggaactgaggctgcatttttcagagaaaaaggcgatggcgttgctctacaaattagagcaacacaccgtcgaactcgtgaaactgagccgccggattgtggaactttcaagggaaatggaggcaaaatggtcgcaaaaatcagtgtaggaagttcgttgtacggcgcgattgcctacaacggggagaagattaacgaggcgcaggggcggcttctcaccaccaaccgcatctacaatgacggttcgggaacggtggacataggcaaggcgatggagggttttctcaccttcctgccaccgcagatgaagatcgagaagccggtggtgcatatctctctcaacccgcacccggaggatgtgctgaccgatattgagttgcagaatatcgcccgcgagtatctggaaaaactcggtttcggaaaccagccttatcttgtattcaagcacgaggacatcgaccgccaccacctgcacatcgtgacggtcaacgtggacgagaacgggaaaaggctcaaccgggattttctctaccgccgcagcgaccgtatccgcagggaactggaacagaagtacggattgcatccggcagaacgtaaaaatcagagattggataatccgttgcgcaaggtggccgcatcggcaggtgatgtgaagaagcaggtaggcaacaccgtgaaggctctgaatgggcagtaccgtttccagacgatgggcgaataccgtgcgctcctttccttatataatatgacggtggaggaagcgaggggcaacgtgcgcggacgggagtatcacgggctggtctattccgtcacggacgacaagggtaacaaggtgggcaacccgttcaaatcctcgcttttcgggaagtccgcaggctatgaagccgtacagaagaagtttgtccgttccaaatcggaaatcaaggataggaaactggcagacatgacgaaacgcaccgtcctttccgtgctgcaaggcacttatgacaaggacaaatttgtatcccaactcaaagagaagggcatcgacaccgtactgcgctacacagaggaagggcgcatctatggggctaccttcatcgaccaccgcacgggatgcgtgctgaacggttcgcgcatgggtaaggagctttcggcgaatgccttgcaggaacacttcaccctgccatacgccggacaaccgccgataccgctatccatccctgtggatgctgcggacaaggcacacgggcagaccgcctacgacagtgaagatatatcgggcggtatgggcttgctcactcccgaaggtccggcggtagatgccgaggaagaggctttcatccgggcgatgaagcgcaaaaagaagaaaaaacgcaagggcttgggtatgtaatcagagtatcaacaattaaaaaatcaatgtatgtcacaacaagaagacgatttgagggcattggcgaaaatcatggattttctgcgtgccgtgagtatcattttagtggtcatgaacgtgtactggttctgctacgaagccatccggctgtggggcgtgaacatcggcgtggtggacaaaatccttctgaacttcgaccgcacggcggggctgttccattccattctctacacgaagctgttttccgtccttttgcttgccttgtcctgtctgggtacgaagggtgtcaagggtgagaaaatcacttgggggagaatctggacagcatttgccgtcgggttcgtgctgtttttcctgaactggtggttgctgcccctgccgctgccgcttgaagcggtgacgggactgtatgtccttaccattggaacgggctatgtctgcctgttgatgggtggtctgtggatgagccgcctgttgaaacacaatttgatggaggatgttttcaacaacgagaacgagagtttcatgcaggaaacgaggcttatcgaaagcgagtattcggtcaatctgccgacacgtttctattacaggaaacgctggaacaacggttggatcaatgtagttaatcccttccgtgcgtccatcgtgttgggtacgccgggcagcggcaagtcctatgccgtggtaaacaattttatcaagcaacagattgaaaagggctttagtcaatacatctacgatttcaagtatcccgacctatctactattgcctacaaccatttgctgaaccacccggacggctacaaggtaaagccgaagttctatgtgatcaacttcgacgacccgcgacgctctcatcggtgcaatcccattcacccggattttatggaagatattacggatgcctatgagagtgcctacacaataatgctcaacctcaataaaacgtgggtgcaaaagcagggcgacttcttcgtggagtcacctatcattctgtttgccagtattatctggtatctcaaaatctatcagaacgggaagttttgcacgtttccccatgctatcgagtttctgaaccgccgttacgaggatatatttccgatactgacctcttatccggagctggagaactacctttcgccgttcatggatgcgtggcttggaggggctgcggagcagctcatgggtcagatagcgtcggcaaaaatcccgctttcgaggatgatttcaccgcagctctactgggtgatgtcagacagcgagtttacgctggacatcaacaatcccgaagagccgaaaatcctctgcgtgggtaacaatcccgaccgtcagaatatctacggtgcggcactcggtctgtataattcccgtatcgtgaagctcatcaacaagaaggggatgctgaagtcatcggtcatcatcgacgagttgcccacaatatacttcaaagggttggacaatcttatagctaccgcccgaagcaacaaggttgccgtgtgtctgggctttcaggatttcagccagttagtgcgtgactacggggacaaagaggcgaaagtggtgatgaacactgtcggcaatattttctccggtcaggtggtgggggaaacagccaagacgctctccgagcggttcggtaaggtgttgcagaaacggcagtccatctccatcaaccggcaggatgtttccacctccatcaacacgcagatggacgcgctcattccaccgagtaagatttccgggcttacgcagggaatgtttgtcggttctgtatccgacaacttcaacgagcgtatcgagcagaagatttttcattgcgagattgtggtggatgccgaaaaggtgaaacgggaagaaagtgcctacaagaaaattcccgtcattacaaacttcacggacgaggacggcaacgaccgcatgaaggaaacggtgcaggcgaactaccggcgcatcaaggaagaggtgaagcagattgtgcaggaggaactggagcgtatcaaaaacgatccggtgctgtgtaaactgctaccagataatgagactgtctaacaagtccccaaaattgaaaattatccctatcgaagtttgaagtgacccccaaaagttggatacaatttttttggggggcacttcagttctgacgggtaaaatcgtaaaattcggacttgttagacaaatacttacgcggtttcaacctcaggtactgaatctatcgaattgacaaatttaaccaattgcggatctgaatctttttgtatgaggtttcggagactctttttcaattcataagcatcatcccctgctgtatttattaaatccatataaaaatctttgttttgcagaatcaatgaacggcatgccccatcggaaattacaggtttcactattttatcaataacgtctccagcttgacttttcaaattaccatgcgatctaagccatgtttcgaaaaattgaaactttattgcattgatagtctttttaccgatgcagaaatcatttcttatatcggtaactgtcgatttaatttttcgtttatccaatctttcaactatattcttgaaacaattagggaaaggattcaaactttgagttccagaagcaatatccatcagaatctttttgccaaattcagtcaagttatctggcaaggatttgattttagccagtaaatgttttattgcgacaaaccaataatatgatgtatgtgctgttctttgggcgtataatgtatcaacacttatttcagacaacgcttcgaacgctattttattgatatgatcggtcaggacattgcttattttagtggtcaaatcgtaaaaagatgcgtcaggaattacatctttaatattgttcttagtgatatacttatccaaatcggtattccactctgctaaatgctcgataaatacctcatccgttacacctattctgttcttaatatcttcaaattggggcaatatgtctgagagcaataatttatagccaagtttatgatttaccatgtattgtagtgtttcatttaatagcggtatattccatcccacactatttactaataagtctccatgatccacataatagtccatgagttctgcaacatattttatatctccaccctctattaaggaaacggaatgaccatgtgccaattgcatggcgactaaatcgtaatatccagactctttaatgtttcggccatcagtttctaattcagaatgcaactgatttatgtaggttgaatctaacgttacaggtaaaggtctttcttcgtcagatgccaataaacgataggttgtaaatatagcccctatattatctttatttacattctgttcatcaatgcaattcgtgatcgcttgcaaaagcgttggaaacgtataggtagaattatcttttaacgtttttacaatatctgcatggtcgaaattatcgggtagtaagtttgccaaataattatcgagcgcctccgaatttgttgctacttgataatatttatatgctttagttgtcgcgttatcccgataggcagcatctgttgcatttgcagcttgaatataatcgataaatgtatttggcttgactgtttttgcttcaatcaatgacgtaaaatcgcacgccaacttattttgcgcaataaacctgtctattgcatctaacgttttgaaatagtcgccgccattgaagtcattgaaccgaactatcttcttatataattgagcaatcacatggttttggctttccgtgtctaaatgcaacagcagttcttggtattcgacagggaacacctgcttctctatggattcttttaatttcaattgtgctattctttgccatacacgcagaataacatcgctctttcgagttaatttatgcaaacaatgtataatcttatcgataagcgcattgtccatacattgtataacttcttctaatacagtgtcaaattgtttattagtctctgcatattgatttatgtcgtggtcttcttctccgttgatgcagccttcaatatattttttcaatggaatttgtcgagcatcttcaacatcgacaccatataccaaagctgcaatttcgcgttgtgtttgcagatcattgttaattattgtttgaatgccattcagatagtcgccggacaatatttgttctactggatttgccagaatatccgtcttcttcaaacagaacaatgctatgtttatcatcaaaatttcgttacaccactcttgtttaagagcgaccatctcattgatatatgatataatttccctaacattggcattaggatttaccaatctgaatatccgatttatagtttctttcgcttcattttctgtttctccaaatgcttcaacaaacagtttgttgaatatacttcgatagtcggtaataacaggaggagcaacacgataaacaatagggaaagttttattgataaaatacttggtcagttgtttcgtttgttcgtcggtctcatctccgaatgcacaagctaaatgtgtttcatcgaaaggaataacagcccaaacattttcaaaaccgctatcggcgaagaacgtatggatagaagaccataattcttttactttttcagcggggagacgatccatgttgtcaaaaacaaggactaatttacgttgtcctttttccttgataaaatcagaaatgtcttgcatccatgttttgaactcgtaaaccgttggttcgtcttcgctcaaagtctcatagcaaacgtccttttcgactttatcttgataaatagctaacatataactccatccatatttatgatctttgctatatgcccatttccaaacgcacaatgcaataagaactggcagtgcagctatgataatagacaataaagaaaaccaccatgttgtgggtgtaggttttactgcatacgcaataaatgtaaatatcggagttaaaactgcaaccaaaaatgccgcaaccataccattactgataaggggatatttttcggttacggtctccgttttacgggctaataaatatttcagcttttcagaccatgatacggttttcgtacctccacctttgacttttattgttgcatttccagataggataccatcatcaataagtttgcttgtaagcaattccaatatagagcggcgttgcaagtcctcttgatgtccccatgcgtcatactcaaaaaagtaatagtcgtctgataattcacgttccaacattttaaccacgttggattttccagatccccaaataccttcgatgccgataattcgaggtaaagtacattcctcatccaatgaatcattctgacaaaaatggcgagcaatagtttttgccaacctttcttgcgaacctccatcgaatttgtcaataccacacggtttattttggataaaccgcggatattgctgtttggattgtagttttgtttccatatacgtaatttattgattatacgaactccaaataattctcccgatttaccacatgaaactcggcatagggataggcttcttggaaggctttcggtgcggccggcattttatttccccacttgaactccaaggcggtaagactgtcggcactctcctcaatcaggtcgatttcctgtttgtcgtaggtgcgccagaaatagaactccctgtgcagtccctcattgaagttcgctttgcgccgctctccgatgatgtagttctcccacagcgcaccgacatcctgccgaatggccagcggtgagaaagccccgataatggcattgcgaatgccgttgtcgtagaagtaccacttgccagcttttgtaacctccttgcgtaggttacgcgaataagcccccagacgatagataacgaagaccttttccaataggtcgaggtatttttcaacggtcgtcttgctcatgccgagttgtttacctaactcttcgtaagaaacttcgctgcccaactgaaaagctatcaatcgcagtagatcgcgcatcttgctcgaattttttaagccgtcaattgctaagatatctttaagcaggtatgcaccgacaatatcacgtaggtagtctgttttacgttcatagttctccatcattactacttcgggataggaaccgtaaatcaagcgcgcttcgaggttctggcgggtttcaagtgccgtttccgtctgtgcgatttcccgttgcgagaatggtgtaaggagaaattgcgtactgcggccgaccaacggttcaccagtcttattcagcaaatcgaatgacgaagaaccacttgccaagacacttattcccggtatttcatcaactatcaacttcagaatactaccgatttgtggtatgttctgtgcctcatcaatagccagcaaatcaataccatccaataaatgccgataattggctattgagcgattctccaatagtgctaatgtgtcgtagtcttcgccgttgagcatcatcgtcctacctgaatagttgtccacaattttacgcatcattaccgttttaccaacacggcgagcaccaaaaatcagtactgctttattgggcgcgattcgtgctgtaatcttctcttgaagtattctatttactgtttccataccttataaaatataatgcaaagataatcatatttttttaattggcgaattttacaaaaaaaacgggctattaaatggcgatttttacaaccacaatcttatggaagttgtttcattgtttttagtaatgatatatgttcatactatgatgactcaataatttaccagacatacgtttctgaaatttgtccttataggaatgaaaaactcacatatattg

SEQ ID NO: 10 - DNA, 27679 bp, Butyricimonas faecihominis
cacgtgttactcacccgtgcgccggtcgccggcgaagtattgctactccccgctgcccctcgacttgcatgtgttaagcctgtcgctagcgttcatcctgagccaggatcaaactcttcatggtaaagttatttacagaaatttttattctgaccgggtcatgtgtttcatgaatctcgactcgcgtcgattatcgattcacgctcgctacgttgtttattttcacgtcaatattgttaaagaactcttctcgtcattttcatcgccctcgctttttcaggagcgaaagcggatgcaaagataaggcgtttttatctttccttccaaatctttttcgaagttttttcaaactttttttcgtgaccctcgttaaagagaattcacgtcgttaaagatcgttgtcaacaccactagaacgccgcctccacgtgaacccgactccctctttcatcctccccctgtcccgttttagcgggtgcaaagataaggtaaacatttacccttttccaaacttttcaaccactttttttcaaactttttcaatcgacgctgggatccagacttttacaactggaagtgccaggctagaaccaacccgggaagcgggaagaaccggggatattccccttcaatacccggacaggcacgcttcaaggacactcccgaacgcctttgaaacgtctttgattcgaatgtgatacgtctttgatccctgccttcaataggaataccacgggagttcaacgggtattatgctaggaaaggttattgtaaaccggagtaaactcatatctggaaacaacaacgagggggcaacgagaattccacactaaaaactaaattactattcctctccccaaaaaagtttgatgtcgaagtaatctattcgcacatttagaatactccgacatcattaaaaacaatattaatagctatgggaaaacacacaaagattatatttttctatatgaatctacactgtgtttattcatttttcaacattaagtatcacttgatatgttttattcggctcgaaatcacaattatatattaataaaaagttttcatccaaggctactttccaatcttgtccttccgccaaacgaggttttttcaatcgttccgggaagaaatagctgaaaggcaaatccagcacgtgttcgtttttgaagtgatcgcctttcatccgttgtaaattgaaattttccttggtctcgatcgtaataatacattttttccctttgactttagaagttaccatgaaatcattttcttccgggagttcctgcaaacggacattccatttcgggtccccgtaataagccaacatatcgcgatcataccaaaatcccaactcgtctttagaaggctcccgaccgagcaatttcgttaaggattcccgacctttgaccattccctcgtacacggatgaaccaaaagggtatttttcttttgtcaggcaaggataccattcgtgctgttggttcagaaaatcctgctggttcaagaaaatagcttccgccaaagtataacgccccggagtcgtcaaccaatatttcagtcctccccagccggcacgcccatgccaggtcggaacgacgtaaccaaccatcgtagccgcattagccccattcatccaagctaccgccatactgttcttcgtgttattcacgttcccgatcaggcaattccccacggcaaaatacactttacgtttgccactgtcccgcaattcccattgaccacgtcccgagtgtccgatcaattttccatcgtaacaagaaaaataaccgccaaaaggcatctgtaaatgcttctccgaagcgtgaaaagccgtaacgaccaaatccgggttatacttcacgtacaaattcgcaaatgcatcactcacgtcccccactatggttctcgtgatcacgggttcctctttaccgtccttctcccccctcaaattttccaagtgatcgtccacccagccgtaacgctcaaaccatttggcactgctcaattccgtgatagaagagatcgcatcatgaatgatcaaaggttccgtactgttatttaccattttcatcgcgcaggcagcatcatatcccgtgatgaatccccacagaaaatcttcgtaaatatcctcgtctaactctcggctcatacgatggaaatcgataatggtctcccgccctatattttccggcatatcaacaactgccacgtagcgagggcggagacgtttcaatccttccaaggtttcccgttgcgctttatcgtaaaacaacacctctgcatcatgttttttctgtaaaacatccaccactttcatccattccacatcatttttcaccgagaccgaggctaaaacaacatactcgcaagcctctcttttcaacttctttttctgcgcaacagacggaaatgtcatcaccactgcacagaataataccaacaaacgataatctattttcatcttaacactaattaaatacaccgatatatttcataatcttttatttaccaaagattccaattgcacttccaactccccgctttgggaacaacgataaacaattttccctttagcgtcaacgagcagaaatgtaggaatagaggtgattttatacaaatcgttcaccattgtggtaacatgttcctcccctcgaaattgcgcccaaggcatttgttcttctttcaaagcctttttccaattctcttccccgtcgttcaaggcgatgctcataaatttcacctgtccgccgtatcgttcatatatctttttgaaataagaggaactacaccgacaagccccacaccatgaagcccaaaagtcaataaccgtgtatcctttgaggttcaattgatctaataattgtactttttccccgttaagcgcaagtatctcaacatcttctaagttcctcccctttgcaaactttaccgcctcttgcaagtagtcacggaatttccgcaacgaaaagcaagtgtccgaatcggaggcgaacaacgcccccattctttccacgcgagaccgatcgtaagtaaacggttgtcttttcagtttttctgccacatacagatttacgtgtacattccgatgtgcccgaataaacttcacgcaccactgatccaatttttcccgttcctgttgtaattgcttccaatcctccactcgttgtgacaccccgctcttctcttccaattccttgataatggctctttgctcgagggtctgttgctgatagtcaaaatagtcatcttgtgccacagaacctgttaccctgtaatttttctcttttcgaatatcatactcgctaaatgccgatggcaggctatctatattgggagtcttgaatctcaattctccattctctgcgaaaaactcgatatccttgtatttcaaacgattctcttgcttcaatttgaatcgcaataaacaataggtaggggttttcatggtatcccgaagcgcaaaccgcccgttgatgacgtatcccgttatattccggtgacttccatccttgggatacagggacacttccgtgctatccggcgcaccgggagcgatgccttccaacacgaaagaatcactcgtcgaccgcacacaacctactattcccaacagcaataatattatcaggtacttcatacatattgattttaagggcgtaaacattttcaatgtcaagacaacaattccgataatttatcttttagttgctctcttcttaaacgtctatctataatttgattattctcatccaaaatataaatcagcgggtaagacgtcccgatccgatacaagtaatccacgtttttaccatctttttcccacgcgattccctgcatccatggcaagttatcctctttaacaatttctgcccaacgtgccttatccttatccaaggagacactaatcacttccaatcctttatcatgaaactcccgataatatgttgaaatttccaagttttcttgacgagacatcggcgcgacagtattccaaaacacgacgagcttcacttttcctttcacgtcatacaggttgacctttttccccgactgatccacgaaagagaagtcttcagccgttgccccgatatccgttctttccctgtatgcaatatcttcagctacctgtcgtccccattccgtggctttccctttatcggatagcgaattgtataaatctttcgcgatagatagaacatgtatacgcgtatagctggtagcaacataacccgctatataggaatccggattcgccttaactaactcaaactctttatcttgtttatccttggctgcataaaccatacattttcgaagcgagtcaagcttagcccgatcttttgcttgagaggcctcttgttgaaactctacacttttcttataagcttttttctggatttcacaaagttgattaaaaacagcctgctctgcccctcctccttctacccaagaatccgctccaaccgcaatgccaatttttgctttataattttcattttccaacacgaaaggcttcgttacttgttgtcctccaagggataatactgcaaatatgaccggttcattaacatgtcctttcatttcaaattttccatcttttatatccgcaacggcaactgtatctttcacgaccatacgcattccgacctcaacctttaaaacgtaaatattcccaacttccacaccatcaacactccctgttatcgtgtaactattttgagcattacaaacacagaaaaccaaactcgctaaaatcattaaaatacttcttttcatctcatttacatttttcgtacatacaatttaacatcatcaatcatagcaggtcgatttttcaacagggacgacctgcaagcacctgtagagggcaatatcgtgcttcttcctaaacaaggagagagcggagaaggtcgttatcaacctctccaaccctcccttgcaacaggaagagcaaaacattgcattgtttaggactgatatatagcccttgatttttacttagataatttttctattttagatcccaccactcttcaaaagtgttcacgaagccttgcatcatttggaacttacggagaactttatcataatcagcataacgatccaaaaattcctgctcgcgtccacgatatgcgtacactcgcgccacgtattcgatcaaatcatcctcttgcgtgtatgtcgcacgaacatccgggatgtcaacataccaccccaacatccccatatccttgtacacatcaaaattatattccgaggcggtactagcatacgccttattataataggcatccctcgtcccttcattggttatggcataccattttaccagatccatattcatattcccgttcaacatccacgataccaatttggatgcgatcacccgaccacaccacaaatcaatttcttcgtccgtcatttgaagaatatcacacaattgcccgacgacaacacctttcatcgccacgtacaaaggtttattttctattctacaagggagctgcgaccaaggtaatatcaaatttgcgttctcgttcaacgaatccacaagaaaataacatttaggaagagcctcccccaccttgggtacatgcggaagcacccgattccggatcaattctgccgcttttaacatggcaggagtatcgctactctgaacgatataatgcgtagatccttgcctatcatcttccgtactaccaaacatcacgtaggaaaggttgaatttttccgttctcaagatgggattcccttccgcgtctttcgcgtaatattcttctcctaaagtatcactgacaaaaatcggtactcccgtttcagcataaatcttatagaccaattgattaaattcccccggcttatccggtatcacgaaccagttccgatcggcataagaaggcgaggtaatctcctcctcatccttgttgcaaccaaccaaaaccaacaggcagccaaaaattccgtataacaagtatttctttaacatatcttccgtgattaaaattgcttcacttattctctattctcttctaaaattcgggtcttcattcggacgttccgggcgatccggattttccaatacaccctcactatatgatatttccttactcccgaaaggcataatccagccattatccgtcccgtaaggtttcaatagatagtaaccggcatactccccgttttccgtttcataaaccatgtgacggatagttgtctcaagcgggtatttcgtgttcactgcataacgcctcaaatccggccaacggtgtccctcgaaacaaagttctcggcggcgctccgagcggataaaatttactaactctttttcactcgatgaagacaatttaggttgcattcccggggcataacgagtatcaaataaaggctgtaaagtcgctatcgctcctgccagatcccctttcatcgcttgcgcctctgccttattcaagtatatttctaccgtgcgaatcaagaaagaatcaaataccaccgggtattcccaatattgttcataactataattttttaccactccaaaccggtccgaatttatccaatgtcgttcaaaataacacctaaaacgaaggtcaagcacctccgcatccaccctatactcatctatcagactctgagaagcagaatacacgagagaagtgttaccataatcattcgttgccggcgtaacataatcttgaacagtagcataccccatcgtgaacacgatttccggattggatgccatgtataaataatcccgctcatccagccattccgtgtcataaaagaaattgtttagatcaagcatctgtaatcccatgttcaatgccgaatcacattgcgtgatcacctcatcatatctctccatgtacagatacaccctactcaacagtgtccgtgcggctaattgattcgtacgataaaagtttttttgctctactccgcgcaagtttgcgcatgccccgattaaatccctttcgataacccggtagacctctcccacggttgcccgggaaaacttatcctccacgatccattcggtcgtcttcagcgggacactcaaatccgctccattatttttcacatcgtatgcccaaccataaagattactcaacatcaggtagtaagccgctcgcaagaactgacattcccccaagatacgcttccggtcctcgatcgggtcgttcgggaattcatccaaagtactcatgatcgtgttcacgtaagcaatatgagcgtataatttctctaccgttttatcttcgctatcctcaccggtattagtttgcaaataaggatttttctgccaagtagcagtattacgcacttgtggtatgaacgaaggattatgactcccccaccccatcgccacgtgctcttcggcatcatcatccaaggcgaacaggtaaccgtaatagaggtcattaaagccaggtgctttcccgtcgcctctactctccatgtatccatttcctatcaacgcctcatccaaatccttgcacgaggaagcgtagacctgatcccgagaatactcttccaaaaaatcgctacatccacctcctaccatatagcacacgaatatccagatataaaatataatatttctcatatcatcaaaattaaaatgttacattcaacgtcaacgaataggtcggacgaaccgatatattgatcaagttcgtactacccgactgagagggatcctgccctttcaacttcttgctgcaaagcgtgaaaagatttgttccactaacggataggtacgctgatttcatataaagacgtttacacaaatgttccggcaccacgtaacgcaactggagactggaaagtttcaggtaattacccgacgcgacacgtatatccgagtaatcatacatggtccagtaattctgctgccaatcatacgtattatttttccaccaatagttattcatctggtagtaggcttctccgcccacgataccgggaatcgtggtatgccgttcatcccccggcacgcgccaacgtttttcccagtcccgacgcagattcttctccggcaacggaagagatcccccgttatcgtacatccggaacaaacgaattttggaaccaaggctataggtcagattaaaagccaaaacccaattgttgtactcgaacgagttgtagatacctccctgcaagaaaggttcccgacaaccggagcgggtcagcaacttcgttctccatacttcttccttatccatattcgaatatatctcggcattattgatgattaccggatccccgttttcatcatacacgggatccccatttttatccaacatgggttctttctcgattgccccgtaaaattcaggagctcccgtgtcatgatttaatccccggaaccggtaactatagaacgtattcaccggacgtcctgacacctgcacttgcccattcaagtattgttggatcgtaacctcattgtcttgaatctttttatctttcggtttcactttatccaacaattgattgaaaaccgaaccgaattgcggatcaaatctccagcggaagccgcgacgctccactcctccggaagtcgcttcactcaacgcggaagatactttattgatcatattatcgatcggggtaaactggaaggtaaactcaaatccttggttaatcaatgtcccggcatttaccatgtagtctcttgtcccattgaacaccgcaaccgtttttttcatgaatgcattactcgtatgccgatagtaataccccaagctccccctcaacctgttcttgaaaagagaatattctatctctccgttaaaagttgaggttgtttcccaccccaagaagggattcgggaaattctgtatcgtggaataatattcgtcaaaaaacggatgtgtaccatttttttgaataatcaatttcggggattccgtgttggacatatttccctggtaaccgaaagataatttcaacgcaaacgtgtttacccaactaaatccgtataaaatattatcatgcatgttccagcgtccggaaagagaccaaataggcaagaacttttcatgacttctgtccccgaatttattcgaccaatccgcacgaatgttcccgttcaatatataagtattcttccaagcccacgaagcactgaaaatcaatcccacctgacgagtcagattatcctccatacgacctcgtgcctcatccgaatgcgaccattccgtgaaagacgtgtatttcttaatatcccaattatcaaaaatcatcccgcgatccggaagataatttctcttggttatcccgaaaccagaatatttcgaatgactcagttctccgattaagtttgccgttatactttgattttcagtcaacgatttgttataagtgagtgttccgcgaagactataactctcgtttttcgtattcgataatttcaactctcctccggcgacacttgtagccgctgcagcattttggtcaccgatctccaaagcagaattcggtaaggcccgtttcacaatacacctcattgccaacatcctactcgtctcttctccgtaataagtgtcatcgtccgtgtgggaaacattatacgagaagttcacctccgctttcagcgaggaaataattcgatagcccaacgccatctgcatcccgatttgatccgtatcaatatgccgccatgaatgctccatatcgttaataatattataatcggacttatattgactgttttggtctacatcataaaataccaattccccatcttccccgtaagcaggcacactacgagaggtgttgtaagcgtaatttgctacccccacatcttccggggtatactctttcttttgcaaatttccgttcaatccaaaacggaaatcccacttgtcataattcacgctcaaattggtcatagccgtgtaacgcttgttaccttcaccccgcgtgtttcctttctcatccatgtaactcaaggatgaataatagcgaaaattttccgatcccccggatacgctcaacgtgtgattgtgagaataggtatcctgtaacaaaatgcccaaccaatccgtgttggcggtctccatctcggacacctttcccacgaattcattatacgtgatcttattattcaaataatcagagtaagcggcctcatacccgacccaagctccaagagacggcattctccatccggcactaatcgcctcacgagaataagcgatacgctccatcgaattcatcacgttcaccgcccgatccgtgtaacgcgggcgctgacggaaagtaccggttaaactataagtcacggcaggtttccccactttcccctttttggtcgtgatcacgatcaccccgttggaagccttcggtccgtaaatcgccgtggcagaagcatccttcaggacatcgatctgatcaatatcactcgggttcaagccggaaatagcattcccaagcaggttcacgaagtccaaatcattgatattcgaggcatccacgttgaccggatcttgcaagatcactccatccaacacccacaaaggcgctgttgatcccaacaaagtcgtcgttccccgtatcttgatcttaggtgaggctcccacctgccccgtgttttgcatgaaaatcatccccggtacctgtccttccaacatttgatccagcgtgctgactcccggctgcatgatatcatccattttcaaggaggtgattgaactcgtggatttccgtttgtccatattgtaataccccaaggagactacctcttctaattcgttcacatcctcctccatgaagatgcggagcgtgtcgcttgctgccgtgaacttcacctgccgcaattggtatcccacgaacgagaactccaacataccttctgtcataggcaaatccatagcgaaccatcccctagtatccgttgccgttcccaagggcactcccgctacttttacggttacacccggaagcggctgcttttgcgtgtcataaacgaatcccttcactcgtaacgacttcttttgagattgctttaacactataggtttaataataaccatattatccacatactcccacgtgaaattattaccaagaatatattgcaacacatcatccactttcacatttttcacatcaagcgaaattttccggtccaccttaatctcgtcaaagctgtaaaagaaatccaattgtgtctgtttcttcaactccgaaatcacattgacaaatgacatttcttccactttcagcgtcaccatctgatcctgtgccctcacagatgcagaaagcgaaaaaacgaaaccacatattaacaaaaaagtcaatttcataatcatcaaaattttggcacatcgatttcttaacggaatccacgtgcccgttcgattttttttcatacttttgtaataagagttaaacaatcatccttcagggatcgcgagtccccgcgggacgtttaccacaccgggagttgttgctgcaattcccggattgtttttaattattcctgtttattatttacttcactcaccgtcaccacccggccattcacgctaaagcgtacccgcgtggttttctcgataatcgagaatatcttgtttgctgaatattccttgttaatcaccccggcaaaagcaaaacgtttcaccttctcggaagtaaagaagaaatcgatgtcataccaacgttccagttgcaccgtgatctcctccaacgtggctccctcgaaatagaacttcccgtcgatccatgcggtataaatagacgtgtcgacctcttttgtcttaaaagccccgtctttccattccgcttgttgccccggtaaaataacttcacccttcccggtcaaccgatcacctactcgcaccttgccactcacgagcgtcgtccgtacagcctgttccgaaacataagcactcacgttaaaacttgttcccagtacacgcacatccacctctttcgcttccacgataaaaggcttcgtagtatccttcgccacctcgaaatacccttccccttccagatacacccgccgctcttttccctcgaaacgagtcgggaaacgaagtctcgattccgaattcaagtacactttcgaaccgtcagccagaatcaattgatactcccctttgcggggcacgatgatcgtgttgtactcgatcttagcgggtgtcccggccatccgttcatacgtcacgcttttagaggaatcgagccggatgcgaacatcacctttattcaggatagtgtcaccggcaagcaaggataaatcgattctttccccttgttccataagcaacacggcacgaggtgttccggcttctatctccgggaccactcccgccacgagaacatcctttttctcccgtgagtttatccataaaattccgcccaataacaaaggcaacatcacggcagccacccaacgccatgcaaccacacgcctccggttccgcccctctccccggtattgcttaacgatccgccacattttctctcgatccgccaccaactcgtcttttttccgcatcccgacctctctcaacacacgcctcaccccggtaaaatcctcctccttccatatcctctcccactcggcatcccccggcttaaccttgccctccagtatcgcccgtaaccaatctttctcgtcttttgtactcatactatctcgtttttttaacgtaaagccttctcatccgactttctacacgtaaagcgagaagtagatcaattagggtgaaaagaaatcgtaattttttttagaaatttgtaatatttctcttttttgcccgtcgatagctatgatagcaaccaaaaccggcacgaatcgccaactccgtcatgcactctcccgcgtaagtcgaatcggccaacaaagactccatctctcgaagacggcaatcattaatataagcattaaaattcatcccgtacgtgcggttaataaacgtggaaagatacgtgcgattggtctgtaatcccccggtcaggtccgttatcttcaattccgggttcaagtaaggcttttcctctcgcatatatttctcgaacctttccttattcaaaagcggtggtttcttgataaccaaacgatcaccggacgcccccctctcgcaaggacacaagacgtaattccccacgataacattataagatataatcgagaactgcaacaacaaaataccgatcgggagaaaatcgacccaataactttcggcaaaaagaggctccaatagtggcatacacaaagaaacgagaaacaaaagcaacacgctccctaaccaacgcaagggaggctctcccatgtcgcccgaccgctcccgcgtaagatgccagtagcggaacaaacgtttcagccccagcaaagtataacaaagacaaaacaggaacgccaccatcaattgggacgtgaaaaaacgagtaaaataaaaataaacatcttccagcggactatccacggccacgatcgctacctgcacgtccaaaggtacgaaaaggctccataccagaagagcaaacgggatcagcacgggcaacccgtaatgccacgtggaaaaacgctcggaagaatccacccgtgtcaaccagaaaacaacatgatagaaggtcacggacatcatgataaacgaacaataacacaagctattcaaataaacgaaaagacgaggcgaccacgtatagacaatcacacaggcccacccgaaagcaaccgagaaatagaaaaagaatagcccccgtttcaagtaacgctcttcctcctgcacgctatccttataagtaaggagcattaacaagcaacaggtcagggccgagattaccggaaacaggttcgtgagaatcgatatccatgtttgcatactcatatcacacaaatatatcaaaaaacgtgcaatagcaccctgtacaacagatactttaattatcatcattcgtgcatttcgttcaagattcacgcactgcaagcccgcttcgaacgatttgtcatgttatcttttttcacttttgaacgatttgaacggtcgatttatatactttgcacatcccggttttcttctttaacctatttttaccggaaagaatttatcatctaaaaacactatggacgacgaaaacttatttgaaaccaaccttgccgattcagcttggcaatgggattttatcgacttctgggcacaacccctaagtcaaagaggcatgaaacttggaaaggaaaaagacgacaaggtgccatccccggaaaaggatcagtgacctgttcttttcctgaagaatgatcaagacctattgtcccgcctcttccttgaaaaaagaattacacaggattaacatgaaatttttatcccgatcgccaaactcggacttaattttcttgtaagccaccttgacctgtgtcttcaccgtattcacggacacgcccaattgttcggacacgtccttgtaactcaatccctcgatacatcccaaaataaaaatctccttgcacttgggcggcaaactgtccatcacgatctgcagccgttcgtacaactcttcgaaattctcggaatcctcactcgattcttctccggacgccatcatttctcgctggtagcgtcgctccacctccgcgtgaagcttacgatcgatacaagagtttttgacggaacgacttaaataagcataaagagaaccagaatgggaaattttcgcccgattcacccacaggtaaataaacgtgtcctgcacgatgtcctctgcctccgcccggtccccgacaaaacccaaagcgtaaagatacagttgttccgagtaagactcgaaaaaagaattgaacgcactccaatctccttcctgcattttccggaacaaaactaactcatcctgcataaaccacatattcttattgatagcaaaaataatgattctctttatattttacgctcccatgacaggaaaatacgaaaattcgtatataatcgcttcccccttctcccgctttcaactagcccttctcccccttcccacgacatccgaacctattttaccatataacaaatatagtacacgacacacccttgtttcaaatataatcgtatcaaaaatcaattttatcgaaggtgaatgctagatgaatgcaggatgaatgcttcgtggtctaaatgaacttatagcaaagtctctatagaatttcgggcaaacatagtttaaagccatcgtaataccagccctttcacaaagcaataatctcccatgtcccatctcacgccctttcatcaccctttcatcgcccttttaccatacacgatgaagagggagaaaaacctgaaacaaggtctagaggagattattacagatatatatcccaaacacttcaatggttttaccctgaaaatacagcaacaccccatcggtcatcaatatttattccaccgaagagtttcaaaagaaatcagaatcgtttatatttgcatcactattaagataaaagctaaaaaagaagacatggcacaaactccatctattccaaaaggaacaagagactattcaccggaagttatggtgaaaaggaattatatattcgacacgatcaaatccgtattcaaactctatggttacttgccgctggaaactccggcaatggaaaatctttcgacccttatggggaaatacggcgaggaaggggataaattacttttcaagatactgaactccggggatttcttggctcctgtcaccaatagcgaagtggaggaacgcaatattccccggttgaccaacaagatttgcgagaagggattgcgttatgacctgaccgtacctttcgcccgattcgtggtacaacaccaaaatgaaatatcattcccgttcaagcgctaccagattcaacccgtgtggcgggccgaccgtccgcaaaagggacgctatcgcgagttctaccagtgtgacgtggatgtcgtgggaagcgattccttactgaacgaggtggaattggttcaaatcgtggacgaggtgtacaaacggctgaaaataaacgtacgcttattgatcaacaaccggaaagtgctggccggaattgccgagacgatcgggcatcccgacaagctggttgacatcaccgttgccattgacaagatggacaagatcggtgcagagaacgtgaacgccgaactccgggaaaaaggagtgtcagaagaggccatcgagaaattacagccgattctacacttggaaggttccaacgaggagaaattgacccgcttacaagaagtcctgaaaggcagcgaaaccggattaaaaggagttgcagaactctccaccgtgttccgttacctgaatcaactggacatccaaacagaagtaaaactggacctaacacttgcccgaggtttgagctactacaccggagccatttttgaggtaaaagccaaggacgtggagatcgggagtatcaccgggggggggcgttatgacgacttgaccggtatcttcgggatgaaaaatatgtcgggtgtcggtatatctttcggagccgaccgtatcttcgacgtgatgaaccaactggacatcttccccaaggattccacggcaactacccgtgtacttttcgtgaacttcggagaaaaagaagaggctttctgtcttcccgtgctgaaaaccctacgggccgcgggaatcaactccgagatataccctgaagccgccaagatgaagaagcaaatgacttacgccgacaaaaagagtattccctacgtggccttagtcggtgaaaacgaaataaacaataacgtggtcacgctgaaaaatatgctcaccggagaacaagaaagtgtagccgtttccagcttggttgacaaacttaaaagcgagaattaaaatatgcaactctatcgcaaagaacaacgtccgctgaaaagccacggatttgatgtcagattcccgtgatcgggcatctaacggttgcaagttacaagttcacaagttacaagtttaaatcacttgcaacctgaagaatcgaagattcaacctgtaacttattatgtgtgtgcgcaattttcaatttctaattttcaattttcaattaattatgactcattatataaccccagagaaattaactttcgagcaaatcgaaaaaatcttaactaaaaagtataagttagctttatcagacgaaagcaaaaaactgatcaatgattgcaaggcttacttggatcacaagatcgcaacttcagacaaaccgttgtacgggatcacgaccgggttcggctctctatgcaaaatttctatctcgcaagaagacttaagccaattacaggctaatttggtaatgtctcacgcttgcagcttgggagaacccgtgcataaagatattatccgtttgatgctgttgttgaaggctcatgctctctctttaggaaaatccggggtacaacaagtgacagtagaacgtattatcgatatgttcaaccatgacgttcttcccgtggtgaaagagttgggttctttgggtgcatccggggacttggccccactggcaaacttgttcttgccgttgatcggagagggtgaagtattctacaagggaaaaatctatccagcaaaagaaattaatgccaaatttggctgggaacccatccaactgggagccaaagaaggattggccttgttgaacggtactcaattcatgagttctcatgctgtttacgctttattgaatgccttcaaagtggtaaaatacgctgacattatcggggcgttatcactggaagcatacgacggacgtatcgacccgttcttgccgcaaatccacgaggcccgtcctcatccgggacaaattgaaacggcccgcaatatccgcaccttactggaaggttcagaattccagaaaatggaaaaaactcacgtgcaagacccgtactctttccgctgtatgccgcaagtgcacggggcagtgaaagacaccgtggcttacgtggcctctgtcgttgaacgggaaatcaactcggtaaccgataacccgacgattttcatggaggatgacttgatcatttccgggggtaatttccacggtgaaccgctagcactggtattagatttcttgagcatcgctattgccgaattgggtagtatctctgaaagacgggtataccgtttgattgccggagatcgtaaaacacctgaattcctcgttgccaattccggcttgaattccggtttcatgatcccgcaatacgccgctgccgctatcgtcagcaagaacaaacaattatgttccccgtgttccgtggactccatcccgtcatccaacgagcaggaagaccatgtcagcatgggtggtaatgccgcaaccaagaccgtgaaagtgatcgagaacgtggaacgcgtgttagctatcgaattgatgaatgccgcacaagccatcgatatgcaacgtccgacgaaaacatctgaatatctggaaaacttcttggcagaattccgtaccatcgtaccgttcaacagccaagaccgggtaatgtaccaagacattgaggccgccgttgaattcttgaaacaaggagaatttgaaggatttaaaaattaggtgatttaaaatcttaaatctaaaaatctaaaattagagaggggtctccctctcttttttgtttattttaaaattcatcatacattttttattcgtacatttatggaatttctgttctccccgcatctatgtaataacatttcctccgggaattgcgaataaacatagaaaggaaaagtataattaaacagatcacgatatgatgaaaagattacttattatcacggtattattattcggcgcactcgtcgctttcggacaacgagatgtttccgacaaagagaacgaggcagcaccgaaaacagccttaatcgaggcacaaaaggattatcagaaagcaataaaagaaaaaaactctccgctactgattcaatcattaatccgccagatcaaataccaatctttgattgacatggacagtattcctcccatgttgcaaaacttggaagaatacattgaaacagaccaaaatattgttgaaaaaagcattctccactcgttattggcagaactttatcaaatgtacttcgatacccagcgaggcaagatcaatcgcaggacaccaatcacgggttacatacctcgcaatatggcagaatggacaggtaacatatatagagaaaaaatattccaacatgcactggacgcggtaaaagcccaagcccaactctccgaggtaaattgtcttacctataaagaaattcttatactcgggaaaaactctccggcacttcgcccaacgatgtacgattttctcgtgtatcgcagtattgacattctaaacactatttctcgttacgatagacaggaactgctcacgaacaagcaactactgttcgccccggtaaaggaatttgtccaaatgcccatcgaggtaaaaaagatggatgcttattcaaacacgctcaaactttatcaatcgttattacaatctgaaattgcggctcaacgcacggatgccattcttatttccgatctggaccgtttggagtacgcaaacaatatcatcggtttaagtctgaacgattccttatacattcaggctttagaacaattatcacaacaatatagcaagaacccttacaaagttgaaattctttacaaacttgcccaatattattaccaaggaaattatatttcaagtaatagagatactcaaaaagccttagatatatgtaatagcggtattcgtcagtttcccaagtatttccggatagacattttaaaacaattagccaaggaaatcacccaaactaccctatcttattctataaatcccaacgtgtacccgggacacaaacaagaggtgaacctatccttcaaaaacttatcagagatttcaatctcactgtacaaaatcacggaacccactctggaatacttgaatttgaacaaaagagttccgaaactggaaaaaatatcgactcacacgtatcgtcttcccaagcgactggattctcaggacacgattctacgacttcccgtacctaacacgggacgctaccagttaaccgtgtcttacgcaaataattccaaagcggactcatcctatttcagttccagccatctatctaccattgcccgtaaaacgggagaaacaacttataatgtcctcgtttgtgatctcatcagcgggaaacccatcgaaggcgcaaaagtaaaaatctacaagagaaacggacaaaagtacagtctcgcgagagaattttcttccgacagaaacgggattgccacgttgaatgaatccaatcctgacaattattaccaagtaaccttgggagaagataatcacggcacgataaatcgccttccctaccaatactttggccgtacggatgagcgatcatcatcggtaaaccttttcacggacagggcaatataccgccccggacaaatagtatatttcagcggcatcagttgggaagccacccaaaacgcatccaaagcgattgtcgggaaaaactacacggtaactttacaagacgtgaatcaacaggttatcgcggaacaagaagtccggacaaacaagttcggttccttcgctggaaagttcaccttgcccaaagaagtattgaatggtatgtttatcatctctaccgatggaggtagccaaatgatcaccgtggcagagtacaaacgtccgaaattcgagatcacgtttaccccgctaaaggatgcctataaattaggggaccggcttaccgtttccggtattgccaaaacttattccggtgtcaacatcgaaaatagcaaggttacctataccgtacaaacccgtacttttgattggagccttcaggaaaatacgattgcaacaggaaaaacacaaacgaatgcaaaaggagaatttgaaatttctttccaaacgaaagaatcacccaatacacctacaatatacagaggattcgaaacttacacagtttccgtcacgattacaacgtccaacggggaaactcaggaagcacaatacccgattatcatcacaaatcaacgttatcagttaaactccctcataacccctgaaatcaataaagatcttccaagtaagattctggttacaacccaaaatcaactcggttatcctttgacagaaaatatcacatacgaactattctttcttaaaccgttacaaaagttaggagagcaatacgacgaagggaatccacccattgacaaaaaagttcgagaaggaacgttcacgactggagaagacaaaaaactggaaatgaacttgtcgtccttgccttccggtgcatacttgttgaaatttacagggacaggaaacgataaagatattacttaccaaagaatcgtctatctgtattccactcaagacaaacgtcctccctatccaacttactattggtgcgtgcaagagaaaacggtatgtgtccccggcgaagatgccaaaattctggtgggttcgtccgctaaagaagtatatgtattatatgaggtatattccaatcagaaattcatggaacgcaaacgcttcatgctgaacaattcctatacaacgctgtctattccttacaaggaaacttacggcccaacagcagatgtctttatcagttacataaaggataacaaattcttcctagaaaacattactttaactcgtaaagaaacaagcaaacaactggatattaccacgaaaacattccgggatcaccttacccccggacaacaagaagaatggtcatttgtggtcaaaacagaacaaggaaaagctgtcatagctgaaatgatggcaagtatgtacgatgcctcgctggataaaatccattcacatcgctggaacttcaatcccgtctattccacctatagcatgccccccagatggagatatactacctatccgctaaacggttatttaagcgaacgcatcaaatgggcaaatgtccccagatttgaatatgatgtattaaatctatatggcctaaatcagtttggattctctaacgaggcacagatcatggtaagaggatacgatggagtaccgggagccttagcggaagaatctacgacagaagacgtagcggttgttgctttcggaaaagtagcaggagtttccaacttaagtaattccgacacgagattctacatcagaggcttatcttcttttaaagaatccggagacgaggcctttgtagccggcgaacttgcttccccggaaatcagacaaaatttccaagaaacagcctttttcttccctcagctcctgacagattcgaccggtaacgtggtaatcaaatttacagtaccggaatcaaacactacatggaaatttatggccttggcacacacaccgaccatgcaattcggacaaattgaaaaattcgtcgttacaagcaagaaatttatggtcaacacgaacttaccacgctttgtacgtacaggtgataaagtcgtgttacaaaccacgatcaacaatctcacaccggaagagcaacaaggagaagcttaccttgagttatttgttccctctacgaacgccgtagtcagcaaacaacaggttgcatttaacgtgaaggctgaggaaaatcaaaccatcagttttgaattcaccgccccgaaaaacatggatttactcgggtgccgtattgttgcttcttcttcggaattcagtgatggagaacagcatgtactacccgtggttcccgatgcaaccctagttacccagactttacctatattcacgcaccaacaggggcaacaaacattcaagctgaatgccccgaaaggtgttaccccgtaccgtctgacactggaactcacggccaatccgatatggtacgcggtattggcattaccgacaataaacacgccccagacagacaacgtaacggagatcacggcatcctattatgtcagtacacttgccacggctattgctaacgcaaacccgcaaatcacaaataccatccggcaatggatgcagaaaccagacgcagcactgacctctccgctagaaaagaaccaggaattgaaatctatcctgttgcaactttcaccttgggtaaccgaagcccagaatgaaacccaacagatgcgttcccttggagaacttttggatgtcaaccgtcaaaactacatttcgcaacaggctatcaacaaacttgccgaactacaaaatgaagatggcgggtggtcttggtttaaaggatttacttccagcacattcatgacagaaaacgtgcttgaagccatggcaagacttgtaacactaaatatcacaagtcacccggagcaggtgaaaaagatgcagatcaaagcactacaatttctggataaacaaatacaggaatcatacaaacacgtgaagacagccggatattctcagatattgtacctgtacacacgtagcgcataccgggatattccattaacaaatgcattggaagctcacaagtattatctcaatcaactggagacgtcatggacacaactttccctttacgaaaaggccttgaccgccattgccatggaacgttacgggaaaacggatattgcaaaacaaatcattcgttctctgaaagaatattccacgataactcccgaaatgggaatgtactgggcaaacaaccgttctagcctgttcacgaattccgccattcaaacccacgtggctgtcatgagcgctttccgggaaattgaaggtaattccacggacacggaattaatgaaacaatggttactgcgccagaaacaaactcaaagctggggatcaaccccaaccacagtagatgccgtttatgccttgttactcactggcaataatcaattagcttctccggaagatctaagcgtcaaactcggaaacaagaacttgaacatctccccggaagaaacaacgctcggttacatcaagcagactttcacgggtaaagaaattaccccgaagatgatgaacgtaaccctttcaaagaaacggcaacaagcaagttggggaggtttatatttacaatactttgagaaattagacaagattaccagtcattcaggtgaaatctccgtgaagaaagatctcttcatccagaaagaaggtgataatggaaatacattgacaccactgacaggacagaatttacaggtcggagaccgaatttgcatccgtatcacagtaaccaatgatcaagatatgcaattcgtacatctgaaagatctgagagccggatgcttcgaacccacggaacaactctcgggtaaccgctggcaagataatcttggttactaccaagaaaccacggatgttgcaacaaatttcttctttgattttcttcctaaaggcacgcacgtgttcgagtacacggtgtggatcgcccaaagaggaacttatcaagatggtattgccacattacaatgtgtctatgctccacaatattcagcgaacagcgatgcgggaagtgtcaccattcaatagataaaaagaaaagttgaggatttgatcctcaacttttctttttataatcatcttacttttcttccagaattaaacggaaacctgatccgtgtacattctcaattttgattgctggatcatccttaaaatattttctcaacttggtcacgtaaacatccatactacgggccgtaaaataatcgctggctccccagatctcgttcaacgccttatcccgttgtaacaggccatcccgatgatagtataataattccagcaaacgagactctttcggggtcaacttgataacttcatcaccttttgtaatcgtacgcaactccgtgttaaacaggtaagctcccaactcgatcaatttaggttttacttctgtttcctcgtgttcgcaacgactgagaatagctttaatcttaaagatcaacaactcggaatcaaacggcttaacaatataatcatctgccccaatttcgtaacctaatttcatgtcatccttcatacttttagcagtgatatacacgaaaggtaccgtaacgtccagctcccggattttctttcctaaagtaaaaccatccatctcgggcatcatcacatccaatagacacaaatcgaacttttccttacgaaatgcttcaaagccatcgactccgttcgtgcagtgtatcacatcgtaatcggataactccaaataagatttcagaaccgacccgaaacaaggatcgtcttctaccaagagtattttatgtcccatatctatttatttatatatttactatttcaactctccattttaaaaataatctctacttgagtccccttattcttctttgaggttaactggatctctccaccatgcaattccacgatcgatttcgcatagctcaatcccaatccgaaccctttcacgttatgcacgttcccgctaggcacccgatagaaacgtttgaacaccttgtcctgcgcctctttcggaattccgattcctgtgtcccgaactccaataataaaacggttaccctcctgtttcgtgtatatgtatatattcaacgaatcatgggaatatttgatggcattatcaatcaaattacagacaacattcaacatatgtacctcgtccgcagatattacataaccttccgggtctagctcagctcgaattactcctcccttctcttcgacttgtagtctgaaatgttccacggcctcatccaccaacacgttcaagtttacaggaacttttttcaaatgtacttctctccggtccagcttagcctgcaacaagattctttccacgtatttattcatccgctcgttctcgttacggatcattgaattaaacttcaatatctgtgttcgatcgttcaacaccttttctttctcaatagcagacgtggccagtgaaatcgttgccaacggggtcttgaactcgtgtgtcatgttattgataaaatcattcttgatcacggacaatttctgctgccgcatgataatcacgatcgtaataataaacacactcatcaaaccgataatacaaaaacccgaagcgataaacatccatcccatattattatagaaaagagaatctctcgtatcaaacatcacacacaggttagcatctttcgtggtctggtcattggggaacaactccacgtaatagaatccttttgttcccttttccttgatatattgtacgatctgctcccgggtcataatcttccacgtgaacgggttatcaattcccgtgttgatcatttcctctttcaagtaaggattcaaatcaacattctccaagcgtttctccacctgcgccatctgcggatctttctccctcaaataacgaattacaaactcccgtaccagatccatcattcgctggcgctctaatgaatcggctaatctttcggcctccgatgtcgcagaacgcatcacttgataaaggatattattatcccggtcagtttccaagatataaccgggacccatccgtcctcccggattcataaaaatcctcaacatactagagatattccctccctgcccttctccaactttacctttagagaaggcaagcgaaaaaagagagattccattattgcccgggtcttcatccgccaatacagaatcctgagcatgattcattgtagaaataacttcctccacctgcgtgtagcgttctttcaaatcattaaaaagacggatattattggtttgctcgaccagattgacagctttccctaaaacatcgtacacctttgaggtgaaacgagcctcaccttcccgcatactgtatttcatccaaatccattgcacgctcaccaccgcaataaaagcgataagcataatgatagataatattctgattattatttttttaatcataagctgccatatacaatcagcgaaaatagcattttttatttcatcatgcaatgacttgaaaagaaaatatcatgaaaaagaggtacccgggtaaggtacctctaaaaaacaactaagtaataaaaacgggaaaattaaaaccaccataatggttttatgctttatttcagtttgctctctaacactttataaatgttactttctttattttcaacagtcattttgttgaacagtttcttttgcaaatccaaactatccactaactggtctttaatcaaaaataaagaaatttctttacgcgggttagcaacaatcaaatctcttgtccaattggcttgttttttcaggaaacgttgtttttgcaactggtgaatacccaacataacctcgtcatccttggaaagtttctctttcttgctgatcttctcgatacgcttgtcgatcttggcaatatcttcaccaaatctttccttgtacattttcttgatttccttgtactcatccatcaaaccagaaccatcagcttcgatttgatccgggaatttgattttacctttgatccagatcatatcttttgtatccagaatagcctcaaccgtagcctttccatcaatatcaacccatactcttcccgggattttaaactgatctgttcttaaatctattttaccatctttcacctcttgttgagccaaaatcgtcaaacccggttcgcccggcatctctgccagtaattttacagttccgttcagtccttctacttctccccgtacttttaccgtatcactatcgcatgcacagaacaaaagtgtggcaagtactaaaaa

SEQ ID NO: 11 - DNA, 26864 bp, Butyricimonas faecihominis
cgatacatctctcgattttttttcatacttttgtaattagagattaaactttattctaacaagctactgtaatagctggttagaaaatttgattttaactattccggtatttgctgtaacaaataccggtttttctttatttatgatttactgttacacatttacctcgaacattgaacttcacccgtgttgttttttctatgatttcgaatatctgtcctgccgtaaaatcacgccgaatcactcccgtgaaggggtaagatttcaactcctcatcgacaaaaaatacttctatatcataccaccgctgtaactgtgacatgatattttccaacgtcatatcattaaaataaaatttaccatcaatccatgacacgaatctcgtaatatccacctcttgcacgctactaattttcccatgccgaaaatcgacctgttgattcgggctcatcacaactagacttttccccgacatatcttgaatatcgactttcccagataccaatgttgtcagaatattacctcgatctttataggcattaatattaaaagaagttcctagcaccttgactatcatatcatccacgaccactcgaaaaggtttttccggattcttacttacctcaaaataaccttcacctttcaaccaaacgtcacgctgacttccagcaaattttacaggataacgtagttccgaatccgagtttaaccacacaagcgtcccatcagctaactccaacttatattctccccctctaggaacaacaatggtgttatacacaatttcttgctttagtatgctacccgaatcacccggaatataagaaatttttcctgaagaacctactcgaacctgcatacctttctccataatcatcgtgtcatgttctgttgtagttaagtccatacgctgtccactagaaaacaagatataagctttcggagttcccggtgaaagcatggaagtttccgataattcgacagaaataatctcttcaggattctccttcaccatccaccatgtccccccggctaaaacgaacgcaacaataatagctgcatattttaaatatcgtttcactcgataacgagaattcttattcatccgagattgcacctgtttccacatttttgctttatcagcctcaaggactgtcaatcgtcgtacacgctcgaattcttcccgcaaatcttcattatcaggggaacgcatcatttcacaaaaagcctcgtaatcgaaatcttcctcccgatcaacaaatgctttcagccattgttcctgattattttgcttctctttttccattatttatccctattacatcttaaaagcaggatgaaatgaaaaaagggtgaaacagaaattaaaaaaatcacctttttaacattaaaacctacttcattcaaattccacgagcttattgttgctaccacttcattattacctcgtcataggccgcgtatacctatacagtcaaacacgtatacctttccagttagccaatatacaacacgacatacccgaactgcaagtatatgcctatcaaaaatcaatttaatcgaaggtgaatgcaggatgtatgcatgttgaatgctccgtggtctaaatgaactatcaggaaacaatcaagggaatcacaagtgaacatagcctaacaccaagagaagcccggcctttttctaaagtaacaacaagatgataaatatcgataattcttccccggaaatatttatatcctcccgcaatttcttgtatgccaattttatttgtgttttcaccgtattctcggaaatatccattcgtgacgcgatctcccggtatttcaaaccatcaacgcaactcatcatgaaaatctgtcggcatttttccggcaaacggtcaatcgcgtccaatagtttctgtcgcatttccttgacggattccacctcttgccaatcgaatgcctcttcttcggtatggaggatctcctgttcataacgatgctcgaccttctcatgctcccggtagttaatacaagcattccggacagacgtttgcaaataagcatacacggatcccgtgtaccgaatccgctcccgattattccaaaaatagacaaatgtatcttgaataatatcttccgcaggttcccgttctttcacgaaacccaagacataagcatacaacaagtcggtatactccttgaaaaaatattcaaaggaacgtatgtctccttgttgcaaccgcttaaaatactcctcttctttttgtctatctaaactcaccacaaataagttttaccacaaacttacgcaaaaactccgaaatatgaacagaatgaattaaaatttcattcctatccggttcataaagcgacttttaacattcatcagacggtcacacgctacccgtgccgggcctcaaacatcaaattattactaaaaaagctcgaaaacatacaaaatgaaagtaccgcaatcgattttaataaaaaactgatatgaaaaattttatttcaaaaacttattattaacttcgcaacacaaatacttaacagcgtatattcactttaaataagaataaacatggttagcgactacaaagaaattctatcagacagcgccaaagggatgaagcgctctgctatcagagagttgttgaaattaactcaaaagccggaaattatttctttcgccgggggtcttcctgctaaagaatctttcccgttagaacaattacaagaaatttgcgcggaagtaatcgccacggatggagctgctgcttgccagtacggttcaaccgagggagttcctgaattattggaaatccttgctcaacgctaccgggatcaaggcttgagctatgttacaaaagaaaatatcacgatcatcacttcttctcaacaaggtttggacactgtgggtaagattttcttgaaccgtggagacaaatatatttgcgagttaccttcttatcttggagcccttggtgcgttcaactcttacggtggtgtaggtgttggtattccacaggacgaacaaggtatgagtgccgtggaattggaaaagactttggctgaaatgaaggctaaaggggaaaaaccgaaattcatctatttaattccggacttccaaaaccccgcaggtatgaccatgccggaagccagaagaatcgaaattctgaatattgccaagaaatacgagatcatggttgttgaggatagcccttaccgtgaactacgtttctccggaaagccgcaacgtatgttgtacgacttggataatggagaaggtaacgtgatcacgttaggaactttctctaaaatcttcatgccgggattccgcatgggctgggttcttgctcatccgatggtgatcgacaacttcgtgaaagcaaaacaaagtacagacctttgtacctctgcgttcttacagaaaatcacggttaaattcttccagaaaaactatttcgatgccaacgtgaagaaaatcgttgatatgtatcgtagtaaactggaagccatgttaggcgctttcgagaaatacatgccggaaggtgttacttggactcgcccggaaggtggtttgttcttgttcttgacactaccggaaggatatgatgcagaggaattattccaaatcgctatcgaaaagaacgtggcattcgtactcggaaccgtgttcttcgttaacggtggaggtaaaaacaccatgcgtatcaatttctcttacatgagcgaggaaatgaacatcgaaggcgttaagagattggccgacgcaatcaaagaactatacgctagaaaaaaataatctagaatgtagatttaaaatttagagtttggagtggagtatatgaataaaattcatatatttcactctaaattttaagactaagttcaaaatgaaagtagttattcaacgagttacacgtgccagtgttaccatcgagcaacaattgttttcttcaataagtaaagggatgctcgtattagtaggaatccaagccgatgacacggatgaagacatcaactggctagcctccaaaattgttaatctccgtatattcgatgacgagaatggagttatgaacaaatcaatcttggaatcaggtggtgaaattctcgctgtcagtcaatttaccctcatggctcgaaccaaaaaaggcaaccgtccctcatatattgatgccgcccctcccgccatctctatcccgctatatgaaaaatttgtcgcaaccctaagccaagaacttcacaaagaagttcaaaccggacaattcggggcaaatatgcaagtggagttgctgaatgatgggccagttaccattataattgactcgaagaataaattgtgatggttgtagataaaagttggtaatcatagcattatttcgtatttccaaacctgacaaacaacaagttacaaaacgaatatccatgatgattaaaactatattatcgatatttttgcattattgacgagcttagaaatagttgtaaaagctttttattttaagaatttgcacttttgagtaccctgaaattgggattaggaacctacttttgtcacatcaaacgttagaggaaaaacgatatggtgacagatcaagaaacaaacaaggtgtatttctccacctggctgaccaaattgaaatgttggcaagatatccggatgacattggaacaagcaagagttccctatggattgttggaggggacacaagactattgggtgagggattttatgccgatacaagtaacacgcaactcttatgtacagtacgtttacaatcccgactatctgcacacttctcctgactatcggacagacggagttgcttgtcttgagagattgtgctttccggacagcaaagtcgtcaagacggatattgtcttggacggaggcaatgtcatcaaatgtgacgattcagttatcatgacgaacaaggtgttccttgaaaaccggcaatggagcaaagcaaaggtaatggatgaattggagcgggttttcggagcagaagtaatcatcattccatgggaccaccacgagcgttacggacatgtggacggaatggtgcgttatcttggtgacgggcgggtcctattgacaaattatggtgattttgctcctgaatttgcaaaagagttggtgaaaacattatcgcacaaatatgatgtgacagaattgagttatcctttgcaaaagccttcctcgtacaactgggcatatatcaattatttgcaggtaggcaaagtcgttctgatgcccaaattggacgatccagaaaatgacatggcgtatgagcagttacacaaccttttcccagatgcttccatttgccgggtgggaggaataaaaccattactccgccggggaggaggcttgaattgtgtgtcttggaatgtgtgtaactgattaaaaataaagctatggttattgatcctcaaagagtaaaacgagcggtgtataaccgcattgattttgagcttccggaagagacctggaaagaaatcaatgatgctttctgtacttgctggaacgaggtcatcggttttggtaatgaggttgattcgattgaggtgaaaaattatattgccgattggttgcggaaacggcagattttactcttagaaaatcgccttgtccacatcttggatattatgtttgactatatcaaaatggtaggaggttttttgaatgaatcgagacctttcttgcctaaacgaatgacgcaccaaaaaggagaaaataaaagagaaaatcaatacttaaacacgcaaaaaactatactcacagaaaaacaattagaggtgataaggaagattgaatcacaaccttgccaaacattgtcgcaaaagaaattgtcattgaaagaaatgagaaaacagtttcaagaaaacaatcctaaaggattcagagggtttaatcaggctgaacctgagaatataaaaggacaggaaaccaaacagtccaagccctaatcctcttggaaggcatgaaatttttctcttactttattgtattaaaaattaaaagatatggaaaaaataaaagaattacaagaattgctccaaatggagaatgtgaaagatgcaaaagaacgttttaaagaaattgcaaaaatgctgtttcaagatttccatattgaaaagggtggggtgtgttatgattttctggagatagaattctattttttcagtgacaatcatccggatactacaacttatccacgaaatacagaagccggagagtggtttttccacctaagcgggcttgatattgcatttaagagcaagaagaaacacgaaaagggtaaggatgtcaatgttttcggtggtgggattttaattcgcagcattttaaagcgagaagaagggaaggaagcagaagttatagccggaccgttgagatgcttgtgtgaattgtgtaaaggaataatgaatataatagggcaacctatttccctacaattagtagcaaatgaaaatcaagaaaaggatgttgatattaaggatattaaatggacaataagacagggaatagccgtagataaaaacggagaaattaaagaagaagcgtgttattgtgcttatgttagaaatcgttacaattgcgattcagagtggaaaaatggggggaaaacctatagtgcgaaaccatgggagagagtgtcgaaggaatgcaagaagtagaggatatgttacaacatcctttatcggaagaagaattaaaaaaggcaatagagaaacatctaggttttgaaatgcctgataaaaattgggatgaaatcaagggtgctttttataattgttcgttggagagggtagtacataaatattttgttgattaagaaaaaatcgtagattctattatagcctctttgaaagatcaaggcattatgttagattctaaaaagatttacagccttgcaaatatatcgagaggactatagattatctgaatagcttccggacacaagctcattgctagaccgactatttgatgacaggcaccatttctgttgtatcccagatccccaaacagcacacaagagctttttaaaatcattacttgagctagacgatataaaacggatggaaggtctggtaaattatggagcacttagatgtctcttttgaaaatctcgcaaaaatgctgtttcaagattttcatattgaaaaggatggggtacgttatgattttcttgaagtaaaattttatttctttaaaatagatgatatagaagaagctggtaaatgttttttccacatgaatgggctttatatttcttttggaagcaaatttgtatactgggggaaaggtaaattcatagcttatagtggtagaatctggatacgtagtatattgaagaaagaaaaggaaaaagaagcaaaagtaataaccggatctcataaatgtgcagatgaattattaggaggtttttatgcagttagtgaagaataccaacataactttcccatgttacatgttcatgatcatgagaatatcaaaattgaatcatgtgttcatcgcttgcctttttgtaacaaaaagtccgatgcaataaaggagaaacgggaaatacaaaatccagtggacctatatgaatataagaacaagatatgggaagaatgcatattacgtagatatcactattacagacctaactatgtaaaactaccgggtaacaatcggtagccacacctccgttaacaattcctcttcaggagcaaccgccggactattcagataacgttcaagaataaaaccttcccctaataaatattcttggggaaggtttttaagtatggcatcatagaatgtgtccaacagggtatagctccctttatgacagaatacagcataaagctgtcggggaagaatcatgctctttatgcggcttttcaaccgggattcaacaggcgtattgacagtcatacaagcataaaaacgacatttatcaggctgggtgataccggtgtcatcataacaaattccccaatactcttcctcttccggcaacagattatggcaattggcatattcatacaaagcatcccatgttgtagtctcaaaagcggaggtgttggtaaatttgtaatctccgatatgagaaagaaataaaagcggtttttcatgaatttccctaatagaataggcaagattgaacgcatgcatcaagacagcaggtgttgcaccaaaagccaatgttcccctcttggctcgggcaggagtcactccgaaatacttcttgaaagcattatagaacgccgtcacgttagcaaaaccgatatatcccgctatccgctcattagtataataaccggattggagcatcccgaccgcacgctccaaacggagacgattaatatattgatgcaagtgttccccggtatatgccttgaaaacaatatggagattacgcacagacatggcagagagcctggcaagttcatttacactgacttgtcggttaaacacatcaggcgactcaaaactccagtcttgttccactatcaaattaatacgatgcaggacggcatcaatttgcggacggtatggttcattcttggcagccatattaatgtttatttgcctttcttgcaaattttgttagagttttctgctctacaaaaaggttgtaccgttataacctttttcaaactattacattttaatatcatactgaaactcttgcagcatttgcaataatgcgtcatattcttttttatatctttccactcttttcaagtctttctctgtaggatagggaagacgagaaatatccatattattgcgtaaatcgttgagttttacattaattgccaattgatgtcctctaaaacgctcaatatagacttctcggctagcagctgtatgagagtttatcagattcaatgcttcttctatttcatcccattctgctttagtcaacttgtgatgcttatcattaggaaaagagattataatatctgtgaaatcataaatccagtcatcattataatcgttcttccaattgaccataacttttttaagcatgcggattatttccttgacagagtaatccgtgtcttcggctgcatcatgaaggaaccccaccgttttttctttccatgaaaatccgtgacctcctacataggaaagatgtccttcaaaatagtctttcccagccttatctacttgacctttgtgtaattctttggctaaacgagcagcggcataagcaatatgtactttgtagtccaacgagtcctcataatcatcttttcttctttgggcggcgatagggtcaaatgtttcaaggtattttataaatttaagatagatgcactctcccttaccggataatccaagcatcgtgtcgaacaacctatcagcgatgtaatccaaagtctcgatgtcttggatattattttttatggcatcatccaattcctttgcggtctgcttgtaaattccctgttctaaagcagtacaattgctgcataatgtgattaactcagaatttgttttcattttgctataaagtggctattaaattcatgaggatgggtttataaagcgattacaattacaaaagtatcacaattacacgaaagtacaatattttctagaattgttttctctctttgatacacggctttttcattcaaaaactctgaaaaatataagaaaacgcttgttttatagcgaaaatccataattttgcgcacagcgacaccgaagcatcacctatggtgtttctttttcatagttatagtattcttttaacttttaacttggtaacaatggatatcgcagaattacaaaccgcagtagatgcatggatcaagacccatggggtaagatattttaacgaattgacgaacatgaccatcctcgtggaagaggtcggagaactagcccgggtgatggctcgaaaatatggcgaacagtcgtacaaggaaggagagaaggataatttggcagaagagttgagtgatgttctttgggtattagtatgcttggcaaaccaaacaggagttgatttgaacgaggcagtaaacaataattttgccaaaaaaacggcaagagatgctaatcgccataaaaaaaatccgaaactcttaaaagattaagcacttttatcctacttttgccaacaaatgcgcaaataaaaaaatatcatgtggattaagattgcagggattcttcttcgtaaccgggtggcctttattattggggtcttgcttattaccgttttcatgggatttcaaatccctaaagtggaaatgtcatacgaatattcgaacctgttaccagccactgatagcgcataccttgactacctcgattttcacgagaaattcgggcaggaaggaaacgtgatggtctttgccatacaggacaaagacttttaccagctcgacaaaatgaatgactggatcagcatgtgcgatagcctgaaagctcttcatggcatcgtggctctcgtggatattacccattcattcaatcttcacaaggacacgctgaataaaaaatttgacatccaacccatctttcccaatcatatcaaggatcaacgggaactggatagcttggtgaacatcattgagaatcttccattctacgacggaacgctgttcaacaaaaagaaagacatctatggaatgatggtttccgtctcagctgatgtgatgaactctcctgcacgggtaggattagtaaaagatattttagagattaccgaacatttctcggaaaaacataacctccagatgcactattcgggacttccctacatccgggtggtcaacgcggaaaacatcaagggagagatgtacatgttcatcatcctgtcattattgatcacgacattcatcctctacctgtttttccgttccttccgcatcatcggtttttgtttgttgatcgtgctgatttgtgtcagttggacagtcggtgttatggccatgctaggcattaaaatcacgctactcaccgccatgctaccacccctgttgatcgtgatatgtattccgaacttggtattcatgatcaacaaatttcacgcggaatacgatcgtcacgggaataaaatcaaggccttgcaacgcatgattcaaaagatcggaaacgcctcattcctaagcaacttgaccacggctgccggttttgcaactttcatcgtgacctctagtcaaatcctcgtggaatttggaataaccgcttccatcggtatcacattcgtgtaccttgtgtgtttggtcatgattccttgcggattcagtttcatgccggagccggatagcaaacaaattaaacacttgcacaataaaacggtgaccggaacgctggagcgtgtcattcaacttatcttaaatcgtcggaatgtcgtgtacggagttgccatttccgtcgtcatccttggaattatcggacttaccctcatgaaatccacaggttacatggtagatgacttgaaagaaacagacccgattcgacaagacctgagtttctttgaagagaactttgatgggttaatgcccctagaggtaaccgttgacttcggaaaacccaagcaagtgctgaacttacccaacctccaaaaactggataaactttctgaagaattatcaaaagacgaagatatttccaaacctatttcccttatcgaagtcattaaatttgccaatcaggcgttctataacgggaaaccctcttattacaagctcccgacaaacatgacgaaaaatttcatcttgaaatatgcctcccaatccacgggagagattggcggacaagcaaactctttcgttgactccaccctccaacgggtgcgcctcagtttccgagtaaaagacatcgggaccaagaaaatgcaggaaaaggaagacaagttatacaatatcgttgaacaatactttccgaatgaccgctacacggtgaaagttaccggttcaagtattattttctttaaagggactcaatatcttgtatttaatctctttacctcactcgcattagctattgttctcatcgctttctttatggcttggatgttcaagagtaagcgtatggtactagttgccttaattcccaatatcataccacagatcatcacggctgccatcatgggatacttcggtatcccgatcaaagcatccacgattctggtattcagcatcgccttcggtatttccgttgatggaacgatccattatctcgctaaataccgtcaagagttacagggaacaaactggagcatacgatcttctgccgtactggccctacaagaaacaggacaaagtatgatctacaatgctatcatcctgttcttcggattcggtatctttgccctttccgatttcggtggtacggttgcattgggtattttggtctccatcacgttattggcagccatgctatctaacctaatacttctaccgtcattattactaacgctggacaaacacacgacaaacaagacattccagaatcccaaaatcctcagtgaagaagaaaataaaaaggactagaaaatatactgaaagagcggcagttttaaatcaactttcgctctttcaagtttaaataactattgatactattcaccgtcagagattccggcttggaaagaatcacccggatacccaattgacttaattcccgaaccatctgtcgtttctccgtggcaaatcccgccgcaatggtttcgaaatatgcatcctttagattgtgtacgggacgctccaaagccttgtttaattcggagttctcgaataaaatgaccaacacgagatgccgtgccgccaagcgctgtaatgcaggcaaatgacgtcgtaatccagatacagtatcaaaattggtaaacaaaatcagtaaactccgggtcgggatttgtcgattcaccgacacgtataatttctcgaaatcagtctcttgataatgtgtttccaaacgatacaaagcctcacttatccgatttaactggcccacccggttatcggccttcacgcaattccgagaattattcgagaacgtgatcaacccggcccgatccccttttttcaatataatattcgacaaagttaagaccgtatttatcgcatgatccagcatcgtcatattattaaaaggcgattgcatcgtgcgtcccttatccaccagacaataaatctgttgagaccgctcttctgtgtaggtattcaccatcaaatgattatatttcgccgtggccttccagtttacagtgcggggatcatcgcccgtcacgtaaggcttaatctgttcgaaggccatgtttcccccgagagcccgggtacggatgcctccattctccggatggtaattcccgtaagccatcaactcgtaacggtgcatcatcataaacgagggataaacagccacatcctgatccgcacgaaaagaataacgcctttcgaccaacccaaaacgcacggacacgaataccagaatcttcccgaaattataagaacctcgttttgtaggacgtaacgtgtaatggatctcccgctgttctccggcattcaccttcaaccggaacaagacattccggttctggaattccaccggaatctcgtcaatcacgcgaagacaagtactcaccggataacgatttcttagtactaggcaaaccggattttcttccccgttagacaatttatccgccaccacccgtaaggcatcaatcccatccactcgcttgtacaattcgaataactccacgaataacagcaacagtacagtcagcaaagtccccgcaacccagataaaaagtaacgggaaaacgtaagccatcacgaaagcgaatattcccaacatcaatatcaggaaaaaacggcgggataaatatgtatctttaagtattcgcactatcttggaacttctattttagacactatctgttgcactacctgatcaacagtcacgccttccaactccttctcggaagaaagctgcacccggtgtcgcaataccggatttaccaaatacaaaacatcgtccggaacgacaaaatcccgtccttgaatagccgcgaaagccttagccccgttcattaaagcgatcgacgcacggggagacgcacccaagtaaagccaaccgcttttacgagtagcatccacgatattcacgataaaagattttattttcgggtccacacgtacttgagcaacctgcgccctcaacttcttcaatgcctccacgctcaacacgggttccagttcctgccagtgggcgatagccccgtgatcatgcaactcaagcacctcgatctcttccgccacggaaggataagtcacgttaatcttaaataggaaacggtccagctgagcctcgggcaaacgataagtaccttcatgttctatcgggttctgcgtccccaccaccacgaaaggataatccatccggtattccaccccgtcattcgtgatttgcctttcctccatcacttcaaacaaagccgcctgtgtctttgccggagcccggttgatctcgtccaccaacacgatattcgagaaaataggtcctttccgatattcaaaacgtccagctgccggaagaaaaacagaggtccccaaaatatcgctcggcatcaagtccggcgtaaactgaatccggttaaaagtaacatccagcatccgggccataacctttgccatcaacgtcttggcaattcccggaacaccctcaatcaagatatgcccgtcagccagcatcgccgtcagcaacaaatcggccacttccctttgaccgataatcaccatacccatccgttcccgtatccgggtgatcttctcgtttaaatccgtgaagtctattctggactcaaaatttatctgatcttccataatctatttagcttttagttttaaacagttctatatatctcaccagctcacgtaactggtcttcatccacatgctcggtcttccgaatccggataattaaaaaaatcaagccttccacgctaccccgtgcaactcccgatcgttccgacaacaaatctataaaagaactatccagttcctccgtacgcaatttataattataacgtacctcttccagaaaactattgatccgtttattcgcgatagcaacatgatcccgctgcttgtagtacagagaactcacaaccgacacgaattccaatgtccggttttccaaaggacgaatttccggaatcggacgctgttcccgtttcgtccggaacaaaacgtatagtatcgcccccaatatcaacaaaatatacgcccacttcaatgcgggatacctgaatatcacccgaaaaagagtttgttgcccctctgccccggattttaggtattcatcccacaccacgttcgcatccgggggaagaaacgagagagccttctggtaataatccccattcaccgaatccaacaagaagaaattcgtgaatgccatcgggttcgaatgcagatagataaccccctccccgtaattcatccggataaaattgggattcttgatcgtgtcaacatatcctaaaacctccccgtcaaaagattcctttaattcaaaataacggtgagttgccctgaaaggataacctttatcttcaaagcctcgcaaataatccttcccgttctgaatccttttcattcctgaaacacccacgtaagaatacaatgtatcgggaataaattctgccgacacgaaaagcgcacctccgccttccacctcttccaacacggcctccagatctcccggaacaatcttaaaaaagggactcacgaaaaagtaggtcttcaagaaaggcgttctacccacacgcaattgttcccgtacagacatccgggcaaaagacacctccccttccggaaatagataaggcaaagcatctttaataatatacgtcccgtaaggactcttcttgctgatagaaaaattaggactccaatctatcggttgcggtttattggcctcataccccgtgtaaacagccataatggcgatcacgaaaagaacaatcaatacattttggcgccgtttcatccttccacctccttcctgaactccgtgaaatatcgtttgatattccgataagcggtttcatccacgggaaactcgccataacaaacacaatcaaatatacggcttatctcctcaaaatgacgactccacatttcattctttatctcgtaaatataatgctgattcgttttagaaacatcccaacgaatcacctcttttttatccaacatttgcaacaaggcagaataactcacccgtattgccagcacgtaatcattctcctgctccgctttcgccagtaaccgcacgaaagaatccgcttcctgttccccggtgtactccacggaatcctccgggaaaaaatcggtctcccgcctgcggaaaagaaatttatccctattcctcacgagcaggtaaacgatacccaaggcaaaaagacctaatacaatttttaaaataatatccatcgtctgcattgacccctccgaaaccttgatccgaaacaaacgctccagaatccaacgttttatccagtcccaaatactaggcgaatcttcaatattcgtcgtataatcaaaagccgcatctttcctgtatttctccaagaaatcagctttcggaccccgcaaaacataagaagaatccggaaagagcgaagactcccgctccccttcttccgcccatgtcacgttcccgacacaaacaaacacgaatagaataatatatttaattagcctcttcatccgcctttttctcgggttgaacccccaactggtcaatctggcttaataaagtcgtgtgttccatctcttccgaacgggaaaagaaaagcatcccgaccccgacaaacaaaaccgtgtataacgtgtattgtcccaagtaagagagtagcagcgagaaagtaatctcgtaaatattgggaatcgcccccgtgaaagccgacgacatcatcacgaacatataaggaataccaaacagataagctacaacacctaccaataggtacatcacgagaataaacccgaaagtcttccaccaatttcccttcaccatagccattgattccgagataatttttccgagtccgttatcccttaatatcagcaaatatgatccgaaagtaaacgaaattccgatatatattccgggaacaaacaagaacaagaaaccgataaaaacaaccaaaccacagaaaacagaccacacaagatacaccccgaatttcttcaacataactctaaaaacctcgataatcgtgatccgttcctcaatccccgcctgataatgatcccagtaaacccgcaaataagaaatagcaaacaactgcacccacagcatcatcagcaccccgaacagtgacgtgaacagggttcgtaacatcgtatctccaaaattattcacgtcataataagcctccgggtgtagagacatatcaaaaacccccatcaacagatccttcatgaaaaaaagcattagcaaaatcatgggaaacccgatcacggcaaaagcccggataaaaggaacaaactcctgtttcatgaaattaatcgtcacggtaatcaaatccgaaaaagaacgctgcacgctcaaattaatcttttccattagtctctgttttatgtaaataataaggataaacaacaaaatacccgataacgcctcccagcgaaaggatgattgccacggcccctaccaccgggtaagtatcggcataacgcgtgatgaaactttcaatccaccccgcgataataaaaaacggaatcagcccggtaacaatctttatgccccgcaaggccccattccgaaacgagtacgagcgcttgtacgtccccggaaacaagaaactatttcccatcaccagccccgctcccccagctataataatagacgttatctcgaaagtcccatgcgcccacacggacatcaccgaatgcaacaaaagcccgtgctggaaaaagaagtattggaaagcccccagcataaccccgttcgagaaaagaatccataacgttcccgcggaaaaaaagataccgaaaacaaacgccacgaaagccactttaatattgttcgcggtaatcataaaaaacatatccacctcgttcgaggacgaataaatccccataggtgtcccgttttcaatgttttccaaggtcttgtccacgtaagcatcccccagaatcaaacgtacgaaagtatcgtcttttgccgtggagaaaatcccaatcaatgccgcaaacagaagaaaaagaaaagcaaacaacaacgtccgcctctctcgatagagcaacagcggaaactcccgcacccaaaaggaaagaatcccctttttctccgatctctcctgcccgtaaatattgatctggtagacagaaatcaactgattcaaatacttcaccacatcactgcccgggtaaaacgttttggcataggagagatcatcggaaagaatcacgtaattagaggcaatagtatctgtatccaaatggcttacattttccatttttccccatttttccttgttctgacttacaaatctagcctctttcattctaaataccacacttttttcttgtgataaaaataatgcatttattcaaaaaaaatgtatgtttgtggaaatatttatacttatcatgaacatttctatcagtacagctcacaacgttgacattgattatattcccgcgggcgttctagaccgcatcttggcaaccttgattgatggcgcctttcagttcggactactcatgttgggtctcatgtttatcggccttttcagcatggtagcctccccgacttggtttttcgtcattcttgcggtgatcatcgcttcctatcatctattctgcgaggccgtctttaatggccgtagccttggcaaatacaccatgcgtatccaagtcgtgaaactaaacggcaaaaaactcaccttctgggattgtatgctccgctgggtcttccgtttgatagatatttccatctcaagcggtgccgtcgccgtcatctcgatcatcgcctccaaacgaatgcaaagactcggcgacatggcggcaggaaccacggtaataaaactcgaaaaagcagtcacgttaaaacaaatcagtgaattcgaggccccggaagaatatcaagtcgtctttcagcaagccgctcttttgtccgacaaagacatcaagatcatcaaggatgtgctacgggaagtacacaaaaacaacaattacgccctactggcccctctcacgaaaaagattaaagaagtaacaggaattgagacatccatgattccgttggaattcgtggaaaccatcttaaaagatcactcacacttggcaaataattagctgaaagctttcactttcagccattaatttttaccgttttcatctctttcagaacatcttccagtaattgggaagttcctattctgaaataagcaggcgtaagccattgctcgcctaaaatatgtttcacgattgtcaagtaacgaatcgcgttctgaatcttggtaataccaccggccaccttaatcccgaccatcttcccggtctgtgcatggaactgacgcaaggcctcacaaatcacgtaaaccgtctccggtgtagcatttaccggaaccttcccggtagatgtcttaataaaatcagctcccgcgtaagccccgatcaatgaagcattgaacacgctctcgatcgtcttcagctcgcccgtttccaagatcaccttcaaaataaccccggcacaagcctcacgaatagcaaccaactctttatacaccttctcgtaattacgctccaagacatcccccacggaaatcacgacgtccacctcatccgctcccgccgcgatagcagccttgcattcagccaacttcacgtccaaaaacgtctgtgcagccgggaaacaagctcccacgaccgtcgttttaatcggtgtcccaaccagattttccttcacgagagaagtaaaccggggaaacacacatactgatgccacatccggcaacgtgtttttcttcaatttcttcaataattcagaaacgaaagtcatgattgatttctccgtatccgtcactttcagcgaagtataatccatacatgaaacacacaattcaaaattctcattacaataagccggagcaatttccttctcgatcaccccatccagctcaaattcgatccgatcctctaaatttgaatacccgtaaattgccaatgcatccaatatattttccatatacactattttattaatcggctatccccctacccgtctccatattcaatacgaaaaaaatacacgacaggttattcttctacactcactaaatttcgtcattcccctttttagcctaggcaaaattacacaatgtttgcgaagttttaaagcaaatctcgatcaaaatatttacttttgggaggcgaaaacacgtaattaaaatttaataacagacaataaatacaacataatggcaacaaagtcagaagaacagacgccgcttatgcaacaatattattcggcaaaagctaaatatcccgatgcgattttattatataggatgggtgacttttacgaaaccttcggcgaagatgccatcttaacttccaagatattagggatcacgcttaccaaacgctcccacggctctcccggggacgtggaacttgccggcttcccccatcatgccatcgacacgtatctgcccaaactggtgcgagccggacaacgagttgccatctgtgaacaactggaagacccgaaaaagaccaagaaactggtaaaaagaggggttatcgaactcgtcacccccggtgtttcctataacgaaaacaccatcgacaacaaaaacaacgtctttctggctgccgtgtatttcacgaaaaccaaagccgggctatcccttttagacctttccacgggagaattcctaaccacagaaggaagtcccgccaccatggataaaatattaaatagttttcaacccaaagaagttctataccctaaaggctcggaagcccggtttaacgaactcttcgggacaaaatactacacttacccgattgaagaatggttctttgaaacagagtccgcggcagatcgcctcaaaaagcatttcgaagtatcgtcattaaaaggattcggaattgataaaatggactgcggcatttccgccgcgggagccgttttgtactacctcgacatgacaaaacacgagcttgtaggacacatcacctcgatctcccgtatcgacgaatcgacctgtgtcctactggatcgcttcacactacgtaaccttgaaatcttggatacccttcacgagggaggacgctccttggcagacatcatcgaccgcaccatcaccccgatgggcgcacgcgctttgcgtcgctggctgtgtatgcccttgaagaaaccggcagacataaatgaacgcttggacatcgtggaatgtttcgtgcatcacgaaacggaacgtttggaactggaacaaattctccgcaccattggagacctagaacgccttgcttccaagatcgccgtcggccgtatctctccgagagaaatggttcaactaaaaattgcgttacaagccatcaaaccgttgaaagaacaatgtttatctaccggtaacgaagttcttaccaaatggacgcaacaactggatgattgcgagacattaagccaaagaatagaccacgagatcagggaagatgccccctcgatgcttaacaaagggaatgtaatcgcccccggagttaacactgaactggatgaattacgggaaatctcctctcacgggaaagaacttctactaaagatgcaacaacgtgaaatagagaatacaggaattcctacattgaagatcagctttaacaatgttttcggctattacatcgaagtgaccaaaactcacgtgaacaaggttcccgacacatggattcgtaaacaaacccttgtcaacgcagaacgttacatcactcccgaactaaaagaatacgaggaaaagattctcggagccgaagaccggattcaagaattggaaagcgatatatacaataccttgctggcagctgcagcctcctatatcaaaccgatacagttggatgcccgcgtcatctcctatatcgacacgttaatctcgttcgccaacatagcgatcaccaatgattaccatcgaccggagatcaacgaatccttcgtgatcgacataaaagggggacgtcacccagtcattgaacgccaattacctccgggagaaaactatatcgacaatgatctctacctcgataatgataagcaacaaattatcattatcacaggacccaacatggcaggtaaatcagcacttttacgccaaaccgcactcatcgtgatcatggcacaggccggatgttttgttcccgccatatcggcaaagatcgggtatgtcgacaaggttttcacccgcgtcggggcatccgacaacatctctttgggggaatccaccttcatggtcgagatgaacgaggctgccaacattctgaacaacatctccgatcgcagccttgtactattcgacgaacttggacgaggtacctccacgtatgacggtatttccatcgcttgggccattgtcgagtttttacacgagaatccgaaaagcagggcaaagaccctttttgctacccactaccacgaactgaatgaaatggaacgctcttacacgaaaatcaagaacttcaacgtatcggtaaaagaagtcaacaacaaggtcgtattcctccggaaactggtaaaaggaggttccaaccactcgtttggtatacaggtcggtaaaatggcaggcttgccacaatccgtcatcaaacgttcgtccgagatactgaaacaactcgaaaacgaccgtaattcaagcggtgcgatacaaaagaacgtcgctaaaataggaaacgaaagagaaggcattcaactcagtttcttccaactggaagaccccgtgttattacagattcgagatgaaatagccggactggacatcaacagcctgaccccgcttgaagccttgaacaaactgaatgagataaaaaagataacgggaatttaatctataaaaaattccttttatttaactacctcccctaacccctccttacacaggaggggaaaccacttggtaatcaactggggttgtctcaaaagtcatttttcaaactccctccccccttcggggtactccctctataaacagagggagagctgaaatactccctttcttcgggaagagtcaccaactcctcctctgtttatagaggaggtggcacgaagtgacggaggagttttttgaggataaaatacctttatttatcttctaattttttcaatcacaacatctttcaccggcctatcgaaagaatttgttttaaccgcagcaatcttatccagcacgtccaacccttcaatcacctccccgaacaccgtgtactgcccgtccaaatggggcgtcccgccaaccgtggtataagcctgtttttgcgcctccgtcagcacgaactcttcattcacgaacaaactatcacactcccgggtcaatttctccgacaactcatccaaagcctccaaatcattcgcctcctgcaaacgagtgaattcatccttgtactgattcttcaatcgcccatataacgccatcttacgcctttcattgatactcttcacggtagcctctaactgttccggagaatacacctttccttgaacaatataaaactgcgccccgctagacttacgttccggattggtatcatccccttctcgcgcagccgcaagcactcctttcttgtggaaatactccggcacgaactccgcttcgatccggtaatccacgtctccctcacccaacatcacgtccggccccgcattcttcgacgtcgggtctccaccctgtatcataaaatgattaatcacccggtgaaacagcaaaccgtcataaaacttttcatccaccaacttcaaaaaattatcccgatgcttgggtgttttgtcatacaaacgaatctttatatccccgaactccgtggtaattttcacgatagattctgtttcattcttacacgaagcggcaagaaccaaaatcaacaataatccgataaatttattcataataactcttttactggttacaattcgacactttcaccacaaaaatagaagaaaatactttactaacaataaatttgtttgtatcttggcatgattaaccaaaacgttgtcaaacatgaaaacgattctactatttacacttgtcatcctagcggttgcaatctccggatgtcaggacaaaaagaaggtaagaaacacgaatacgcaaaaagaagcggttaaagtagagaccaaggctgttcttataaaagacaccatccaagtaacggaaacaaaaacggtaaccgagaccaccgtggtaaaagaagccccggaatatctccttgtcggcggttgtttccgcatcaaagacaatgccgaccgcatgtacgagaagttgcacaaagaaggctatgcaaacgccatgatcatgccttatagcagagatctttacctcgtggcttacgaagggtacaagaccgagaaagaggctatcgctgccgtgagaaaaattcacaaaatccccggtaaagaagagacttggatctatcaaataaaataaacacaagcaacatgaaactcgtattgttcctgtcattcgtcctgatgttgccgttcgctggctgtcaacgggataaaatgaattccaagaacctgaccactgtcaacgtgaaaagaagccttccggcctctctttcgggaaacaccgtctcccttgacaccatcaggcaaaacccctcgcgagataacaataacacaacgattgcatcaaacgtgaagatttccccatcccggcaggaaacaggaaagcaacaaggaacggaacaaaacatcaagaaaacaaatacaagaagttatcatatcatcgtggccagccatccccgggaaaatctagcagaaaaagacgtgacacaactaaaagccaaaggtttccaaaacgcacagatcattaccaaagaccagcgttatcgtgtcagtattgcgaattacacggataaacaggaagccacgaaacagagggatctactcgccacccaactgggacaaagcgatatatggatcatgctttattaatacatgatagccaccacggccgcggcgccataaatatacccgacatacacttgggcaggggtatgctgttttaaatacaagcgggcagaggccacaaggccagaaaccagaatcagcaaaggcaacaagttaatcacgtcacccaaatacttcattcccaaaataaaaacaaagccacacaaagccccaatagccgtcatatgcatactgattttccagcgaatcgtcacgatcataaagccggagagcatgattaccataatcaggtaaaactgtctcacgatatttgaataaggcaaattacgggaaaaataaaacacgataaaagcccccacgatcgtcaccagcaccgggaacacccgatcttgcttctgcaccagacgatacccctcaatcaaccccaaccacttcaacaacggcaagcaaagcaatggtattaacgtcacccctagcagggtcaacaaataagacatattctgcgtgtatgccggaatataagtaaaaacggttcccgtattaaatgtgataaacaacacgtacaaaggcaacaacaaaggatgaaacagcatggatactgcaaaagcaagtactttcatattttaaaattatggcttttaaacttccctacgaagtcgggccaccggaatatccagcaactgacgatactttgcaatcgtccggcgggcaatctggtaaccttttttattcattaattccaccaactcatcatccgtgtaaggtttgcgtttatcctcgccgtccacgatctccttcaacacattcttcaactcacccgtgctaacttcctctccactacttgtcggcatacttcccgaaaagaattgttttaaagagtaaataccgaaccaagtctgtatatacttagaattagaaaccctcgaaatagtagaaacatccaatcccgtaatatcagcaatatcccggagaatcatcggtttcaacttgctctcgtcccccgtctggaaaaatggtttctggaactgcacgatagctgtcatcgtcagcatcagcgtgttattccgctgttgcacggcatcaataaacgaacgggcagaactcaacttatattttacgaaagacaccacatccttcttctcacgggaattcgaattcttctggtaatcctccaacatattgacgtacgatttgttcaacctcaactcgggaatatcccccgtgttcaagctcaactgcaactccccgtcaacaatatccaagttaaagtcaggaataatcttctcggctcccggaactgaagaatcggaaatttgtccgcccggcttgggattcaatttcagaatttcgtccaccgcctctttcaactcctcctctgaaatcctcatccgcttggaaatcttctcgtaatgtttcttcgagaactcctcgaaataacactccaatatgatccgggcatttatcaaagccggcgtggaagtctccgccaagcgtcgtttcacctgcagcaacaggcattccctcaaatctctcgctcccactcctgccggatcgaaacgctgcacgacacgcaacaaggattcaatcttctcatcgtccacctcgatccccgccccaaaagcgagatcatccacgatattctccacgtcccgacgcagataaccatcatcatctatattaccaatgatatactcgcagatcttacgatccatctctcc

SEQ ID NO: 12 - DNA, 26096 bp, Butyricimonas faecihominis
gtataaaacgttatagaaaggagaaaggattagaatttataaaaatttagcacttgtttatttgtaaaaaagtgcgtaatattgtgaatggcgtttttagggtctgaaatattcatatcaattaacaagtgaattttatgacagaagagtttttgcagtatgtatgggcgaattcgcttttcacgagtacggtgtgtgtgtcaaccaaggggaaaagagtagagattttgaatgtcggttttcagaatcgggatgccggaccggatttctttaatgctaaggtgcgtatcaataatgtcgtgcaagtgggaaacgtggagattcatcagaaaggaagtgattggttccgtcatgctcacgaaaaggattcggcctataataatgttattctctccgtggtgggtgaggcagacatggaagtatacgattctcgtggccgagaaattgatgcgatcaccctagtctatgataatcggctatgggatgagtatgttttcatgcagggagtacctgttgaaccccgttgtcatcgacacttgaaaaagattgattcgacccgcttggaaatgttgttcacggggtatgcgatcgagcggttggaacgtaaatgtaaagatattcaggtgatgttgcgggaaactaaaaatgattgggaggaatgtttctaccggatgttggtacggtattggtctgggaacgtgaacgctgatgttttcgcccagttggctcaaaacttatcttacaaaaaagtggttcgtagtagcgaatctcttttccgggtggaggcgttgcttttaggatatgccggtttgttggttgacgtgccggaaacagacgagtatgcctttggtttgcgggaggagtacgagtatcaagcagccaaattccaactggaagccatgaatgtttctcaatggaaatttatgcggattcgtccgctagcttttcccacggttcgtctggccttgctggcctctttgatgatgcgtttcaatttcttgctttccagcgtgctggatgcctcggacgtgtcggaaatttatggtttactggacgtaaccgcctcttcttattgggatactcactataaattaggagtggtttccgtgaaacgggtgaagaaattggggaatagcatgaagaacgtaattattatcaatgcattgattccgttcctgttcatttacgggaaagaacggggggaagaacgatattgtgataaggcgttacgatggctggaagagttgagggcggaacgtaatcatgtttcggaggcgtggacccgttacggggtacaggtgaattccgctttgcagtcccaagctttgttacaggtaaaacgggaatattgtgatgcacatcgttgtctccattgtaaaataggagcggaagtcttccgtcgggtaggaagaggttgattcgacactaattgagttcctgtttcagaacatctggtagttcgattcctcgcttttccaagctgataaaccaatcggataactcttcaggacggatcgagtagaggatttcccggaattggtcgatttgttggtcattgaaactgtcggagggaatacccctgtattgatcgagttcttcatcatcgaaatattcgatcttttcatctatttttttcagccctttttcacagatggcatgagtcccacaacaatcagcagggggaactacgacgggaggctcttctgttttcgtttttgattttgaagagtatgtaaaaagggcaactattactagtagccctattatgctgataatgatataaatcatttttaattacctactaagttcttttttcagaagatttacttggtttgtcagtttttcaacctcttgggttttcttggttaactggctcttggcgtttgctagctgtttttttaccccggcaatttctttttccaaacgggcaatctcgctgtctttgaatttgaggctcgatttgatgtgttccacctcgttgctcaatttgcggttgtcccagtcagcgttggttttatagtcagtcaactgtttccggatttggtcccgttcctcggttgtcctttttagttgaagttgtagttctgccaattgcccttcgctgctttgtactttggatttcacctgttctgacacgtcctttaactctgattttaaggccgattccttgctttgtaaagcacgtaattgggtgttcaggtcatcaatctgtttgtccttggcggcattgttagccgtcaactgatagcgaacggcattgaagtcatctttgagtttctgcatctcggattccaatgattttttgtcattctccaaagttgccacttctcgatcaatgctccttttcgctctggctaactcctcgtatttctttttagaaacacaggaggaaagaagtaatgtaaatattaagatgcctgatatataaaataatccttttctcatatttgaaatgttttaattgaacttttctgttgtcgtgtgacaaaagtagtaaataatttgtgtataacaaagaatgtaggggatgccagaatcttaatttattgttaatgaaaggcgatctggtgtatttttgagtgtgatgtgcgataaacatggtctgtttttttgccggtaacggcaaaaacaactacctttgtttgaaatctgaatgtaaaacttgccgataattttaatatggaatatatttcagtgaatgaatttgctaggaaatacggtatttcggagcgtactgcacgtaactattgcgcgaccgggaagatcgagggggtgtttttaacgggtaaaacttggaatattccaaaagctgcaggattgcccatgcgtaagtcttccccaatggaggttatgccattacttgctatattgcgagaacagaagaaaatgaagttgaaggggggcatttatcatcgtacacaaatagacctcacgtataattccaattacatcgagggaagtcgcttaactcacgaccaaacgcgttacatttttgaaaccaacacgatcgggataacagatgaaagtgtgaacgtggatgatattatcgagacgaccaaccactttcgttgtattgatctgattattgaccgggcagaagagcgactttcagaaaaatatatcaaagaattgcattatattttgaaatccggaacgtctgaccaccgtaaagattggtttgctgttggtgattacaagcgtttaccgaacgaggtgggcggaatcttgacaacaccaccggaattggtacactatgaagttaaaactttgttattagaatataatgcgaagaagtctaagactttcgaggatattattgacttgcatcaaagattcgagtccattcatccgtttcaggatggtaatggacgtgttggtcggttaatcatgttcaaagagtgtctggcgaatggttttgtcccgtttatcatcacggaagagttgaagatgttctattatcgtggattgcaggaatggagtcatgtcagaaactatttgcttgatacgtgccttactgcacaagataattacaaagaaattttaactggatttagaatcaagtattcaaagtaatcagcgctgcttagaactttgaagttacaggttgaatcatttaattgaaaggagcattgtttttaataactgcgactggtgaacttgtaacctgcaacttttttatatctttgcaggggaaaattaattttgaataatagaaatgttatgaataaaaaaatactatcattaattattttgtttttaggagtgttctcggtcatgcaagctcagaatgacgggaagattcgggtgaaaggtgttgtactggatgagacaacacgacagcctattgcttttgcgaatatcgggattatcggtactgcagcgggagcagcctcggatatggatggtttgtttgagttgatcgtgtcggaaaaattggcaacttacatgatgagagtgtctgcggtgggatatgcatctgcagagatgaaggtgtatgaggcaagagataaaggggaggtgcaaatttttctaaaaccggttacttacgggattggggaggttgacgtgacggccgagtctctggtattgaagaaattactggagaatgtggtgaagaatatcgggaggaactatattccacgtccctataattacgagggatatttcgagtatggtgtagaggtaaacgacggggagaagaaatttaaggaagcgatcgtggatatttatgatagtgaagggtataagcgttcaaacgtggagcaaacgtttaaagcgttgaattataatttctcgcaggttcgccggagcggggaaagcggttctgctgttgacggtttgatctatttcgatgatataattacggcagatattgttcgtaatactcgtaatatactggacttacaaaatttccgagacttcaaactgagaagtaaaggaaaattcatgtatgaaggggattccgtgcagattgttacttatgaatgtctgaaaccttccttgtcaaattccggtacggcaaacgtaacgaaattcagtggggaattgtacgtggaattaaagagtttcgcgattatcaagaacgtgatgcacgtaacttcttctgcgtttaacttgttgggacgtaatttgctgcttgccggagatagtccccgtcacgaggtgatggccacaatcacgacgaactataaacgtgttagttcatattatttccttagtggcgtaagtatcgtctacacttacaaggatggtggcgaccggattaagggagagatgcagtaccaaactactaaagtcagcgtgaacaagaccaccccgattgccggaagagtctattacgaggaagtacccaccgatcacaatttctgggatcggtacacgatttacttggaggaagaagaatagattaattttagatttaatgattttagatcccactgatttcttgatttatgatttaagattaagtgatttttacctatcaactaacgcttttcttaatcgtaaatcgcaattcataaattataaattaattgattctttcattttcaattttcaactttcaattttcaattatcatgttggatcaaatttgggaaaatatccagcgggtgaaggaagaatccccgctggtgcataatataacgaatgccgtggtgatgaataacacggcaaatgcgttgcttgccgctggtgcatcaccgattatggcacacgccttggaagagattgacgagatggtggctttatgtcgtgccacagtaattaatattggtacactggatcgttttaccgtggaatccatgaaagcggccatccggcgggcaaacgaagtggggcatcccgtggtacttgatcccgtgggagccggggccacgagctttcgtaatcaaacgttgcgggatatactggcagccggaactccgacttttatacggggcaatgcatctgagatcatgactatggcaggattatcaacacaatccaagggagtggatagttccgaatcttctttaaatagccttgatgcagccaaagcgttaagccagcgagtcggatgtatcgtttgcgttagcggggagacggatctagtagtagaaggcgatcgggtagtatacctgcataacggttcgccgatgatggagaaagtgactgggttggggtgtacggcctcggctattttgggggcgtttgctgcggttgtaaagaatccgtttatggcggccgttagtgctacttctttcatgggggtatgtggcgagattgccgtggggatgtctcaaggccctggaacattgcaacttcatctatatgatgtaatgtataacttgagtcgggaacaattcatgcagattgtacgagtttcagaataagaggaatatgcgaatttatttggttacggatgaagggttgttattagggaaggacttgtaccgtacggtcgaggccgccgtaaaaggcggggtgagcatggtacagttacgggaaaaagagtcgtcaacccgagaatttattgaacgggcaattcggttgaaagaagtgttgactccttacggggtccctctgattattaatgaccgtgtggatgttgcgttggcggctgatgctgatggggtacacgtgggacaaagcgatatgccctacgagatggttaagcggttactgccggaagggaaaattatcggcttatccgtggaatcaccggaacaggtgctggaggccaatgactatgatttggattacgtggcagcaagtcccgtgttttcaaccacgacgaaaacaaatactatcgtggaatggggattggacggcttgcgctggatcaggtccgtttcccgccatccgttagttgccatcgggggaattcatcccgataacgtggcgtcaatatttcaggccggggcggatagcgtggcggtaatctcggcgattgtctctgccgacgatccggaacgagctgcacgggaattattggaaaaaagcggtgaacttcactaattaattttactatactaacccctgcctgatggttaggctatccttgccttacctttaaaatataatctaaacataccatgaacacatcatcaacactgaccattgttgatgatgtgttcatggtatgttgttggtatgtacttgaggtagcgaatccatagtgtattgtccttgtattgtcctgaaaaagtttactgtaaacttagtaaaccaattttaggaaactacattgttgagagaataatcagaatagtcccagcgagtgtaatagaatcacgaggataaacaggggtgctacatatttcaggacgaatatcaacggtttcagtaaccatagtttcaattctccattattggttaattccgcttccagtaaacggcgatcgaatctccatcccacgtaaatggagatcaagattccacccacgggcagcagtatgttggaactgacgtaatcaaatatcccgaagaccgacaagttgccgatatggacttcttttaacggtccaaaagaaagggtgcataaaattccgaagatcgtgacgattaccgtggatatgacggtcgctttgcggcggctgatgtgcttttcttccacgaaaaaggcaacgattacttccagaagggaaatagaggacgtgagagcggccatggttagcaggagaaagaaaagaatcgcccatagttgcccgaaagccatgctttggaacacttgtggcaacgtgaggaatacaaggcccggcccggaatccggtgcaatgttgaaagcgaacacggcgggaaatatggcaattcctgccaacacggcgatcaacgtgtccgcgcaaatcacttgcaaggatatagaagtcaggttttcatcttttttgatgtaagaggcgtaagtcaagaggacacccataccgattgataaggagaaaaaggcctgtcccagagcagaaagtactccctgtgaagtaagttccgagaacttgggtaagaaaaaaaattttatcccttccatggccccatccagcgtgcatgcccggattccgagtatcaagataagcacgaaaaggaggggcatcatgagtttggtgtatcgttcgatacctttttttactcctgccagcacgataaaaccggtgagagccatgaacacgatttgccagaacacgggtttatagggattcgtgataaagtccgaaaacatagtgttcaagtcaacatcggtgccgacatgaaaagagaaggtgaaagatttaaagacatattccaacgtccagccggcaaccgtcccgtaaaaggagagaatcatcgtggcggcaagaagaaccagtaccccgaaataacgccagactgttttgggctccagtcggtcgaaggtcccgaaagcgtttcttccggaatagcgtcctagagcaaattccgaaagcattaccggtaatcctatggctaccgtgaaaaatatgtataccagaagaaaggcacccccgccattattccctgcctcgtagggaaatttccagatatttcccaagccgaccgcggaaccagctagggcagctattgccccgaatttagagccaaaactatctctcgtgttgtgcataagaagaaaaagttacaagttaacaggttaaaattgtaaagtgcaagtgaattacggtttacagggattttaggttacgaaataacgtcattttttaacactgcatatcaagaagttataagtatatcaatagcctgtaacctgttaacttgtaacctgtaactttttcgtcaggacttttttaaagttccggcgaaaaaaacgtatctttgcccgaaaataaataagcgattcacatgcaagagaaaattctaatactggatttcggttcacagtacacgcagttgatagcgagacgcgtgcgggaactgaatgtctattgcgagatttaccctttcaatcactaccctgcacttgatgcgtccgtgaaaggcgtgatcctttcgggaagtcctttttccgtgcgtgacgagaaggccccgcaaccggatttgtcttctataaaaggaaaattaccgttgctgggagtatgttacggggctcagtatctggcccattatttcgggggtgaagtcaaagcctcgaacaagagagagtacggtcgggcgaatttatcatttgttgataattcctgcccgttgttcaaaaatatcagccaacattcacaggtgtggatgtctcacggtgacacgatagaggtgttaccctcgcattacacggtggttgccagcacgtctgacgtggagaatgccgcttaccgcatcgagggagaagaaactttcggtattcaattccacccggaggtgtaccacagcacggaaggaaccgctttgttgaagaatttcgtggtggacatctgtggttgtaaacaagactggacaccggattcttttatcgagactacagttgccgaattgaaggaaaagatcggcgaagaccgtgtgattcttggtttatcggggggagtagactccacggttgctgccatgttattacaccgggctatcggtaagaatttgacttgtattttcgtggacaatggtttgttgcggaaaaacgagttctctgatgtgcttgaaaattacaaggaactcggcttgaacgtgatcggcgtggatgcgggagatcttttcctttcccgtttggcaggtatcgaagatcccgagaaaaaacgtaagattatcggagcaacattcgtggacgtgttcgacgaagagtcgcataaagtaaaagatgcaaaatggttggggcaaggtacgatttacccggatgtgattgaatcatcatcggtaaacggaccgtcacagaccatcaagtcacatcataacgtgggcggtttacccgattatatgaaactaaaggtcgtggagcctttacgtctgttattcaaggatgaagttcgccgggtaggtaagagtcttggattggcagataagtttttgaagcgtcatcctttccccggaccgggtttagctattcgtatcttaggggagatcacgaaagagaaagtgagattattgcaggaggccgactacatttatatttccatgcttcaagaagaaggtctgtacgataaagtatggcaagccggaaccatcttactcccgatcaagagtgtcggggtgatgggagacgagcgtacttacgaaagtgtggtagccctgcgtgccgtggaatcaacggacgggatgacagccgattggtgtcacctgccatacgaatttttggcaaaagtgtctaacaggattatcaataatgtccgggggattaaccgcgttgtttatgacatcagctcaaagccaccagccacgattgagtgggaatagtggtggaatttaaaataaaggagagcgttcgacaggtttagagttggacgctctttttcgtaagatactttgaaatgaatttagattctattctgtttttattaaatcagtaatagcatcgatgaaaattttagcttgcggaaataattcatttactaaatcttcatcgcaataagcaaaatcatcatagtccccactatgccttttttcaaataaagtactgaatgttttaccaatttttaatggtaatttgccagttgcgacaaaatgtaatccgagcatcgttttaaccccattgtgagtttgtgtttgaatatcatactttaataggagagccacggttgcataataacatgcgtaatacaaacgattgatggctgcattatagaaattttcacgtttcataacctcagcctctttcaatgtttcataagctcgttgtattctgtatgcaatcaatgcattcttgctattttcatccattttttctttcataacacgatcccttcatttacaatgttgatataaaatggtgttttaaatggacgattttcccaaagcttttttaacattatgatagggctgatcgtgacacctgtctttaattccagttcataaagaggtagagtaatagattcttcctgttctagagacattttttctccgtcgactaaaatcaacaagtcaatgtcactatcagaacgagcttctccacgagcctcagaaccaaacaggatagctttagctgttggggcaatttcatgtattatctttctaatttgttctactacgtcagctcgtttcatgggtaatgaattacttcgttcttacaaagataagaatttatcttttatcttcaatgccattttttaaagaacaccttttttgaacccacctcttttcgtcacgaatttctcgaaaaagtcgtcccggtaactattgccaatggcgatttcgtgcgagcggatggtgacgtcgttgttatcgaaggaggtgatgtgtcgggtgttgatgatataggatttgttaatgcggaaaaacaggctggcgggaagttgttcttgcatggccttgagagtcattttggtaatgatccgttgatctttcagttggagaatcacgtaatctttcagtccctcgataaaaagaatatcctcgaaatttaccttgaaataacggcgttcggatttcacgaacagataatcattctccacttcctcgatgttttctttttctcccgtgacgagtaaagcgtgatagtttatcgctttattgaccgctttttggaaacgttcaaattcaatgggttttaccagataatccacggcatccacctcgtaactgtccaatgcgtattccgtgtatgcagttgtaaagatgatcaatgtatttttcgggatattccgggcgaactcgattcccgtgataccgggcatttgcacgtcgagaaagacaaggtctaccgggtgggaggtcaagtaaatggctgcggaggaggcattattgaacatctccatcagttctagttctggtatccgggctacaagtgaccggatgcccttacgtgcgatcggctcgtcgtcaacaataatacatttcataatttcaattgtaaatggactttatattgcgtttctgtctcttctatccggagcgagtaatctttcccgtacaataactccaagcgtcgttgcacgtttaataatcccagaccaccagtttctttctttaccggaacgagaggcttggaattttcgcaagtaaaggtcagctcgtcatgctctacgcgaaaataaaggtaaatgtacgataaattctcgctatcggggttatgttttatagcattctcgacaaaagggatgaaaagtagcgggggaatcttcacgttattcacgtcaccttctttcgagatcaagtacttgaaatgatcccggcgtatcttttccagttcgaggaaccccgttaggaaatgaatgtccgcgcttaaaaagacttcttgccgggcgctgtcgtttagttgataacgcagcatatcgtcaagtttggtcagaaggcgggaggcctcgtccggatcttctttcacgagaatattggcattgttgagcatgttgaacaggaaatggggattgatttggttcttcaattgctgcaattccgactgcatggaggtcttttccaattccgtgatctgtcggtcgtagatcatccagcggcggaacaattcgatactggtggtccccatggtaatcatcccgataatcacgatcgcgtagagaacattgggaaacgagtaggcgttctcgttcacgaatatctccgtgaccacgccatatttttgataaagatactgaacagcaggggcgtacatcaatagtccgataataatgactagaaataaggctacgatataaaatgatagtttatttttcacgagcaagcgtgggatcaggataaactggttgatataggtcggtagcatgaacatggacaagctcgtgaggtaggcatagaaccaaccaatcccggtgaagtattcatacacgttctgaaaggcgaagaaggcgatgaccagaaaggtcgtgatgtttctgatctggttgaaattcgggttcaactggatatgcgggttcaagtggttctttatagacatatttgtaaactggtgatgttatttttgtctccctgttttgtttcaagtagaaaattttccccgtacaacaattggagtcgtcgatgcaggttatacaatccgttggtcggttgtttcgatagaccgggtggatagatacaggcaaaatacaggttgtcgttcttcattttaaacaggatgtatatatcagaagtcttaccagcatcaagggatgggaggtgaccgagagcgtgttcaataatgggaatgaaaagcaagggaggaactaggatatgctcgatgtccttatccgtggagaggttgaaattgaaacggttgttatgcatcttttccaagttcatgtaatccttgataaacgtaatatccgcacttaacaacacctttgcccgggtactgtcatagagttgatagcggagcaggtgacttaagcggagtaacagggacgaagctttctccgcgtccttttttgccagcacgttggccgtgtttaacatgcgggacaggaagtccggttgaacctgatctttcaagcggtcgagttcattctgaaccttgcttttttccaactcctgcaattgtcggctgtgcatgatccagcgttgcaggaatatggtcatggagaatgccgagatataaaaaaagatgcctaggaagtttatgaaaaagaacaggaaaagattacaattcggtctaatcgcctcgtgaagtgtcgggaggtacaatttcgagatgaaaatgattaaaaacatcatgaataggaggagcagggtacatgcaaacagacagagtgcgtagatccagtatttatctttaaagagaagacggggtatcattatataggtgttcaggcatattatcccccaaaacaggaagataagagcaatgtttatcaacgtgatggcattccatcccggggataattcggaattttcgaagaggcctttcatgacgataatcccaagtaacaggagaatcaacaggtgcctgagaacccggaatttcgggtgcatcaagagattttcccagtactggttcccgtttttgtatgtgatcgaattggacataggtatatgaaactagggataaaagtaatgatttctttttagaatttccatgctataccgagagagcaatagaatcccaatctgaaatgcggatcgctctcgtcgtcatcggagaagtattcctttaaacttcttttcgagtaaaaagcacttcgagccggggtaatgcccaaggtgagcgggatggataacgatttaccgagcgtgaattccggacgtaacccgacaaccacgtattgctgggtgaaatacatctttttcccgtttctctcggaaagagccatcatcccgtccatttcggcaacaagacttaatttcaggtggttgttaaatttcatgcccacggaaacccgcacggcatcaattaaggcaacatttacctcgtaacgtccttctaatcgccagttgaaatagaatgcggggaagagcatgggataaccaaacgtgttatttagggcggctcccacaccaaggtctaggttcgggcgtaaatggcggatgaacacgatggcaccttgtcccagtatattatcccatcttgccttggatagattatcgctatctatgtaaagtccggccccaacggttgccagcatggaccatttagcatttagtggtctcgtgtgtgttaacccgatttgcaggtttaacatatccgagggacatagggtttcgggaagtttcttgttattcatgcttgcgtgtgatgcaccacatccgatcgcccaagccgtggggcggttattctcgttcattttaactgaaagtggaatccggaatccaccttgtattacttttaaatctcccttggctcccgaaagtttgttctcttcatctttgtatgaggtagaactgatgtactccgttttaaagtaaacctgagcgtgtgtttgctgataggcgagcgggataaaaaagaatagatagcatagaatagatttcatattgtattgattttttattcacggataaaaatagaagatgtttggaaatgaggatgaaataatagacgaagtctgggaataagtcgaccaacctcatgtttttgttcgtccttgcagcatatcttcttttatatctgtcccttcatcccgtcgatataccttcgttaagtctccgtttctatgaaacacgtgtttaacgataatataacgaatacataacgaactgatgtaagagaatgcattgattaatagaagattaatatattgtgtgaattttttttgaaaaaagtggcattttcttattacaccaaagggggtggttcccgttttggtattaaaagcacaaaaatgacattgaaaacaagagaatatatcgtacagttaattgtccgccacgtgcaagggacgttggatgataccgggaaaaaggagttgcttgaatggcgggaaagtttccccgagaacgaggctctttttcaaagaatgacttcccgtgttcatttcgaggaaagtttaaaggcttgcgagatgacgagtaaggagatggaatcagaatggaaactgatctatgggaaaacgattggacgtcggcgcttgggtatgagacggatgtttcagtacgcagcgatattgattgcagttgtgttgatcggtggagtctggatgttgggagaccgggatgtcgagttacctagtgtttccttgatggctaaggctcatctgataaagagaataaaacctcaggcaattttggttatgggggacgggacgaccgtgaatttaaaagacacaagctctctggcatcattggtttccacgaaagtggcactttccgcgaacaaggaaattttgacctacacggaaggaagtgttgacacggtgatggagttccacacgatgagaataccccgaggtggggagtacgtgctggtattgtccgacgggacgacagtttatctgaatgccgaatcagaattaacatatccggttaaattcagtggtaaagacaggcgggtttatttgaaaggagaagcgtattttgaggtggaaagagatacgtgtaaaccttttatcgtggaggcaaattctttggagatacaggtcctcggaacggaattcggggttcgggcttatggcgatgaagaatgtgtccgtacaacacttaaaaagggaaaagtgagcgtggaaagtgaggggtgcggggtgatcctgaccccgaatatgcaggcctcttttgacaagaaaacgttacaaatggatgtacgggaggtgaatgtggatttgttcctaggttggaaagacgggcggttgatatttgataattgttctttggaagatattttaaaggatctgggtaaatggtatgattttgatacccgttatgcccgggaagatgcccggttaataccattctctctgaatataaaaaaacatgatgcttttgcggaggtccttcaattacttgaagacacggggtgtgtgaaatttgatataagagataacgtcgttgttgtaaaataaaaagtagcgcgggaacgctacttcaaccatcccccgctaagaacaggggacgaatagttataaatttgaggcacaaagttatgaagaaaaattgtaatcttgtaaggaagaggtggcttttattatcccttttccttgtttttactacatcgtttagtcagcgagcttactcgcaagaaatgaagttatctttcagcttgaagaatgcaactttgaaggatgtaatcagcgagatcaaacgtatttcagcttatgatttcgtgtatagcgatcctcaactgacctcctttaaacaacgagacgtgtcgttcaaggatgcgactattcaacaggtaatggatgagtgtttgaaagacacgaaactcacgtacgcaattaatggaaacacgattgtacttaaattgaaagactctaaagtggacgaacaaaatctgaagtacgtatcgggtgtggtcacggatttggccggaaatccacttccgggtgcgacgctgttgatcaagggaacaacaacaggtatggccacgaatgccaatggtgagtataagattggagttcctaaagacggggaatgtacgttgattttttcatttatggggatgaaaactcaatatatgaaagtgggtaatagaacgaccatcaacgtgaagatggaagaggatttggcagaggtggaagaggttgttgtgaccggttatcaaaatatagataaaagacatttaactagcgctgtaagttcagttaaggcatcggatgtgctgactcccggtatgacaagtatcgatcaagcgttggaaggacggattccggaacttttgttaatgagtaattctggtgaggtcggggcgactccgagaatccgtgtgagaggtacatccactttactagggaatcgggagcctttatgggtattggatggtttcatcatgcacgacccggtggatgtgagtaatgacgacttaaataatccggattatatcaatattattggtaatgctattgccgggatcaacccgcaggatatcgaacgtattgatgtattgaaggatgcttcagccacggcactctacgggacgagagcggccaatggtgtaatcgtgatcacgacaaaaaaaggagctgtcggtccggcacgtttttcgtataatcactcgtcgaaatatactcgtcgtcctcgctatacggaccggaatataaacttgatgaattctcagcaacgtgtacagttcgggaaagaactgagcgacttgcattatcaatttccgtcagatatgacgatggtcggatacgagggtgcgttgaatagttattacaaaggattatccacgtatgacgagtttgttaatagcgtgaagtggtacgaaacggtaaatacggactggttcgatattttaacacaggacacttattctcatgatcacacgttcggggtatcaggaggaaacgatgacattcgttattacgtgtctgccggttataacaaagaggatggtgtttctaaaacgacatacacggagcgttacacggccctcgtaaatctggatatgactttttcaaagatagtcaaggcacatttttccatgaacgggaatgtccagaaaaaaaatcacttgatgagtgagattgatgccatggattatgcctataacacaactcgtgcgttaccttgtttcaatcctgatggaacactttattactatgacaagagtgcttacggcagaactaacaaaccttacaacaagtttaggtatagtattttgaacgagatagaaaacagttccaacgaatatgacgggagtacgatcggggctatgctcgaagtgaaagtaacccccatcacgggattggatatttcggtatccggaaattataatagaagtaacacgttacaggaacaatggtggggtgaaaagacgcattacgtggctcgttggaagaatggcgagtacgaggaagtacctatgccgggagaggcaggatcatgttatctgccgtatggagggatattgaaaacgacaaactctataactgaaagctatacttttcggactcaagtggactatcgtttgttattcggagaaaatcagcagcacatgtttatgttgatggggggattcgaattaaatggaaacacaagccggggtatcagcgatgagaatcggggattcgtgaaagaccgaggactacaatttattgataatttacaaaatttagatgattatcctgagtataaaaaatggttgaataagaatcatcgttccttgagtcatggtatttcccatcagatttccgggtatttcgtgttaagttatagttatcggaatcatttcacgttgaatctgaatggtcgtttcgatgcatctaacaagtttggtagtcgtagtaatgaacgatttttaccggtatggtctgtttccgggagctggaatttgcaggaaaatatactgaaaaatgttgagtttatcagtgaacttcgcttaaggggatcattcggaatacaaggaaatatgctggaagatcaaagtccgaatttaatcatcaagcaaggggccttggacccgatatataatgaaaacgtgtcttcgatagctcgttatccgaatcctaatttacgttgggaagagacgcaacaactggatggaggacttgaaatagggttcttcagatcccggttgagtatggagttttccgtttactccaaaaaaacatctaattgttttaccaacgtgcaggtgtcttccgtgaacggggtggcagggcatacgtacgtgatgaatggtggggacctgaataataacggatattcaatttccttgtcagcaactcccgtgaaaacaaaggattttcaatggaaattctccacgtattattcaggaaattttaataaagtacaaacgaaatcggtagaaaattatacgttgaatgattatttgaatggaacggcattgattgatggagtcgcaatcggtagtttttattcttataagtatttaggattaaatccttcaaatggaacaccattgtttgatgattacaatgaccggaaacatctgttggaatacaaaacgttggaagaaaccgttttaatgacgatggaaaagagcgggcaaagggaaccgatttttagcggtaatttctcgaataatttcacgtataagaatttttctctttctatgaacatggcttacagcataggatcaaaggtgagattatttccgttgtattctcctgtagtttctggaattagttcggaaacgaatgttagaaaagaatttttaagtcgttggatggctccgggggacgaaaagtatacggatattccggttatcatgagtccatcagatcctgaatacatgaaatatatttctcatttctctaatggaccaacttctgcaacacatatacaagggtttgctagtagtatatggaatatgtacgataactccaaccttcgggtggtaagtggaagctatttgaagtgttcttccatgtccctacgttacaatgttgatccggaatggttgaaaaaaacacctttttctaatatttcacttagcttgaatgctttgaatctattcaccatatcagctaaaaagttaaaagggcaggatccttcacaagcgggatttgcgaaaccgaatttatccgtacgtccttcctatacgtttcagtttaatgtatcattctaatgcacatgaagatgaaaaatattatttatatcatcgctttaatcctgttttccggttgtgggaattttcttgatgagtattcgcaggatttagttgttcctaaaacagtatcggatttgaatgaggttttgttaggtaatggatatctaccttcggcagaagtcgagtatttaagaagtggctctatcgggtggcaacttcatctattggatgatgatattaataccgtgatagcttataatgcgacgaaaggacgaacagaaatgaaccaaatttattatggttacacgacttggcagctagaagttggaagaaattacgagggtactggcttatccggagacaatggaaattgggatgcgttgtatcaacggattaattccatgaatattattttacacgaacttggtaacgtgagtcaaagcacggaacaggagaaagcggatgccattcgggtacagggagagtgctattttttgcgggcgcaattctacctgatgctggtgaatctttatgcaaaaccttatgccacagataataccacggaattaggggttcccttgaaattaacttattatgtggaacacgataaagataaggaaacgcaatttgataggactccggttgccgaggtgtatgctcagatcgtgaaggatttgaatgaatcagtaaaatgtttcacggtaagtccccaaacgaaaagcttttaccgggcttcaaaggatgcagcattactgttattgagccgagtttacctgtatatgcaggattggaaaaatgcagagaatacggcaaaagagttattggccggaaataagacattgttggattatggtaatatttggggaaatacagagagttatgccatatctgagagcagtccggaattgttgttctctcaagggcctctaaatttgcaatgcgattttaatggatctggtggagacttctgtatatcaaatgacttgtacaaattatacgatgaaaatgattaccggagggatatatattttgtacgttcaacacaaagtgatagcttgggattgaatcgtaaatacgagatgggaaaacaccgttcttatgtttcggacatcttcacgttacgtacggcagaagggtatttaaatgcggcggaggcttgtgccatgcagggagatgctcaaggagcgtcagattggttgaatcaattacgagctaagagaataaaggattacgtgaatgtcacgtatgatgccagtgaaattattgaacaggtacgtgcggaaaggagaaaagagttgtgtctggaggggcatcgttggttcgacctgagaaggtatgccgtgtgtaagaaagctccctttaaaaaagttatagaacgagtatttgctctgtacgattgggaaaatcgaagtgtatttcaatatgctgaagtttatcaattaaacgtggatgatccggcttatgtttttgcaatacctaaatccgtgctggactttgataaaggaatgcctgataatatccgggaagatcgagagtatgttaggttgatgtacagaaataatgaataagttatgagaaatgtagtattatatttacttctggcactcttggttttaggatgcgagaaagaaagtggattgacttccaaaatagaattagaagatttgtatgcaattaaagatgatccgtccgatccggtgaagcatcgggtgtatgaactgtatagtaagtatggaataccggtttattttaatgacactatcgggaaaatttttgtaaaaaaagacgtgacggggaaagatgtctatcgttatgagacattggatttgtcatggggatttacttcttacagccaactgaagtattcctatgaatatatgacagatccggatgaacagttaacagccttgggtattatagaggaatatttggaattagcggcaaaacctctccatcctttcaatttttttgtgacgaaatcagcgaaaacgatagatataaaagacgaagaaaaaatttataaagaaggagagtataagattcattttcgtactgtgctaatgaccggagattggacggaatcacagattacgtccctacctaatgagatgatgcgtgagatggtgaagaataaaatcacgaattataaagatttgttggcagcttttaatagtgtctcggatagagtttggtatggaaaaagttgggctaagcttgatcctcattggtatgattacgtggaaacaacagataaaccctcgtattatttttctccaagtgcattgtctgatacttggtatgcaattaatgaatttgagccggaggaattagaagaatttagggctgcacttcgtttggcaatgggacaatttggctttgttgccggaggacaaagttcgttatatactcccggagataacgagaaagatttggtttcttatatttcagagatgttgaatcgttcaagagatgaatttattgagttgtggggggaaagtccattggtgatggcaaaatatgagatattgtatcatattgttgccgacgaattaggtgtgaaactgtaaaaaagtgaggtatgaaaaagataattatattattgttatgtgttgtcgtgtattgtgcctgtcaagacgatgatgacaagtggataaaaccggaaattagtttttctgattttcaagatccccgtgatatgaacacgtataaatgtgtcacgattggtggacagacatggatggcagaaaatctgaagtatcgttccccacaaggagggagagatgggtgttacacatacggagaggagaaaatgagggatcaagatattacaataaatgtaaaaatatggtctgattctatacacgctgcggaagatcgaggagagttggaaggtaagataggttcttttaccatcgtggtattacttgaaatgtgggtgaatagttataattattctccagattatgctaccagtaattttgaagaattttatggagcgatgtacccggatgcgttagctgcactgaaacggattaatgataatctttacccacaagcggttcaggcattagcccggcaactaatggaaaaagcagagagtacgaatggccgatattcaactcaatacggctttttatatacttatgagggagcgttgaaggccattcccgagggatggcgtctacccacggatgcggattggaaagagttggaaaaagcattaggaatgcctgtttctgaggccgatagattggacgagtggcgagggagtcatgtgggggatttattgaaaaaagatgaaaatggtattggattcaatgccatctacggtggaggaaaattgtatggttcctatatgtatggagatgcttattttaatcaagaaactaatgcttatttttggtcatcaacacgtatcgtagaaagtgatacggtggatttaggagttacaagagtgctttttatgaaggaagaccgggttatgagaggatcttccaaattagatgccgcatatagtgttcgttgtataaaagagtaaaatgtaagaaaaatcacatgaaaaaaattactttagtattaaatcttgtatgtttttttgctttgggcacttttgcccaaagcatgtatggagatgccgtaaaggccgacgtgaaaatgaagtatgtttactcctttggagaagccttgaaaaaggccaaagaagagaacaaactgattttctttaattgttttgccgattgggcagttccttgtcattcgatgaataaattagtgtttagtgatcaagagtttgcggactggatggacaaacattttgtgaattttttcattgatgtaacaactccggaaggacgtccgcttgccgataagtacaatattagatttcaagcgcattatctcgtattgaatggcgagggcgaggtcgtacatcggatcgtaggaggacatcagctccctgaatttaagactattctagaaaaagctttaaatcctaaaacttccttggcaggaatgaataagagatatgaagcgggagagaagagtataaagtttttgaccgcttatgcagatgtcttaaatattgccggggaggatgaaatgtataagaaagttgtaggagaactgtttggtaaattgaagaagacggattggtctaaaaaagaatattgggacttttactggaaacagataaagagtactgatgatgaaatgtttaaatacatggtggatcataaggcagcttttgttaaagcaaatggggtaaacgaggtgaacatgataattacacgtttttatgttgccctaatctatccgtatgcatccggtaaggaggcatacgatggcaaaaaactactggatatatacttgaatgctcagaaagccgggctaccagacagtaatatgacttattcgttgtataatattgcaaaataccggggagagcatgaatttggtaagatgatggatgtggtggaaagtgctgttccgacatggaatgagaatattgcctctgcgttggatctatctctaccggaaataaaggaattaagtaaacaggaagaagtgcgattgattaattattttaaaagcagggcagaaaaatccggagcgaaaaagttttatctggcagcgatcaacgacatgacaaacacggacggtataaaattcgaagagtctacttttaacgaagctttgaaaaaagcaaaagatcaaggaaaacttctttttatggattgctacacgacttggtgtggtccttgtaaaatgatgagtaatcaagtcttcaaacaaaaatatgttggagactattttaaccagcattttgtgaacttgaaaatggatatggaaaaaggagaagggaaggatttacaaaagagatacggagtatcagcttttccgaccatgtttttgctggatggagatgggaatgtcgtgtataaaattttaggaggacgtgatgttcgttcctttatggaatctattaaaagaggaaaagagcaagaaatcccatattacacgttgaaaaacagatatgatatgggagatcgatctgtggaagtaatggcagattattttctgaccatgtcggatgcaggtgagatgagaaatgcagaaggggaagcacgttcttatatctcaacgttgaaagtaccggaattgtatagtaaatcagcttggatgttatatgataattttgtgaatcatgttaccgatcctgaattcaggtatttagtgaacaatcgggaaaagtttggagaacagcttggagatagtgtggtgaacaaaaaaattgaaaaagttattttccctatggccattgagtatctgaaagggtctgtttccctccaagatatggttcccgtatggaatttagtgaatacagccaagttttctctagactattctctagtgttactgagtaaaatagtctcgatgtatgataaaaaagagtatggtaaaatgctcgatttttacgagaaagaagttgcctcgaactcaaatgataaagtgcgtttgaatctggacgtgattctttatcgtttactaaaaacagcgtctgtcgaagagaaaaaacgtgcaatcacttatgctaaaaaagaaatgggaaaggcaaagcccggagctaaagacaattatatggctttgattgagaggttgtccgaataaatagtatgtgtgtttagaattctcctcgtagaatcgactgattcgagaggagaatttttatctttatatgccgattcctgtggttaaaatgatttgtaaaagatattttaatttttctcgcatgtaatgatttgcattattcttgtgtttttttacggtattgatcgtgatattcaattgttgcgagatttcgtcatgactttttccttgtaaactcagtaaatatacttccttacaagcgggaggaagttcattaaacacagtacgtaaagcttggaatatttcggattccaatatgttgtctaggaatgatttctcttctgtattttcagaaataatgtgttcaacatatttttgggcaacttcttgatggcgaatcaagtcgatacaggcattttgtacgactttgtatagaaaggcttttgcctcattttcatctttaaattgtaatattttctcccataaacgcacaaacgcatcttgaacaatatcggaaataactgattgatcattaatgtatcttgtagcaaaatagcgtaagagaaccacatacttttcatataaatagcgaaaagttttttctttttctttgtctgtaaaatgtgatacgaaactattttgcatatctattattgaattcttttaaaatatcaaattaacaaggagttagatgatcgtttttatatcataaatggaacgtttaatgattgacatcctttgagat

SEQ ID NO: 13 - DNA, 25837 bp, Butyricimonas faecihominis
acattggtgcgttagatcatgggaaaatttggaggcataatattgatcttgatattattgatgtggtgttgtaatacccggaaaacggttgtggagtttaatcttatcgggtcttcggggatacagccggagctggtggttaacggggaggaacgggaaattgaagtggatgactccggctatgccaaattgatgctgacggagggcgaacatggatatgcaacgttaaaatatggaaaggatcgtcttcctttgtttattgaagacggaacgacattacgaatatatatttacggggatcatgctaaagggaatatccgttttgaaggagacggctctcctaagaatagttatttgaatagtcaggtcatgaagaatctgtcttttgattatgaactgaatgccccggagtttttagaccagttgaaggatttgattcaagagcagtttcattatctggataccatgggtttcgatgccgcttttgccgagatggaacggaaccggatcaagttttccacttataaagcgttggaaaattatcccttgtatcatgcttggagtacaggaaacatggattatcagccggataccgcttatctttcctgtatcaaaaaattgatcaaagaagatgagaagttgttggttctgaaggagtaccaagaaggaatggcctccttggtttcgttgatcagtacgtaccacatgaaggagctggatgcctacaagcaagtgatggcgcagtttgattatgtgattcaccatttgactaacgagacgctggtggagttcctgatcgatcattacgcttatgcttatttgcttggtgtgggaattgacgagcatattgatgatgtcttgcgggtgtatgatttttacgtgaaggacccggcattgcggaaacggtttcaagagatttatgatcgttgtgcgaaaattgtccccggtagtcctgcttttgattttatgtttacggatattgccgggcaagctgttgaattggaagatttcaggggaaaatacctgttcatcaacgtgtggactacttggggcgttccttgtcgctatgaaaatctggcttgggagaaactggagaaagagtttgaagatgaaaatatcgtgttcgtggctgtttcttgtgataatgaccgtgctgtctgggaaaagcgggtgcgggagaatcccaagggagaagtacaattatatatggggagtgatcgttctttcatggatttttacatgattcgcgggatccctcgttttattttgatcgctccggatggacgtattatcaattcggatatgtcacgaccttctgatcccgaaacagcgaaaacgttgcgggcttatctgaaagaaaaatagttttttatttaaaccactgggttacgtcctcatttttcagaatgtggatgattgtcttgccgtcagccgtgtaattgggatgctgacaagcgaataagttgtcgaacagatcgctcatttcctgtttgtccagtggggtattgtaatccagcgatgccgcctttgcgagtgatagggctatgcgctccctcattttatcccgaattgaaccttccgtgttcttgtaatgttcaattaggctgataagcacttcttttccgcgagaagtcgacaagtcggacggggtggcgtagatggcgtagcaattctttccgaattctccgagttcaaaacctaatatggccagatcgtccatgatttcttttacgagtagaaaatcttcagccgagagttctagagtttcggggaacaggcttttttgtccgcagatttgttggtgtgacaaggtttccagataacgttcgtatagcacccgttcgtgcgcccgtttctgatcaatgaacatcaacccggaatgaacgggcgtgacaatgaatctgcctttcatttgcacgaaagagatgattccttcgtggtcctcctgtttctctgccatttcggggatttcagtttgtacttcttcggttttatcttccaatccggcgaagagtgcatcccagtttgcgggaacttgttccttgtgccggggttcgaagttctggcgtgaactattaccgcctgactgttcgaagtttgaatcttctttcgagatcgaggtggaatagttgaacgggttgtaatgggggttataactgaccttgggaaccttcgggagaatcggtgagtcgggaaccgtgaagtcaaccttgccttccgtatcaaagtcgattgtcggggttacattgaatttgcctaaggcctcttttacgctggccagtataatttggaatatagcactctcgtcttgaaatttgatctccgtctttgtcgggtggatgttcacatctatgatggaagggtccaccgtgaaataaaggaaatacgaggggatcatgtccccgctaatcaagccggcataggcttccgtgattgctttatggaaaaagttatgtttcatgaaccggttgttcacgaaaaaatactgttccccgtaagttttccgggcgtgctgggggatgcatacgaaaccattgatggtaacgattcccgtttcgcaattaaccgggagtagttttgtattaatcgttttcccgaaggcattaacgatacgctgtcgcaagccggatgctggcaggttgtatatttcgttcccgttgttgacgagcgtgaatgcgatatccggggcggtgagggccactcgtaagaattccgtggtaatgttacggagttccgtggtgtccgatttcagaaattttcgtcgggcgggaatcgtgtagaacaggtttttaaccagcatatttgttccccgggaacaattgatattttcctgattttttaattcagaatcggccacgaagaggtaggtacccagttcatcctcttcccgtttggtgcgtaattccacctctgctacggatgcaattgatgcaagggcctctccgcggaatcccatcgtgcggatattgaacaagtcctgtgcgcaggatattttggatgtagcatgacgttcaaaagccatgcgggaatctctcggggacattcctttcccgtcgtcaatgacttggataaatcctttgcccgcgttctttaggataacttgtacttttgttgccccggcatcaagggcattttccattaattccttcaccacggaggccggacgttgtacgacctctcctgccgcaatttggttcgctaccgagtcgggtaataattgaattacgtctgccataccggaatccttagaataatttcatgatgaggtcgatcttgtacgttgccaaatagaagatcccgatcagtataatgataagaatcatgaagatacgggttgagtaaccaagacctcctccgagacgctcatttttacgtttggcgtattctttttgaagactggccttgacatcgggaatatattcatccccatcttccgctaatcccagttctgcacgaatacgtttttcccgttcttttctggcctctgcttccgggtcccagtagcggggttttaagttgaaacgacggtgttccggttgtttaaatagtcccatgatttttattccttagcacgttaaatctttaattgttcgttttcgttttcttcgatgtcttgccaaaactacgggcaatccatttcggtacgataaatgccccgatgaacaggtaagggtagtagctgatgagcctccataaaatggccatcgctatggcaaccccggcgctcggaaggaattccccgaggtatttggagaagacgaattccgcaaaaccgctaccacctggtgtcgggcttaccagcatcatgatccacatgacgagttgtcgtgcaaagataagaaaatgttgcgcccaatcataacgtccgaaccaaaaagccacgaggatggcgttcactacccagtaacgtgctgtccacgagaagaaagtcgctccgaatgtttttagccagaaggagaacggcatacttcttaattcgtgggaattccggataatatcggttccggcttcgttggcatcatgacgccatttgcggagaatacgccaccggaataatttcatgatcagccatttcaagccccgaggattcttgaataacccgtagcttaacacgagaaggtaggcaagtttcacgctatatccgataacggccacgagaattaacccgtcggctactgctttcgtggtatccggcatttcccacagtgcctgatggttgacgaatagcagtatgagtggaaacatgatgatgaagtacaattcgtcaagaaaggaggttgccatgaccatggcggaacttttcccgaccccgataccttctttatgcacgaaaaggattgccaagctggttcccccgatggcggaaggggttactgccgaggtgaattcccagagaaatatgattcggatggattgtatccagtttagtttcccgccggatagtattttgatccgaatgatatacccgaaatcccggatggccatgcacaggacggcaacgaataaccagaacacggtgttccatgtaaaggtgatcatgtcaaatgctttgggatcgaattctttatataacatgtaagagaccacggccaacccgataatgatgggatatatgattttatacgggctgattttttttgtcagtttctggttctcttcttggcgctcctgttccataaacttcggtttttatttgtggctaatttacgaaaaaaaggacaacgagtttaatacgttgtcctttttttcaggaaagagtggttaattaggctacgatgattttttcactacgggagagattttcgtggtatcgtttacttacagcccggtgaatgaggtacatgtaaggtagtcccaagttggtttcgagaagagagttaaccacgatggtcatgaaactcgggttacggattcctgtgatcagtagtacgaattcccatgcgaattgtactagaatcccgatggcaagaatccacgggatgttaatctttcgggtttcatctgtcgttctgatattgtgaatacaaagaatggcatatcccacgaagaggatgagggccatgatgccatggtaggctcccgtaccccttgaaatggtgatcggggcgaaattacccccgaaactttggcttagtaacgaggtggtaaaccaagaggcgataatcaagatggaccattccaatgctcgtttgtcccggtcgagccagagccatatccatacgaaattcgtgaaaccgtaactcatgcttaaccacaggagaaaacagaacggatcggctccttccacacttcttgtccctaaatacaggtaaaaataaccatagtcaacaatgaaatacaggattccggccagtaatccgacaaggattgccaaatatcttttcgtgtaaactaaggttgcacctaagaaaagtaggaacgcgacatcaaggtacatgtaaagtgcgttcatcgtacgcgctgcaataacttccattatgttgtatttttaggtttagtgatgatttatgcaacataatttatgccaaattggaatatttttgctgaaatgctaaaattgttcctacccgtttctgggggttgtaatcttccgggtgaagtcttgccctcggtatggcctactcttgcgtcttgtcgttacctcttcgttatcctttcgatgaagtcgacttctataggaacgaagggagacggagagtgataacaacataaagagacagatgtaagtgttggtcttgggatggaagggtagagaaatagttttgaaataaaaaatttgagtatttgtacaccacttttccttgtttttttaagccgttccaaaacctaaaaaaaagccccgaaaaaaccgaaaacactctttaaaatttaaagcattgaatttcaatgctttaaatggtgttcgtggagaatatcggaattgaaccgacgaccttttgaatgccattcaaacgctctagccaactgagctaattccccgtttgcgattgcaaatatagataaatatttgaaaataggaaatggttgaggtgtgattttgtcgattattcttatatttgccgtgtaaatcggcgtaaaatgaccaatgttgataatgagttgacagtcttcttgcaaatgcagcagggagatcggcgggcgtttgaatatttcttcaacacgtacgtggatatgttgcacgcttatgctttgggatattgccgggattcggatgtagccgaagacttggtgcaggaggcgttcgtgcggttttggacgatgcgtgaaaagatcacttattcggaatctatttatggctatttgcagcggaccgtgagaaatacttgtatcaatcagaaagtgcgggagcgggttgaggaacgctatcggcaggaaatgctgaatggggagacggaggagttcgattgggaaaatgacgatgcgttggaagagctgagaaaactattattggatgcaatagatcgtttgccggaaaaatgtcgggaaatattcgtgttgagttgcgtggaagggttgaagtaccaagaggtggccgataaattgggggttacgattaacacggtgaagacgcaagtgcgttttggttataaaaaagtaagatcggatctgaatcttccggggaccaccttgttcatgctgttgagtatgttgctgaaatagagttgcttcctttcaacttgaaaaataaagtaatttcttttgaaaaaaatgtctgtttctttcactcgttttgtttccgatcttgttaataaggtgtaaagcaagaaaaatggaaacagagaataaagatcatatagaggaaatcctgcggcgtttcttgacaaaaggagaaacgatgaattgggatgagttgcgggcggagctggggaaggacgagtatgctcacgtgaagaaggagttgctaaggatgagggcgatgcggatgaaaacgaaccgggagaaaatttggaatggggtgcaggaaaatttacaacgggatgcaaggagacggcgcttgttgcgggttacccggtatgcggctattttaatactaccattatcattattcctgttattttggttaaatcaagagaaagaattggctcccgtgaacgttgcgactgtcgggacaatggattccacgggtatacgcaaggcttatctggttttggaaggaggggcgaaaatagagttgtctgccccgcatttggatacaatccggcaggaggacgggttgcctctggccgtggatacgttgggaaaattggtgtataatacggtagaggaagaggtagaacaattattctatcataaaattgtggttcctcggggcggggagtacacggtggagctgaacgacgggacccgggtgcggttgaatgcggattcggaattgaggttcccggtgaaattcgcttcgaatgaacggaaagtgtttttaaagggagaggcctatttcgaagtggagcatgacacgttaaggcctttccgggtggatgtgcatgatgatgcgataatcgaggtgctgggaacagaatttaatataaatgcttacccggagaatgatgaaatcttcacaacgttggtacggggaaaggtgcgggtagacgatttgcagacggattcgacagtcgtgttgttgccgaatcaacaagcggttcttgttggtacgaggatcgacgtgaaagaggtaaaccccgaagattatattacttggattaacggtcgattctatttcgagaagatgaccttggaagaaattctgatccagctggaacggtggtatgacttgcaggtattttggacggacgaggaattgaagtcttacgagttcacgggtgccgtgtggcgggataacacgattcgccagacgttggatatgattgaaaaaactacggatgttcgctttacggtctccggccggacggtaacggtgaatgccctgttataaaaaaacggtatctgttcgcgcagataccgtcttgataattcgactagcctgaagttggattcagggttggtcatgttaaactattaatacaaaattatggaaaaaaatcgaacgatgcaacaaaatgcgtgtcggactctacgttcgtccattttggtaagtgcaagagtgttactgattttattgttctgtggcttatccgtggcttggaatccattgtttgcacaggataaaagtgtgacgcttcacgtgaaagagctacctttgggtgaggtcgtgaaggagctgaaaaaacagacgggaaaggatttccttttcagtaaccgggaggtgaacgtggatcgtaatgtcacggtgagcgtttcgaacatggcgttaaaggaagttttgcctttggtctttggtaaagattaccgtttcgagatcggggaaaatgtggtgatcgtgcgaccatttgttgccgtgagaactgatgggcagaaaggcggtttcattgtgagaggtgtggtgatggatgtaaagaaacagccgttaccgggagtgacggtgaaagtggcaaataccaccgtgggtacggcgacgaataatgctgggcaattcgtgttgcgtttgccgatcacgaaaggaagtctggaaatttcgtttgtcgggtttaaatctcagaccgtgaacttcacggaaaatacgagggacacgatacgggttatcttaaaagaggatgtgaccgggttggacgaggtgcaggtgattgcttacgggcaacagaaaaaacggacggtgattagtgcggtatcttccgtgaaggcggatgatataaaggaattaccgacccatagtttggaaagtttgctgcaaggacatatggcgggcgtggaagtaaataatatttcgggagctcccggaggaggtggttctatcgtggcgattcgcggttataactctttttttgttgacggtggaggtgaaggggaagatcgtgcttacgggacacctttgtatgtgattgacggtgtgcccatgcaggcgtttacttcccctatcacgggaacgaatacattatccgatttagatccttctatgattgaatctatcgaggtattgaaagatgcagcttctgccgctatttacggatctcgtgccggtaatggcgtgatcttgattaccacgaaaaaagggcgtgcgggattgactaaatttacagcgaatgtttcttattctgcttcatggttaccgaaaacaccggagcagagtggagggcaattggaacgttggtacaatattcgggggttaagaaatacggtaactccgtatcaggatgtggatggacattggaaaatacctacttctttcgaagaagtgtatcgttttagagctactaccacgaatcagccgatgtacgactggtttttaggtacatcgtcaagtgcgaatagtgcttatcatttacaggatagtttgaatgtattttttaataactcaacagattggtggaaatatgcctatcgcacggcaagcgtgtataacgccaatatccaggctagcgggggaacagaagctgttcgctatatgataggtgccggttattacaaggaggaaggtattatgcggaatagtgattatcaacgggctaacgtgatgacgaatatatcggttcatcccacgaaacgtcttcagatagataatcagatttctctttcttacacggatcgtagtcggggaggaaatagtgggggtgcgaagattgagggaatgacggtgaatcctacggtagtttcctcgttatacccgggagattcttatattaaaaccgaattgttggagaaaatgaatagcatcacccagaaaaatcatggttacgggacccgctataatttggtattggattacgagataattcctgatttgcatttacgtgtttcgggcggaatcgattataatcagcagaatatgaatcaattctcgcctagtactttggataaatattaccattggtcaacgtcggaaggtaatattggacgtagcctctccattttgaacgagaatttattgagttactcttttagcctgaaacaaaaacataattttgatgtgttgttgggactttctttccaaaaagaccagaactattccaatgccggaagcggaagaaatggtccgaatgattacgtgcaatatgtacagggaaaatggggagatggtgccggattagttaatgttgctgatcccaagagtgatgaaacggtttacgaatctgctttttcttatgcttcggatttcgaggaagaacggatgaatagttatttcgggcgtttaacctataatttcaaggagaaatatatgtttgaaacgaccatacgtagagatgggtcttctgttttcggagaaaaagtacgttgggcaacctttccttcgattgctgccggttgggctttttcggaagaacccttcttgaaacatttgtattggttgagttttggtaaagtacgtgtaagttggggtaaatctggtcagaaattcggtcaacgttatctggcgcacggtttgatgacttctagcgggagtttcttgggtacgagtggaattgttccggatacggatggaggggttattaaccggaaactgacttgggaggaaacgagtcaatatgacgtgggattggatttcagtttatttgactatcgtttgaaagtaacgactgattattattatcgttacacgaaaggacagttgaataaggttgatcttcccggtgatatatattttcataaattccaatggcaaaatgcattagctgtttcgaatcagggtatcgaggtcgagttgactgcggatattttgcgggaaacagccgtgaagtggagaatgaaatataatgtttcccggaactggaatcgtttcgagaaaagtagtgacggatatgattatgaacaaaatgttttgggggaacctttataccggataagggtattcaaaacaaatgggttttataattcaatggatgaagttcccatgtactacacggaagcaaatggtttaccgaaacctttgaatacaggtaatacaggtatcttttttccgggaacacgtcgaatattggatctgaatggtgacggtgtaatttcggaagctgacaaatattatgcagcaagccctttacccgtcgctcacggtggatggatcaatgagataagttggaaacagtttgatctgaatgttgtttttacttattcgttaggacgtcatatcataaataattacaagtactcgtttgctcaacccggtaatggacctgctccgatcatgggtgatacccgggattttgatgcatggactcaagcggataataaagaacatgatttttccaagttacagatgtacacggagttgaagaatcaattttcgggagtttatgacactgctattgagaaggttcatatgcttcgtttgaaacaactcacgctgggatataatttagatcgccaaattgccggtaaaatagggctttctgggactcgtctattcatgactatggagaacttgtttctgttaacaaactactccggtttagatccggagattgtgagtatcttcagtggattggatgcattgtcttcttatccgcttccccggaaatttactgttggattgactattaatttttaagatgtgacgggtatgaaaaagatattatttattttaatgcttttaccgtttttctcctgcaatgattggttggacgtggagtctgaaaaatcggtgacttacttgaattatttcaagagtgaacaggatttggaaaaggtgttaatctctatgtttaataacgaaaaaggaatatttgctccttatcatgtaaatgcttttggctgggccggactgccatgtgataatgccggcgactatgaagggtatagaaagttagatcctgctgaatttttcaataaaatgggtatggaaggctggagtggtcattatagtgccatgtatctggcagatatgttggaagagaatcaattccgttttgagaatatctctgatgagagggcgaaatattggctggcccaagcgaattttgttaaagcattaatgtattttgatttggtacagaattggggagaggttcctcttgcccccggaacggagtccacggaagctgaaggaaaaagtacggtcgatgttattctgaaggaggctatacgttgtgctgaggttgctttgattcttccgacgcatgataaattaatggatgcgaatggtaacgtgattacctcgaaacaatatgccagtttaggcacggtacacacgttgctagctaatatttacgcttggatgggaggattgtatggcgatacggaatattggaaaaaagcagaagagcatgcgtctttggtgatagacgggaaggtcggtttttatgatttggaaaagacgatttctcttctgatcgctaatactttgggcgcaaatagaacgagtgacgaaacaatttttgcgatagaaataaatgaaacggatgaaaataggttttggaggaaacaatttgaggagcgttacccgggattggttctggtcgattacccgtatagtgaaatgaatcctcaggaaatagaatcgaattatcggaaaccttggatttcggtgagatctgtgctgaatttgtatccggataggaaggacgaaagacgggacgaatattggtatcgattgggagaagtcagctattgggaggattcagactgggatgatgatggaaatgtgattgattccgtagaaattatatcagattatgcttttttaaataaatggcgtgatcctattcgtaccgtgaatccgtcatttatagataaagacggagaggctcaactattggcgatggaggggaaccgggtggtatggcgtttggcggatctgattttacttcgggcagaatgtcgtgtacgtttgggggaggcttcggctgttaacgatttgaatcggatacggaagcgtgccggtttggatgattatgatggaagaactgattctgaatctctgcggagagaaatttttctagaacgggagcgggaattatttggggaaggacaacgttattatgatgtcgtgagaaacgggtatttccgggaagaattatccttggtgtatgcagcattaactgacaacgatatacgggacggagctctttatcttcccgtgtctcgtaattcatttacaaaaaatccattaatgaaacaaaatatttactggtcatggcggcaacaataaaacatataactaagggggcaatcgtggtaatggtgctatgcctttgctcttgcacaaaatacaattatatcaatgggggaacggcaaacggaattcatgattgtacgatgtgggaatattttcacacgaatagttacgattgggattccacggttgtcatgatagaacatgcaggactgaaatctcttttcgatggaactggtgaatataagcaaatcacttttttcggtttgacaagtaatagtatcttacgctatatgttagaaaataattacgagagagtgacagatatcccggttggaaaatgtcaggatattatacagaaattggtggctccgaaacgcatcatgttgaatgatgttccccgggggaaccggatacaatcgggagggggaatcgagagtgcgtttgtggaatatgatggtttggtatttgattgtattagaggttctcttttcttgtggacacaaaggatggcttataatgatatcgaggataccggagagatcgcactttatatcgctagtcgaaatcaggacgggactaggaatgagcgtgttgcttccacggatatacaaactacgaatggagttgttcattcgcttaattatgatttcagattccgtaacttttaaaaataggcgatgatgagaaagatattattattcatgacgctaggatgttcaatcctgttgggtgcttgtagtgatgtggaggtgggatacttggtttcggaacatgcggcatatactcaagattctctgcatttgtataatatagagaatcgactggaggagttgatcaatatattgaatgaattccacgggaaaacaggacctcttttggaagagaaagccgaattaagtgaactcaggcaagagaaacaatgggatttgtgggattttgatgattatgagattgcaccggtacaagagcaattagcatcgtgtacggatgctgaaacatgtaaaaaattgcaggctttattagatgagttgaatgcacaacgggaggtgatgcgtaaagagataaaaaacttggacgatcagatatggaatttacagcaacaggtgaatcagattgccgaggagctgggttttggttctgagaaggaattgactaatcaagtggataagttgaagaatactatcgagtatgagattccttgggtgacctctccgatcgagggagtgttggggactgagcctttggtgtattctatcgagaacgtgaagaatgagaatgctgctaatgcggaacttttccgtaagggtttgtctattatgggagggggacgtatgtacgtggagcaaaatctggaagctcctgccgggcggtatgtcgtttcaattcgccttgagaataaaggacaacgtgctattctggaagatgcgttcacttttatcgtggacgaatagacctatttataatttgatatccgcaggcgggatggccgcttgcggatactttgagtgaatgtcttcaaacgatttaatttgttatttatgaaaaaggtgttttatttattggtgttcctcgtgggaacgctagggaatctctcggctcaaatggtattgtttgaagggacgttcgaggaagccgaagagaaagcgaaagaagagaagaaagacttgttcgtggatttttatgccgattggtgcggaccgtgtaaagcgatggcttcggaagtgtttacccgcccggaagtgggggagtattttaatgcgcattttatctgtttacaggtgaatgtagaggcaaaggagaatgcgaatctggcaaaaacgtatcgtgttatcgctctgccgacgatggtatttatccgcagtggcaaagaattacgtcggattgagggagtcaaagctccggaggcgtttatcaaggaggctaaaatcgctttgggggaagaattgagttttgaccaattgtatgataaattcaagaaggacaaaaagaattttgaacttcaacagcaattgttattggatgctcccgtgtttatgtcttccttacagggatatgatcgggaaaagtgggcatcccggatagaaagtctttttccggactatttgaaaaataagaagttggagaatatggtcaatgaacaggattttacgattctctcgatgtatcattctcaggtttccaagcaggacccgatctttgattttgttgttgctcattttaatgaatatgcgcaaatcgttgggaaagaacaagtcagtggttatttgattgggttgaataatagttatatcatccaattgtgcaagaaaggagatttggcttataaagatcgtttgggacgggtgaacagggatttgaaagaggtgtattccgggattactttcgggtccttgtccgtgttggatgcgataacgttattatcggatgcaacctactatttatataaacaggatgagaggaaattcttcgagaatatggataagtatttagcgggaatgggagataaagcagagttagaggattatacccaatcgctagaggatctttccgtggcgtacaacgggaatctgtcgaaaacggcttacacaaagagtatcgtgtggatcacgaaggctttggaaaaagaaatgtccccgcaattgcgtactcgtctgttaatgatgatgggacaatgttttcagagtatagacaacaaagagaaggcaaaacaggcttataaccaagctttcttggtgagtgcggaaatctcggataagatgcagatgaaacaaattcaagaaacaatacaacagtgtttgttaggattgtagaaaaaatctaaaatcgaatatcactttgcaccggataatgatcggaatacttaacggtatcacgggtataagatacggtgccgagcgttggtgtgtgcaggatgtggtcaatacggaacgaggggaattctccgatatacgtgttcccgaggccacgtcctttttctatgaaacagtctttcatcccttcggacaatgtgtggtaggcgaaggagatcggggtatcgttaaagtccccgcaaatgataaccgggtagggggattgtagcatatgatcttttattatttgcgcctgttttgcccggtttcggttggcggtaaccagacgagaagatatagtcttgacaccttgcgtggcattttgcgtgttgccactggtgagttccttgtatatctgctgttcatttttacctaaccggtaggattcaagatgtacagagtatacccggatcgtgtctttaccgatggcaatgtctccataaacgcaggcggccgaatgtcctttatcgaatttaatcacacctttattaataatcggatagcgggagacaagtgcaacatcccgattgcggtgataatacgggtaggcagggaattttttgaaggaggcttcccgttgaggaaattcctgcatacaaacaatgtcgttattactattatttatgtaattttcgatctttgcaggtgcatccttttcgcctattcccaacatctggatattgtaagtcatgatggaaagatcatgaggtgcatcgggcacggtttgcgggttcaatccatagtaagtggtaattaacgggtacccggctgcgatgatcagtatggatagaatggctatctttttccagcgtgcaatccagtaaagcaataggataatgtttacaatcaataaataatgataggtgtaacccagcagggatgaaaaataaaacacgttagggttaacatagggagcggtgtagctcccaagtaatccgatcatggcgatgatcgtgacgatcctcatgataatgtcaaataatcggcccaaggaattttagattttaaattttagattccagccgcacagggctgacgctttttgattttctacttttatcttttaacttttagctccgatctttccaactaccccctctaactcccccctgtgtaagggggagccagagggggtagttgttttttcattctaaattctatatttttcattcttcattttcaattgtttttcgatttgaacaatatctccttttcttcttttgtcaggctttcataaccatgtttggagattttgtccaagatactgttgatgcggtcgtcttttcgttttttgtactcgttatattccatgtcattcatgtccgagactttctttttgtacttgactctcatggtcttcttatggaataggcggctgttgcctaacttggtgaagagggatgaaagtcctttggtcaagtcgagattgcgacggaaagacaaggtgaaaagataaccgaacaaggctcccccgaggtgggcaatatgccctcccgcgttaccgctagggatacttagaaggtctatgactgccgtgaagatcgctaggtgaataagtttcaccgggccgatcagaaacacgtatatcttgtagttcgggtgataagtacacacggcgaacacgatggccatgacggatgccgaggcaccgatggcccacgactggtaacgttcaagctcgaaagcgggaaacaaggcgtaggctgccatgtaaataatagccccggtaattcccccaaggagatacactcccgtgagtttctgactggagaacgtgttttgaaagatcgaaccgaaccagtacagccagagcatgttgaacaacaagtgtagaaacccgaactgggtgaacatgtaggtaattatcgtccacggcgtgtaaagcagacgttccggcagcgcgggaacacctacgtaaggcaacaggagttgttcgaagccccgttgtccggccagtacgaagaatacttccagaatcttgatgacgagaaaaacaccgatattgatatagatcaggcgggtaagtgtcgttccttgtttgaaggagttctttatcccattccagattccacctgaaaaattcgatccatacgccctgttgtacataacctatctttttctagtaaaacttcttgctgtgttttcgccagtaaagaatcaagaagaaaccgaaaagcataccacccaagtgtgcaaagtgagccacgttgtcacctaccgaattctgtaaaccgaaaaacaattcggcggcaccatacaaaagcacgaagtacttcgccttgatgggaatgggaatgaacatcaagtataactcagtgttcgggaacaacataccgaatgccagcaatatgccgaagacagccccggatgccccgatagtcggaacgttggtataggcctgaataatactttgcatgtaatattctgcctgtccggcaaactgcgaactggcaggtgcggcattccaagcatcgacaaattgcatcaattgcgagagtaatctggggttgctcacgtgagagcggacgaactcggcgaagactcccgcgtcgggagtactttggaacgcgtagaattgttcctgcatattgtgcagaccgtaccagcttaccagcgagtggagagcggctgcgcctaatccggtaacaaaatagtagataataaaacgtttggtaccccataccgattccagtatccggccgaacatgaacacggcaaacatgttgaagaaaaggtgagtaagcccttcttgcgtgaacatgtgcgtgatatactggtagatctggaaatactgggattgcggcaagtgcatcccaagtatattgacaagatcaacgtccgaccgctggccgatcatgttaacggccaagaaaacgagtacgttgataatgatgatgatctttactgccggggtgatcccggcgaagggtctataattattcattgttcagcaggtttattattttccttgttttccggtttattgtttttgtcttgtttacgtaacactttcggtccatccgggcgatttgccggtttctcgttggaacgattaccctgttggttattattccggttttctgggcggtgcttgggcctgttgccttgcctgttttcgtttctattctcgttcctgttttcaggcttgttccccgtgttgttgcccggattttccttgggtttattctcgttattcgtgttgttgttctctttctgattgtttttccggttattacggtttctggagtgatttcgtttgccttgattttgttttttctcgtcaaaacgattcaagctttcttctcccaccccgtccgtgtaaccgatgttcacttgttcttctttttcgacatcgacagcttttgccggaatttgtccccgtttgttcatggcgatgatctctttcacgcgggcgacggatagtttgatcaacgtaccacgtccttctttatcgaaagagtaggacatattgcgaccgaaaatatctgttttctggtgatagagcataccttcgcccgtgttcagccagatattggtggacgggaaatctttttgctcgtcaatataagcatcgacctcgtaattcagacaacatttcaacttaccacattgtcctgccagtttttgcgggtttaaggaaatgtcctgataacgggcggcagaagtggaaacggaaataaagttcgtgatgaacgtggaacagcataatttacgtccgcacgacccgattcccccgatacgtcctgcctcctgacgggccccgatctgtttcatctcgatccggatgtggaatgtttccgccaaaatcttgatcagtttccggaaatccacgcggtcattggcgatgtagtagaaaatggcttttgtcttgtccccttggtactccacgtccccgatcttcatgtcaagtccgagttcggcagcgataacacgtgaacggatcatcgtgtcgtgttccaaggcgatggcctgttgccatttctcgatgtcgtggggttttgcctttcggtatatctttttcaagggattacgttccaagtcgacttttttcagtctcatctgttcccgcacgagttctcccgtgagggatacgatcccgatgtcatgtccaagagctgcctccacggccacgatgtccccgatatttagtttcagattactgttgtttaaataaaaacctttccttgtatttttaaaccggacttccacgatttcagaaggagtgcatccttccggggtatcttccatccagttatagaccgtgagttttcctgccagcaggcggtgatcaatcacgggaacaacctgtggttgttgctttatatttttgttttcggagttattctgtacttcttcttcgtttatctcactcatactgtattaattgaaaattgaaaattgaaaattgaaaatggtgtgatatttattttcggttttcaatggttcaatttttagtttatatcttttagtttttcatgtttttcacggtctgatgttttgcatcaccttgatgcagagatccgtgaaaattattttcccattcccgtttcggatgatgtcactatatgcacgttcaaattcatcgaaaaggggaataatattgccttcatgaacgtagggagagaatctcgtggagaaagttttctcccgttcagtcatgtatactattttttcaataccaaagtttctgacaaagttttcccgtaacatacggatgcaatgcatcaggaaacttttttgcttttctcttccgagagaagcgagttcattgacaaattcgttgacggggagcattttccgttcccagcagagacgcatcatctgcacgaatttctcttggttgtaaacagattcgtcggtttcgttcagcatgcggagggctctcagccagctaccggatgccacgtgagcgacttgatcggccgagtcccggaccaagtgtttttgaagaaccagttgtttcgctatgttttcttgggtcagagggggtaccttgatcctctgcgtccgcgagagaatcgtggtgatgatttcctcggcgtgttcggtgaccagcaggaataacgtgttcgggtagggttcttccagtatctttaaaagtttgttggaacattccgttttcatcttttcgggcaaccagatgatcatgaccttgtagtccgattcgaaggatttcaggttgagtttccggaggatgttcccgctttcttccgtgtatatcaaggcttgagcgttctcgtcggcacccatggctcctagccattcttccatgtctatgtatagacttttgagcagaaggctacgccattcgttgatatactcgtcactgatcggtgtttttatcttggctgatttcaccacgggaaagacgaagtgtaaatccgggtgaatcagtttctgcatctttttgcactccgggcagaccccgcaagcatcttcatgtttatcgcccgtgcagaaaagatactgcgtgaaagctaacgccaaggccagtgaacccgctcccgtatcaccggaaaagagttgggcatgactgattcttcccgtttgcagggaagtaatcagtctttgctttatttcttcatgtcctatgacgtctttaaaaaacaccttgttaattttagatttaatgattttagatttaagattccagccgcacgaatcaacgcttttttttgacaggaatcataaattcattcattttcaattgtcaattttccattttcaattgaattcccagttccttgaattgctccggagagatttcagaaggggagtcaatcatcacgtcacgcccggagttgttcttcgggaaggcaatcacgtcgcggatagaatccaacccggcgaacatagaggctaaccggtcgaaaccgaacgcgataccaccgtgaggaggagccccgaatttgaatgctcccatcaggaatccgaactgagcctgtgcggcctcgtgcgtgaaacctagacaatcgaacattttggattgcaatgccgaatcgtgaatacggatagaaccaccaccgacttccacgccgttaatgaccatgtcgtaagcattggcacgtactttacccgggtcggtatccattaatggaatatcctctggcttgggagaagtgaacgggtggtgcattgcatagaaacgttgggtttcctcgtcccattccagcaaggggaagtctactacccacaacggtttgaagacatccttatcccgtaatcccagacgattacccatttccaagcgtaactcgcacaattgggggagggttttgaatttcggacctactaaaatcaagatcaggtctcccggttctgccttgcaggtttctgcccatactttcaagtcggcttccgtgtagaatttatcaacagaggatttgaatgtcccgtcctcgttgtatttcacgtaaaccaatcctttggccccgatttgcgagcgtttcacgaattcggtcaactcgtccagttgtttacgggtatatccggcacatttaggtgcgcagatggccccgatatattcagcatcgttgaacacggcaaaatctttccctttggcaacggcagtcaaatccacgatcttcatcccgaaacgaaggtccggtttatcgcatccgtattgctccatggcatccatccaagtcattttttccagtttgggaatatccacgccacgaacttctttgaacaagtgactgatcaaaccttcgaaaacttccaacacgtcttcttgttccacgaatgacatttcgcagtcgatctgagtgaattcgggttgacggtcagcccgtaaatcctcgtcccggaaacatttcacgatctggaaatagcggtcgaaaccggaaaccatcagcaattgcttgaaggtctgcgggctttgtggcagggcgtagaattggccttggttcatacgggaaggtaccacgaaatcgcgggctccctcgggtgtactcttgattaataccggggtttctacctcgataaagttcaagttactcaagtagttccgggtcaattgtgccatgcggtggcgtaattccagatttttgcgaacgcaggaacgacgtaaatccaagtaacggtatttcatccggatctcatcccccccgtcggtttgatcctcgatcgtgaaaggcggtacttccgattcgctcagaacattcaattcattcacgataatctcgatatcgcctgtcggtattttattgtttttgctggctctttcgatcaccgtaccctttacttggatcacgaattcacgtccgagctttgccacgttagctttaatttcttcgggagccgattcctcgactaccaattgggtaatcccgtaacggtcacgaagatccacgaaagtcatggctccaagtttccgtactttttgtacccatccgctaagacaaacgctttcattcacgttctccattcttagctgcccacaagtatgtgttctatacataaattctcaattttaattctggcataaacattgtgcgaaaatagtaagaatttgtcagtttaaggcataaataattgaaaattgaaatgcggatactgaaaatgaagagatccgtgggagatcgacgggagttgagagggagatcgatgcctacgggaagttgataacggtttttcctaggtattaaagacgatctaattagtcgggtttaactcgtgggggaatcggctttgtctcgtctttggggaccgaactccgtttgaactcggatgtaattcctcttgatttgtttacaaggggaaagtagcagatttcagtcattgggtgaaacgtgttgaaacgtggtaaccaatcggaaagtttttttcaatattattatcccgattttgtgatgaaacgtggacaattgcttatctttgaaatctgaatgaaatgattaataatttaacggtgaattacattgatgtgattatattgctaccgttggtatacggggcttataaagggtttagccaaggattgattgttgagatgtcaacgttgtttgcgttggtgttaggagtgtttatctcgttgaggtatgccgtgaacgtggagggctttttgaaggatttcgtggctttgccggagtcgtatgcctattacatcgctttcgccgtgactttcctactggttattatcgtgatgcacctgcttgggaaattgttgaccaagttgattgatatggtttcattgggactgtttaacaagttgttcgggatcgtgatgggcgtgttgaaagctgctatcgtggtatgtgtggtacttttcatcgtgaatgcgctggacgttcgttatgattttatttcggcaaaaacgaagagtgatagcttgttgtacaaaccttttgttaactttgcaaatggcgtttacgaaagtgcgataaaataagctaaaaattgaaagctaaaaattaaaagataagagttgaaaaaactcgtaacttattaacttataactcgcgaaggcgaattaaaaattaagaatcgatgaattttgttgaagaactaagatggagagggatgattcataatatcatgccgggaaccgaagaacaattagcaaaagaacaaacgacggcttatgtcggaattgacccgacggctgattcgttacatataggtcacctcgtgtcggttatgatgatgaaacatttacagatggccgggcataaaccgattttcgtgattggtggagcaacgggtatgatcggagatcccagcggtaaatccttagaacggaatttgttggacgaggataccattcaaaagaacatggcagggattaaggcccagttgtccaagtttattgatttcaattcgagcgagccgaacgcggcgatcatggtgaataattatgactggatgaaaaatttctctttccttgattttatcagggaggtggggaaacatatcacggtgaattacatgatgtcgaaggattccgtgaagaagcgattaagcgccgattcgacaaacgggatgtcattcacggagtttacttatcagctggtgcaagggtatgattttttgtacttgcgtcgtaattataactgcctgttgcaaatgggtggttccgatcaatggggaaatatcaccacgggcggggaactgattcgccggaaagatggtggggaagcttatggtttgacttggccgttaatgaccaaaagtgacggtaaaaaattcgggaaaacggaatcgggtaacgtgtggctggacccgcggcggacttctccctacaagttctaccagttctggctgaacagcacggacgaggacgctgcccggtatatcaagattttcacgatattgccaccggcagagattgatgccttgattgtagaacatcaggaggccccgcatttgagaaagttgcagaaggtgttggcgaaggaggtgacttgcctgattcacggggaggaagcttatgattccgctttggaggcctcccaaattcttttcggtaatgcaacatccgatgcgttgaaacgtttggatgaagacacgctattgtctgttttcgaaggggtgcctcaatttgacgttgcacgaactgatttagaggccggaattcatatcgtggacttgatggcagagaaaacttccatgatgtcttcaaaaggagaggctcggcgtgcattgaagggaaatgcgatcagtataaataaggagaaagtgcaggatcaagaattagtagttactcccgaatatttgatcgacggtaagtttatccttttgcaaagcgggaaaaagaattatttcttgattacggtgaagtaagcgagtttataaaataaatgaatagaggctgcatccaatgcagcct

SEQ ID NO: 14 - DNA, 24555 bp, Butyricimonas faecihominis
taattatgcacacaaaataaaaaagactatgaaaacaatactacataaagccgagagtcgcggtttcttcgaccacggatggttaaaaacccatcacacctttagtttcgcagactattacaatccacaacgcattcatttcggggcgttacgcgtacttaacgatgaccggatagaaggaggtaccggatttgacctacatcctcataaaaacatggaagtcatttccatccccttgaaaggcgacttggaacatcaggacagcctaaaacacaaggacacgatcaaagaaggtgaaattcaagtgatgagtgccggaacaggcatcatgcatagtgaatacaaccggaatgacgatcggcctagtgaattcctgcaaatctgggtattcccgaacaagcaaaacgtgccgccacgatacgagaacgccgtgatttccgatttaatccgcaagaatgagatcagcgagatcgtatctccttatcccggtaacggcaaaggattatggatttatcaacaagcttggttctcgattgccgacttggacaaggattctttacaactctacaagatgaaatcaaaggagagcttgggcgtgtatatctttatcattgaaggaagtatcgagctaaaggacctaaccttgaaacgccgtgatggagtaggagtatatgataccgatgaagtcgaattcaaggcgaccgaaaaatcacgggtattactgattgaagttccaccacatcaataaataaattcaataaaaacgagagggtgtgtcaaaaggtattttatcctcaaaaaaactcctccgtcacttcgtgccacctctttcttcccctgcctgaggggaagtaccccgaaggggggatggggagggagaacagaggaggagctggtgattcttaccaaaaacagggagtatttcaactctccctctgtttatagagggagtacggcgaagccgggagggagtttgaaaaatgacttttgacacactctctttcatttataaatccataacccacggttctgaaaattcataaaatccattatcctagcgggagtcctagagagaactcaaaaatgaacagttgttttctacgcctcactcatccataacatatctttattcaaatttcaccctatccgccagctggacaaaataatcatttgaccaaatatccaattctttgggattcttgacgaaaggcaacacatcactttttacctgattgatatctgccgaaaccaacctgtccttcaattgagtaatgaaagcatcatgctctatcttttcattattaaacaagaacgtacgctcggcaagatgtgtaaagcctagaggtatattgtgacggacataccattcaaaatcataccaatcacgacctttcacccgatttttccatgcccggtaaaccaatgcatgcatttttccggcaaacaaatcaggaagaacgaaacaacgtgtcataaaagaatgaggttgtaaaagaagtttctgctcggttctaaacttcaaaggaggttgggtatcaacctcaatctttatttttatagatttatccgtccgaaaagaaatatcataaacatccgtattatctttcaaaaaggcagactctacttttccaaaattctttttgtctttctttttaatctccacgtctcttcccacaatagcgaactcatctattataggttgaaagtattttgtgaaatcgaacttatcatcaggaacaagaagagaaaaatccatatcttcactaaaacgctgaagaccatgaaaaatccgaaggcaagtacccccgtaaaaagttgcaacatcaaaaaagccaccattataaagcccagcaagtatcacctgctggtttacctcaaaaatggcattccgcttctgttgttcggtagataaatcgtatgcagaaagcatatcgtcgtaaatatcatttttcatttcctcatcaattttagcaatgttcgtatcgactcagcctttttgccgacctttatatattcctcaaatatttcagcgtccatctgtttgaattcctccaattccatccgaatatcctcttccaaataaatttcagcatccttcagataacggagatttactttgggtgagtttgctatcaaatcacacaatgccttttcgggagttgccattacaaaagcataatcttcttttttcatactagtcaagcctactgaaaatgcctctcttgagatattcgtatattcaaaccttcccaaaggtgtatcaaaatctctagaatgtttcagagtcattgattgcttcgtgtacaccgtttccggtatcaagccgtaataacgcagggccgatgacatggaaacatacgaaggtgcataaagatgattggctatcaattctgttgataaaatcttacctgttatctccggattgcacacgtaaagcccccttttgagacgaatgatttgcttatctcgctcaagtaacctgactttttggtttcctctcttgatatgagggaaaagggattccaacgcagaaaccgttacaggtatattacccaatcgtcgtaatggattattcatagtgtaaagatagctattttttgaatacaaaaacatatcacacacgtttttctgttcaaaataatgccataaaagcatccatctataccggaatcgcctacatcatcacagttgtcgtcctcatcacgccctccgtgttagatgcttgtctcgaataagtaacaacccaagataacaaagcagcccgttaaacaggagaatctcgaaaccaaatttatacccgaaaagaagttgttccgagtaacaattcaccacgtaggagatcaccggtgaaagcaaacacacccaaggaagatatttctcccgtacctgatattttgtcgtcaaaccaaacgtgaaaagccctagaagaggcccatacgtgtagcctaccgctttaaaaagagacgatattacactcgaattattcaattcccggaagagtacaaccacgaaaatcattaataacgaaaatacgatatgcaccccgatccgctttttcttctcctccttatttcccggatctattttcaagaaatcaatacagaaagaggtcgttaaagcagtcaatgaggaatcaaccgaagaataggccgcggcagttatacccaacaggaaaaacaaaccggccgtagccccgaaataattcagggaaaggaagggaaacacgtcatcagatttaccgggtaacacgataccttccctttctgcatatatgtaaagcaaggctcccagcatcaaaaacaacacgttcgtcaccaagaataaaaaagaaaatgaaaacatatttgtcttacaatctcgtaaggaacgacaagtcagattcttctgcatcatattctgatccaacccattcaggcaaactgtgatcgccactcctgccaaaaactgtttcaccgtattctgtcccgaccgccagtcaaagtcaaacactctggaaagagggctctcttttatagctgcaatagccgaagaaaaattgaaatccagcgccttgtttaccaccacgattgtcaaaccgacagagatcagaataaacacggtttgtaacgtatcggtccaaacgatcgtcttgatcccgcctcgcacggtataaatccacacgaaagcaatcgtgataaacacggtcagccagaaaggcacacctatggcatcaaagaaagccagttgtaacacaccgacgaccaagaataaccggaaagacgcacccaccaattgtgacacgataaaaaagaaagaacccgtcaaccgggccttctccccgaaacgagttcccaaccaagaataaatagaaaccagattctgcctgtaaaacaaaggcaaaagcacgagtgcaatcacgatataccccacgcaattaccgaaaaccaaggtcagataagtccaatgcgtgttaccgacctccccggggatcgagataaaagtcaccccggaaagcgttgtcccgatcatcccgaaagccaccaaataccaaggcgaattccgattcgcggtaaaaaacatctcactattgactttcctagttgtcacgaagccaaccaagatcaacaataaaaaataagccagtaaaaccgttaaaactaaactcgtggacacaggcactttcttttaattccacgacaaagatagtgtttattccggtatagtggaattaaatactccatgaaacaagtattttcgaatataagaacaggatcaaactggacaaatttaaagttgcagtttaaatttgtccaaaatacaattatttttctgatattcaaagaaatctattctattttattcctcgtaaatgtacacgacaaaaatgccattctattccggaacataaataatttcaccattttcaagttcatatgcgatacccaccttcttccctcgtttccccgattggttctgatcttcggaaggagtgtaccggttgatcttttcgccttccttggtaataatctccatgttctcctttcccggattcttcaccatcgtgaaatcctctgtcgaaagcatctccgtcatattataccttgtcaccaaagccaccatcagggccacagcaaacaccatcgccacgtcaaaaagattcgacaccgcactaatcggatccgtctcatcctcctttttcaataaattgcgtttcatttctgatcatttttctcgttcaacacctccaccagacactccaagttagtcatatcctgtaaataccagcgttgtttcacctgttgggtcaagaaaccgatcgcaccggccaccaacccgataaccgtcgtggcaaaagccacttgcatattataagccatagaagcaatatcccccgtcgacaaaccgaccagcgcaggtcccatcgggatcaaagttcccatcaacccgaggataggtcctagctttcccaatgttttagacgtggccaaatccttatcggcagcaatttcaaaattagccaaaagacgttgtaattgggctttattcttctgttcctccaaaatccgtttcataaacatcacaactaaagaatgattcttctccggcaaccgattggcaaaatcatccacattattcacgtgcaatttatccatttgctcccgaatcaatttatccgtcttacgaatagaaacatactggccaaagaaatttcccaccaataacaaagaacggaaaaacaataaaatcaacaatacaacaaccgggaccagtaacccgtttgagatccagaacataatatcagaaatcgtattcattatcttttcaatttaaaaattagtttccttttaattacagatataatccatcccgcaacagctcccactaaaaataaaatagtagatccggccaatgccgaccagtccacgtcactcacaccctctaccgccgttctcccatttaccgtggcaataattcctaaaatagcaaccaaagcattcgtcaggaaaaacaactccaaacgcaaatcctcttccggcaacagccatttgattaaccatcttcccaaagggataatcacgaaaacaaatgccccgaaaaaccaagcaattaatttaaacgaaaccccgggaaaagagaaaacagcttgcgtcagaccgaaaaacaagaccggaataatcaacacccccgggaaccagtacaacaggcgatatgccagcatcatacgtttcttcaccggagaatagttggccacgtgaactgccaacaggcagaatgccatttgcaaaacaatctccaaggttaacacgacggaagtatccaacatcaattgattgtcagacagccaatcggcaatttgagtttttgactgttcaatcgcgtaaggccacatcaggatcacgaagatcgcggcaataccggcagcggcccccaccgccaccggtttccagaaggtctgtttcaacaaaaaattaaaagcagtcaatagaatcagaatccaaacaattgtatccatgattatatatttttacgtcttcttctcatcaatacagccaaaccgaccaacacgacaatcacccctcccacaatcaaaggcgtgttcaccttattcgtatgtttttgcgtctcagaagcaatttcatccttcttcatcacaacacctttggactgatctgccgccacttcccgcacattctttatgctattctgatattgcttggcagcttcgggagtcgctttagacgcgataaaatcacgtaatttggcattatcgcatacaaacccggaacaagccggtttatatttctgaatcaaatccgtatgtaaattcgataaatcagccaattgctgatccgtcgccttccacattcccttacgcgctgtctccatcatcacggccgtgatttcctgtaaggctgccgggctctgtttctcgaagaaatcctgtacccccagattaaatttatccctcacatacacgttgtaaatctcatcccacatctcgttatcgatcaccgaaggtttcatcacgttccaaccgtatgtattacggacaatttcagcaaaaccggctgcagaagtcgcttctcccttcatcttctccttgatataagaagggttgaaaatcgtggttctcgactccacgccgatagcctctttcacctcctgcatcttattgttattccggttccggtagtcactgagataagcatccggatctttccccgtcacgttgcgaaccgtcaggttcaagcctcccataaactcgtacacgtgatccaaacttaacgctccccacgtgttactctgccggggttgaaccaccacgtccgtacgggtcaaggccgcctcgaaagcaaactgctggaatttctcccagttcttctcgctaccgtaataagcacccatgttattcaagtaggtggctgcaatttccgattcatcttcccaacggtctccggcatcaaccatcccctgtattccggttccgtaaccaccattcgcacccccgaagacccggaaagttgaaatctcacgggcatctttcggggaaatacctttatcaatcaacgtcttttccgcttccagcaccccggccgccacttgattctcgtattggtcattcttggctgctgcagccatctccacggcccggttcaccaagaaaagacgagaggcagcaatatcccgtaattgtccggaagtctgtacaaccacgtctatacgcggacgccccaaatcagccgacgggattaatttcaaatcactcacccgcccgaaagcatcccgcacaggttccactccaagcatatacaacacttgggcaatcgtggccccgcccgtttcaataaactctccggaccaaagcgtgtaactgacctttttcgggaactccccgttatgtcgtttctgatacatctcgattgtactctttgccaactgcattcctttttcccaagctgattccgtcggcgtttcctctgcatttatagcaaaaagattccgtcccgtcggcaaagtattcgggttcacgataggatctcccccgggagaaggagccgtgtaaccgccattcaaggcgttcatcaacgactccaactcaccatccggactttcctgtaatgcccgcttataattattcacgtttttcaacgtccgttccacttccataatagccaacgccttattcacctcttctttggaatattccttggctttctttcccatcatcgccttcatcatggcactcatatccgggtttcctccagtccccttgttccccggcatctctcccatcttcgcattcgggcctttttcaccattctcccttcccatagccgctttcattttttccaaagcctcttcgggcgctcccatcttttttgccatctccaaacgctcttcgggagtcttcccctcacccatctgtttcatcatattcttcatcattccggacataggatgtcctccctcttccttcttcacaggcataacttccggttgtttcgccgcggcagccatcatcatcgccatcatccccttaggagcattccggtcttgatcgatttcacgagcctgcgccaactcttctttcgtgatacccgccacccgacaaatgaaaccatcatccactttctcctgaccattcagcagtctccccaccaatcgcttggccggatcgagataacgctcggtaaaaatagttttccgtttcaacacatcagcatccgccttacctctcaaccgatctaacccgaacaacccgtaagctatcggatcggttgccatcgagtaaacagacgattcaatgcgggcagcctcgtatggaacccccatcgtgtacaattgtccggtaaccttctccgccgccaactcatccgcaaaattctcgatcttcaatatttcctcttccgtgtagggaacattcaacacgctatccaaccccaactcccgatgcattcccaaagaaacagctaactccttcaccgacaaggcagccttctccacctccttcaggtcagccgtacctttctccgggtaggctttctgattatatatctttattctttccgtcagattccgataaatgcccctcacgttactctccataaacgggggagtcaaataagattgcaacacgccatacccgcgacgtttggcaatcatcccctcacccacatcaccgatagaatagatgtaaagatgaggcacgctgcccaccaatcgatcgggccaatccaaatcacacaacgcagcttgttttttgggtgtaaactccaaactaccatgcgttccgaaatgaatcatggcatccgccttgaacccgtactgcatccacaaataagcggccacgtaggaatgaggaggtgcgacatccgtcccgtgtacaatctggaaagcattatccccacctccggctgccggctgtggcataatgaccacgttcccgaactgtatgcgggatacccctaacttaccatcggcagtactcatgtattccccgggaaactccccgaaagcagctaccacctcggcatatttttccggccgtaaagcctgtttcacccaactctcgtactcctcttttgaaatcagcagcgggtgactctctttcagaaaacgatccatcaccccgttcgcgtaagtaccgaacacggctccttccgccatgatcatcttctccaattccttggaatttgccggaagattctcgaccctatatccctcttccttcatctttttcaaaagattatacaacgaggggaccacttccattccggcagcactcatggcactttgtcccggacctttataatagtaaataacaactcgtttctcgctattcggcttttccttcaaagccaacgtcttctgaatattttccacgtatgtcttcaaccgtgaaggaactgcaaaagaatgacgcaatccctctttatcctcgtactgggcaaagagtgccgacgtccggatggccccgtcaatttcaggggtaacgatactctgtgacataaatcccccggacatccccatcggatcttgttcccattcttctaccagactatttacggtcaacggggcaaacaacaggatattacgttcctccagatatttcacgacctcatctcccagcctgccatgagccatattgataatagcatccgggctaatttcacgcacaaaatcaagcagacgccgtaaagacaaaaccgggtaaacattataccccactcgctccaatgtatcaatcaatcccgtagcatctgccatctgcccggtcaccacgatctttttcgccccctccttatataattgcttactcttcaaatacttctcgtactcttccacggaaataaaatcaagctcgtctcccggcttatccatatcgacatgatataacacatccgaagacctctcgatcgggactcccggttcttccacggaaatcaacttcttatccatattcttccggatatagttcagcatattcttgtaattccgtcttccaccgcttcccagataaccccgcaaagcgacttggtcaacagaatcaatcgtgcatatattattcgccggattcgtcgccattgtcgtgtacacgagtacacctttatctgccgctttctgtatctgctgccgctgttcctccacgacacgcagccccatgccattcacaaacaccatatcaaaaccggacaaccgatccagttcctccacgggtacctcctgcaatttaataaatgaattgtcattcgccttcgcgatacctcccatcgtaatcgtctggaaattcacgaaagcaatcttggtggttccgaaccagacgttgtacgcccagatccccaacaagacgataattaaaagacaccccaacgcaagccacttttttctcatcagtattctcttttatggattataattttaataaatctgctatattcaccgacaacgtcccgataaaaccgatccccctctgcggggtcaccgattgatcggctgtcacatttttatccttgaaatcaaacaggttatcaatacctgccgtaaaacggaaacctcttgggaaacgggcgccgagattcaaagaacagaaagtccggctctcatattcatttttcacgtaaccacccgcactattcttgtaccatgtctccaccgaagacatccaccgcccgttcaaggctgccgacaaagcaaccttcccgaacgtcttggaataatttgccgtaaaagtcaaactatgcggacgatcactcgccatattatacccatccacttcggaatgtacatcaatataagcataagcaccttttagggtcaatccatttttaaaacggaactgcgccatcacgtcaacacccgttcttgttgcatcatctgcattataatattgctgatctttcccgtccgaggtcaagcccaaagcgatctcgtcaaaaaatctcgtataataaccggagacggaaccattaaaaattcctttcgtcacctcggccgaaaacgttccttgatgactgatctcaggctccaaatcttcgttaccgtatatcatgaaaaatccctgcccgcccatatcatattcactatgcaattctttcaaagatggtatacgaaatcccatcccgtagccaccgcgcagcgtcaaaacaccatatttatacatcaacgaaattttcgggctggcgtggaaaccgtattttgaatgacaatccgaacgaaccccagccaacacgctaaacgaatcactcacctcataatcttcctgcaaatacaaaacatacgtctgggcatcaaatttcttccccgaaccgttatcaaaccaataatgttgcaatttctgcgtattcacttctatcccggccgtcaaggtatgtttttcatggatatacccggtataattcaaccgaacggtattggttaaatctccaaaaacctttttagaaggcaatgaagtggtataaacgtaacgcttttcgtaattctcaaacacatacgagaaatccagtatatgagaatcattaatagcataataaacccgaggatttatactgtaattggaaaagcgatccttctctttctgctccacgtactccaacacgtcattattataatatgtcccattcaatgagatccgaaaattctcgttaaacgtgtaactcaacttctgatttgcttgccaaatctcgaaaccatttacactggacatccctttctccgaagtatccgcaaccacggaatctctcccgtatatatccttataatacgaatactcgatttgcccttcttcatcttttaaagcataagcatcccgtttacggtaggaaagagatgtcaatgcagaaaaacgtccttgtttagtccccaaagacagggaatatttactctcatcattatttccataacgcacagaaacgtttcccgtaaaaggacgattcgcatctttcgtaataatattcaccactccccccattgcctgagaaccgtaaagagtagacatcggtcccttgacaatctcaatacgttccacattatccatatcaatcaaactataatcaatattattactggacccctctccggcaacacgttctccatcaatcataaataacacgtatcctccggcagatccttggaatttcaactccggcaatccggaaccatgggccagcccgaactgcaaacccggcatttcatattccagtaaactttgcaaatccaatggattcacctgtgctatatcttccgatgaaatcacgcgggtaagcaccggaacatccttcaacggtttcagcgtacgggttcccgtgatcactacctcattcaacgcgttattactcgactccaacacgaaacgatacaaactgtcaaccccgggggtcacttcccgctcttgcggttcatagcccgtgaaactcacccgtaacacacacttattcttcgatgacaacttaaaagaaaactcccctttagcatttgtcccggccccgaccaccgttccttttacccacacggatgctcccggcaatccctcgcccttctcatcggtaacaattccctgcactttaaaagaaggagcctcattggtacgctcatcagccatcaatgctgatgacaaaagaataaaaaacaatatcaacaaatcacgcctcataaaattctttttttacggaaaaaaccgtaagagaaagactgttcctcttacggttgataaatcatgaacaaaaattattttagaggaaactcgtaatcaaatgtagccgcctcattcttacccgtggcatcagacatatccgtgaaacgcaattttgcatattcgccgccggcagtcttcacaacaaacactttaccattaatttcataagaatacgggggcattgatccggtaggagttgccgttacccatttagccagcacttcgttaaccttcgtgggttgatacccaacaaaaccactcatcattcccgacatatccaccatgacttccccatccacatctgaagtgaaactttctccggtaacactggcagaagtaacactttccaaatccgtggtctgtaacatgacggctgccccaccattcgtttttatatcataccgatggaaagcaatatcccaatcgaaagaagtttcatcaccatccactccataagtctttccggtagattcccctgcaaaggttcctcccatattcatctgcatacctccatcttccatggcctttacattcatatacagagcaagactaaagtctgcatctttcgtcgtaccgattgttccgtttatcgacatataataatccgtcgtggtttcatcttccttttccatcgtaacaaccgacttctcacttgagatattccatacattcccctctttctttgcaatggcttttaaagaaaaactagcacccgttgtttctgttccactcattccaccaatttcacaagccgggaaggaaataaccacggtatcaccaacgccttcattaatcaccatcaacaaagaatcggtattctttataagagtactagaactcaaatctccgtaatacactcccgtcacagccccttccatactcttcactttcaacgttttcaccgtcttcccctctttgaaactaaaatatgaccaagcatcatatggatcacaatctacggtaacggactctccatcccaagaaccaccgttatcatcatcatccgtacaagccgcaaaacacgcaccgaacaacatgataaccacaagaaaccaattcatctttttcattatatttaaaaatttagtttaacaacgatttaatgtcgcaaaaataaagtagcccactccccctcacaatcccttaaaatgggtaaaaaacgccctttacatacttgattatagggataagatcaagacttgtttctttggttcttaccgacaaaatttaaaattagcatcgtacattattctccaacattaatatcgtatgatttttattacctttgcgattcattacgagaactaaaaaaggattaacatggaatacaatttcaaggaagtcgaaaaaaagtggcaaagctactggcaagaaaacaaaacttaccgggtggaagtcgatccttctaagcccaaatattacgtgttggatatgtttccttacccatccggggcagggttgcacgtgggacacccgctaggctacatcgcttccgacatctattcccgttacaaacatctgaaaggattcaatgtcctgcatcccatgggatatgacgcgtatggtctgcccgcggagcaatatgccatccaaaccggacaacatccggccatcaccacggagaaaaacatccgtcgctaccgggaacaaatggataaaatcggattctccttcgactgggaccgtgaaatccggacctgcgacccggaatactacaaatggacccaatggacttttatccagatgttcaacagtttttattgctacgacgagcaaaaagccatgccaattaccgaactggtaaaagcattcgaggccgtcggaacccaaggattaaacgtcgcttgcggtgaggagatggactttaccgccgaggaatggaaaaacaagagtacgaaagaacaacaagaaatattactgaactaccgtcttgcctacttggctgacaccatggtaaactggtgtccccaactgggaactgtgctggcaaatgacgaggtaaaggaaggattatctcttcgcggaggttatcccgtggtacaaaagaaaatgcgtcaatggtcattgcgggtttccgcgtacgcccaaagattgcttgacgggcttgacaacattgattggtccgactccttgaaagacatccaacgtaactggatcggtcgttcacaaggagcagatgtgaggttcgacgtgaaagactccgatctgaaattagagattttcaccacccgccccgacaccatcttcggggttagtttcatggttttggctcccgaatcagactacgtaaaaccgttaacaactcccgaacaggctgacgccgttgccgaatatttggattacgtgtccaaacgcacggaacgggaacgccagaccgaagtgaaaaaggttacgggagtcttcaccggatcttatgccatcaacccgttcaccaacgaggctatacccatctggatcagtgaatacgtcctttccggctacggaaccggagccatcatggctgtaccgggacacgatagccgtgactacgccttcgccaaacacttcaacctgcccatcgtacccgttgtcgatgacggggaaggacacgatatgtcggaaggctcctacgatgcaaaagcaggtaaaatgatcaatagcggcattatcaacggcatggaagtcaaagaggccatcgcctacattgccggagaagtagaaaaaagaggcatcggtaaaagcaaaatcaactaccgcctgcgtgatgccatcttcagccgccaacgttactggggagaaccgttccccgtgtattacaaggacgaccttccttacatgctggacgaatccaaacttccgctggaactgccggaagtcgataaatacctgcccaccgagagcggggaaccacccctcggacgggctaaaaactggaaaacagaagacggttatccattagaattaaacacgatgcccggtttcgccggttcatccgcttatttcttacgttacatggatccccacaacaataaggcattagttgatcacgaaatatgcaactattggaaaaatgttgatctttacctcggtggttccgaacatgccacaggtcacttgatctacgcccgtttctggaatatgtttctgtatgacctcggcgtggcttgtgaagaagaacccttcaaaaaactgatcaatcaaggaatgatccaaggacgttcaaacttcgtgtacagaatacaaggcacaaacacctttgtttccgtcggactgaaagatcaatataaaaccacggaaatccacgtggatgtcaacatcgtcaagaacgacgtgctggatcaagacgccttccgggcttggatgccagagtacgccaatgccgagttcatcttggaaaacgggaaatacatctgtggatgggctattgaaaagatgtcaaaatccatgttcaacgtggtaaatcccgacacgatcatcgaagaatacggggccgacacgttacgcctgtacgagatgttcctcggaccgctggaattcagcaaaccttgggacacgcaagggattgacggggtgtacaaattcttacgcaaattctggcgcctgttccaagtcggtgaagacttcagcgtaagcgacgaaactccttccagagaagagttaaaagtgctgcacaaaaccatcaaaaaagtggaatacgacatcgagaacttctctttcaacacgtccattccggcattcatgatttgcacgaacgaattgaccgccttgaaatgtaacaaacgggccgtcctagaacccctcgtaatcgctctcgcacctttcgccccacacatggcggaagaactatggagcttgttgggacacactcaaagtatcacgaaagagtcattccccaaatgggaagaaaaatttctagtggaggacgcttttgaatacccggtatctttcaacggcaaagttcgtttcaaactatccatgcccttaacggcaaccaatgctgatattgaggccgcagtcaaagccgcacccgaatcaacgaaatggttagaaggaaaagagatcaaaaaaatgattatcgtcccgaagaaaatcgtgaacatcgttatcggataaattaaagtaaaaagaggagaaatctcctcttttttactttaattatttttagcattagggacaatgaataacacgctacacgtcccgatcacccccaaacccaaaagcaacaaacgcacatgccagttctcgaaaaccacgaaagccgaaatagaaatcatcgtccacatacacactatcgacaccgcttttgtcttccacccgacacccttacgttcttgaaaacgccttaagtaaggccccaaccatttcgaacggtgtaaagcattatgtaatcgtttcgaactattatagaacaaccacgaactcaacaacaaaaagggtgtagtcggtaacccgggaacaaaaatgccaataatccccaaaaccacggaaatacaaccgatgatgatatatatcgttctcttcattcgcacttactcttcctcgtcacccggcataaaagcctttaccaccgcctcgttatactgcgtcaacttattgctcttgtgaattttcttcaaaaccttccggtccgttgaaggcatgaaatactcccagaacgttttcatcttcatcaacaactgatgatccccctgcaatcgttcggcataccccgcaagtaattcggcatgaaatgccttgaacttcctcaatcgttcctccccagcaagcacccttccctccacgtactcttgtgccaaggccgggttcgccaacaaacctctcccgatcatcactccctccaaacgagggaaacgctccgtcacggcttgaatatcctccaaggtcaaaatgtccccgttataatacaacggatgttcacacccctcgtaaaacgcctcgaaagcctccttatccgtctcccccttgtattcctgcacgccaacccgggcatgaagaaatatagctgccaacggggccgcgttcaacaagggcaataatttcaaacattcccccggatcttcccaccctaaccgcatcttcacggaacattgtatctccggaaaatccttcaccacctccagcaaggcctccaccctctccgggtgaggtaacaatccggcaccctttccccgtcgagaaatcatcgtgaacgggcatcccatgttaatatccacctgcttgtatccccgtccttccaacatctgcaagcaaacatccaactccgcaggctctcctcccaacacttggggaactagcaactccacgctattcaactccggatcgcaatccttcatatcccttgaacgaaacgaatcctccttctccacccggataaacggcgtgtagtaagcatccactcccccgaaaaacttcgcatgtatattccggaacgtccaatcggtaagcccctgtaccggggcaaaatgtatcttatactttttcatacttaatcattcattaaaagaaaacgccgcacgggaatttgccggattccttggaaagaggccccctcaagcgggtctaaagtaactacaattttcggataattatctctaatctccagtaaatttccatattcacgctcccaagtcttttgttccatcacggaagcggcgacttgaatatacaacttttcaccatcacgctccgccacgaaatcgacctcccggtccccgtcgcgcccgacatgaaccgtgtatccacgaaccatcaaatgatgatggacaacattttccaacacttgaccaatatcatccggacggaaaggtcgaatcacgtggcggatacccaaatcttcaaaataatatttctcccctacccgaaattgtttcttaccttgaatatccacgggacgcacccgacgaacaaaaaaagcattctccagataccctaaatactccaaaatcatcttaggggtcaaatcaatcctttgagacttcagatattcactaatactactcgccgaaaacatattgccgatcgtgtcagccaaatacacggtaagatcctgtaattgtctaacattacgaataccatgcctatcaacaatatctttcagaagaatcgtgttatagatacctcttaaatattccgacacgatcccctcgtcaaaaggtaagtttaccaaataaggaagtcccccaaatttataataccgggaaaatgtttcatcactatcctccaactggtggaattgcataaattccgaataattcaacccccaaattctaaattccacgtaacgtccactcaaaaaagtggctaattcccccgatagcatccgggcattacttcccgtgcagtaaatatcataccccccatcagccaacaatccccgcaaggccttttcaaatgacattatatcctgcacctcatcaataaaaagatagcatttccctgtctttccttccctgtgtttctgtatataatacattaaatccgtgtaatcccggagagaatcaaattcaaataattccttattaatatatagtatatcagcgttcgcatttttcccccggatgtaatccattaactgaaaaagcataaaacttttcccgacacgcctttgccccactaaaacttttataatctgcgtgtcaataaatggttttattcgatccagatagatcattctagcataataatgcggtatttccatgtttcataattaattgttatccaaaattacaaatttcttttctcatacgaaaagaaatggtttcttttgtctcatttttttcgtacacgaaaaaatgccaaccttttggaacatatttattccaaactcacgtacaactatcaagaataatcattaactatgcctcaaaatttgtgatatgaaatttttactctgccccaaatgcggaatacgccgcttttacgtgaaagacgagaagggaaataattgtctcgtacaagtcacgaccgactacgttgttgtccccgtccacgagggagattccctagaaggattcgacacggaaaccctttattgtctcggatgctcgtggagtggtagtcctaaaagcttgaaacgttattaatacaaatacatcatcctatgaaacatctgacatttatactattactggtcatgacctgttcgctaacaaaggcccagcaagacgacagggggtatatcgtgaaagtaggcgaaaaagccccgaacatcgagttactgtttcccgacggaaccaagaaacaactaaaagacttgacaggaaaagtcatcatgatacaattcaccgccagttggtgcggtgtatgccgtaaggaaatgccttttatcgaaaaagacatctggctgaaatacaagaacaacccagagttcgcactcttcggcatcgacttcaaggagagcaaagaaaccaccgaaaagttcgccaaggacatcaagatcacctatcctctactccttgacccggaaggtaaagcattctacacctacgccgcacagggagccggagtcacccgtaacatcatcatcgacaagaaaggcaacatcgccttcctcacccgtctctacgacccgaaagaattcgaggaaatggtgaaagtcattgataaacttttaaaagagaaataagccgattggcttatttctttttctttgccggtttgcgtgccggtttctttttcttcttcttacctccacggtgttttatcaagaaatgcacaacaagaaagatcacaactacggcgacaaccgctatcacctgttgatttcttgtcggacgatacgaacctcccgaagcctgtcccccatcccgtgacacgtgcgaaagcgtgtccgcctccaactcccgctccaaatcatcgggtaattgagaaaagaaatcaatccccgtcatcttctccaccttatctacggaaacggcaaaactattcaagggacgcttgctctcctcgttaggcaacacgtaagcgatcatttgctgcttggcaggcgaataaaacaacttgtagtaatatcccggaactgccactttccccttgccgatcgcacctttattactcttgaaaatcggtcccgtcaccacgtacagcttctccttccgggcccggttacgcacgtgttcctccagctctttccagattccccggttaaacatcggcacttggggagacatattcgacatgtagaacgtctcgctcatcgccttcgcgttaaacgacatatcggccgcgggacacaaatgcccccggtcgtaaccgctccgcttgtaatcgtcgggcgtggcgctccagcgactgatcttcggatccacccggaaatcattcttccggctcgctttccctgtcaagtttgcggaacccaactcatagtacacccaattcgcttgtttatgctccttgttgaatcccaagcaataatgcttgtaatccacccgtatcccgtcatcataaaccggaatatagcgcccgtcggcaaaactacctaaggcaagaaacagaaacaggaggccaaaaatcagcctcccgtgtaatatactcttcatcaattattgtttaatcgcttcttgcaacgtgttatcaatctgaccaagaatcgggtagaatccctcgtcatctatcgtgtgacgggcaatatacgcctcgatccgagtacgcaaaacttggtaggactccttgattcccttctcgtcccgtttcaatccgcgacgggcagcataattcgccatctcgttcactaggtcaaatgatttcaggtaattctgaatctgcttgtaatccttcagattcgtcatttccggacgatgccgatccatgaaatcaaacgtgtactcgtacaagaactgggttctcgtcacgtcgctcaaataacgggaaaccccggtcgtgtccgccggcacgaaaacatccggcatgataccgccaccaccatacacggtacgcccgcccacggtctggtatttcaaattctcgtcaaaaacaatactgtctttctgtgagaactccccgtgaaccaaacgattgtaaaggtcattataatacttctctttcccctcgttatacggtttctggatagaacgtcccgaaggcgtgtaataacgggccaccgtcaaacgcaaggccgaaccgtcaggcaacatccgctgttcctgaaccaatcccttaccaaacgaacgacgcccgataatcaacccacggtcattatcctgtatcgccccggcaaaaatctcgctggctgacgcgctaaactcgctgatcagcacatccacgcgcaaatccttaaattgccctttgccgttagacttataatctgcacgaggttgcgcctgtccctgcgtgtaaagaatcaaacggtcggcatccaagaactcgttaatcatttgtatcgcaatcggtaacacccctccttcattctcccgcaaatcgataataattttcctcattccctctgccttcaacttcaccaacgcttgcatgaactcggcatacgtgtgcataccgaaagtattcgttttcaaataacccgtcgtgtcattcagcatatacgccacgtccacgctcttcaccggaatacttccgcgaaccacctctttcgtgattaacttcggctcccctcttctagcgatcgtcaactccactttcgttcccagttcccccctcatcaactcctgaatcttatcctgccccatctttaccccagcaaccaaagaatcgttcacccgcacaatccggtccccgtcctttatcccggctttctccgaaggtccacccggaaccaccttcacgacggtcaccgtatctaggtacttgtaaaactggattccaacacccccgaagtttcccacgatcccctcatttgcccgttgcatatccttcgcgggaatatataccgtgtgtgggtccagatccttcaataagaccggaattgtattctccacgatctgcctcgtgtccacggtatccacgtacgaattttgtatcatactgataatcaaatccagcttacttcccgtcacgggcaaaaacatttccgaggacgctgacacctgtgtacggtccggcaagaaccggttcaacatcatcccgaacacgatggccaaagccagcacgatcggagtcaacaaagccctcaaattactcttattcattctcttccaatttaatctttattttcctgattctcgttcaactcgataaacgccacgtcaatcccggctttctgcaacaactcgatcccatcaacactccggtaattctcggaatacaccacccgccggattccggcctgaatgattaacttggcacactcgatgcaaggggaggctgtcacgtacaacgttgcccccaaactgctgttatttgacttcgcgaccttcgtgatcgcgttcgcctcggcatgcagcacgtaaggtttcgtcttattattctcgtcctcacagatattttcgaacccggaaggcgtcccgttatacccgtcggatataatggcatccccccgcacaatcaacgcaccaacctgccgacgttcgcaatacgaattctccgcccatatccgggccattctcaaataacgctcatccagtaactgttgcttcgatttactcatttatcctttcattttattttttccgattcccgatcgcatccagtgtctcgtagaaatcaatttttctttctctcgggacatcaatcttatccaaaatatcccggctcatcttcaaatatttatcaatcgccgcgaaagcaagttctttaatacccaaacgatcgtagattcgagtcaccgccttgatcttctcctcgtggtcaaactcttttcgttcgatccatccccacaactcttctttcgtctccggatcggccagttccaacgccttgatcaacatatatgtctttttattggcaacaatatcacctccgatattcttcccgaattccgccacgtcaccatacacgtccaagtaatcatcctgcaactggaatgccagccctaagtatcccccgaattcatacaaagcgttatactcatgctccggcgcatcagccaacaaagctccatgccgtaaactcccggcaagcaacaccgaagtcttcaaataaatcatctcgatatattctttctccgaaacatcattccgggtctcgaacaacatatcgtattgctgaccccggcacacgtccatcgccacttggttaaagaaatcaatcgcccggcgcaaatacttgtcctcgcaatgctcgatgcactggtaggccgtgatcgccgccgcatcgccactcaggatggccacgttactattccactttttatgaacagtcagccgtccccgccgcaactccgcatcatccatcacgtcatcatgtaaaagcgtgtaattatggaagatctcgattccgatagcggatttcagcaccctatcaatatcctcccgataaagattatatgccatcaacgttaaaagaggccgcaagcgttttcccccgtcttccagaatatacagaatcggttcgaacaaggaatacggcttctgtatatactctttcttgtctaactcttctttgataatcgctctaagttcatctatggtatacatatccgtcacattttcaaattagttcggctaaagtataaaaaaagcgccaacaacccatcatctatgcaaagaaatatctttttcccacacagatcccttttttctctcagcgtgaaaaataaaccgattttcaaaccttcacccaatcgcagaaaaacaggtctaatttcaaattattgattcttaatgccgtaatcgtcatgatgaactcccggataacactcttaattgataaacaatagctgaatagttccggatgactttcgtgtaaagcgctattagaacgctattaaatccctattaaaacgctatatataatag

SEQ ID NO: 15 - DNA, 23838 bp, Butyricimonas faecihominis
ctaattaccaataacatcaaaaaacttttcattttcattctattaaaatttatttttctctatttatccaataactcatcaaccaacgcttccaatttctcccgaacaaaatacccggaggcaaccaaccttccctcctgatcgatcaacacgaagtgcggaataccttccacatcgtacaaggcacttaccgtacgttctcccccagagtgtttttcgtccctcacgtgaagccacggtaacttttccgcctccaaggctttttcccaagcatttttatcatcatccacactaattccgagaatttccactccattgtcatggtacttttggtaaaactctctcatccaaggaaacgaagcacgacacggcccgcaccaacttgcccaaaagtccaacaacaccacctgtccccgcaagtcaacaagcgacatctcctgtccatcagcccgtgccaacgtgaaagcaggagcctctcgtcccggtgccaaacgttgacgagtctccaactccttgcgtatagcggtcaacatctcgctattcctcacggtctcgtcaaacaatccgaaagcccgctcgaattcttccaaattcatcccgtcgatcatgggcgtcaggtagaatgccgccgcttccaatgacgggtgagcagccatgatcttcaattgttcctcgaacaccaaatccaaatagcgctcctgcaacgcttgcaacgtatccgccctcaaataatcctcttcagtcaactctccattctcatccagcgaaacaaaccacttctccaaacgatcgtaatctttgaactccggtaacttccgaatggccacatagatctcatccaaaaggttgctcacctccgtattctcaccccctttagtcgtcatgtcccgaataaaaaagttacctcccgcatcccggtcaagatttgcccagtctccttgcaactcgatctgactattctccagtaccatgatcatattcaaaacatccttcctctccggaaccacccgtaaagtacacactgccacgaaaggtgtcttaccttcaaaacagaacgttccccccttcatatcaaccgtatcggcaatgaccagcttgcccgtgtgatcctgcaccaaaaactctacatacccatccccagcacctttcaaactaccttttacaacatacccctcccgtgtgccgcaagtcataagcaggcttgcgagcagcacaattatatttattttcatatttccttgaaatctatctatacattatctccaaccttcattttgctcccagcccatcatttccgcttcaaaagagtagaaaggcaatgcccaacgtggatcatccggggctatttccaattgggtacgagtactcaaatcggcaggatccgtcaaaatctctcggcgcacataaataccggcatcctccgccccgttcagacgcttgacatcatagaaccgccaaaaagcacccatttcccgcaatcgttcatccagcacgtcctgcacactaccggttaccccggcctcggcagacacctcatccatgaaacgagtgtatctcaacgttcgcaacgtctctgccgccgcacccgtattgccactccgagcctcgcactcagccttgatcagatacatctcggccgtggtcatcccgataagcgagttaccggcaaaacgtgaatagctatacaaattccaaggcttcaaacgttgccaattttcatgagtgatatattcggtccatgtctctggatccaattcgacaagattagcataagccatcaaaagaggcgtacaagaactatagaaataaatccagcgggcatcattctcccgatcccaaagctcataaaaagactccgatatcggacaagttccccctagcccttcccaagacacgttgggtaagtacaactcttcatacttggctaccgcctccacatccatatcgtccaactcaaacatagaacttataacaatctcatccaccggttctccctcttcatctaacacactaatccaactccactcttccaactcgtactccggttcgtttttgaaatccactagaacattatgggctttcaatgcttcggtcgcattcgccaacgccaactcgtaattcccccggtacaaggcaacccgcgcccggaacgcttgcacggtcggtactgtcggacggaaattacgtgtctgatcaaacgtcgtacgtcctgctctcgttaatgcttcttccgccaaccttaaatcttcataaatatgctccaacgtgtaaccaacagtctcccgtcccggaatctctcccgccttggcattatcccgataaccgatccccggtttatcttcatcccacaaacaatattgcgtcaacaacataaagtggtaatacgccctaccgaaacgggcctcaccctccacttgatcgtgtacagccgctgtcgtctgcacgacctcatccaaatactccagcaccgtattgaaacgataaatccgttcccaaaccggagtccaagtccataacatccagtccgaagtcatcaacgtctccccttgccaacaatacgcctcgtaagtcgtaggctctcccgacaacaacccgtacacgtaaaactccggcgacaactccaccgcatccgacagtggcagcgcttccgtcaagtaagccccggaagaagatccttcccccgtatccgagtctatattttcaaacaaataaagatcaatacttcccatcaacccgtaaagctgatccatatggtaaatgtaagcactacccgacttgtccgttgtctcatccaaaaagtcactacacgcccccaatatcatggttcccaacaaggcgataattacatatatctttttcatatttcttattgttttatccattcataatcattctaccaacttttaaaaccgagtctcaacccaaatgtgaacacgggtattggtttcaaacttccaataggataatcgggatccatcttcccgttagcactccaaattagccccaaattacttgcttgtgcgtaaatattcaccctactgaacaccccttgtttcgctaacaggttttccggtagatcataccccaagaacacttcattcaagcgaatatgatcacctttcacgaaactgctcttaaaatacatcgctgcccctattgtggccgaatatgtttccccactccggaatgcgtccacgttactatccgtgtaaagcggcaactcggaataagacgtctgattggtatatccttcgtcatatacctccaaagcccggttcaagcgtttagaataggctgccgaatttctactatcgggcgaaaaactgtcaaaagaagtcgtactgacataataaccaaactgccccgtgatcatgaaagagagtgtcaatcctttccagctaaactggttactaaaactcaatgaactcgtcggggccaacgttcccaaataataagcccaattactatcattaaacgtctctccttcccgaggtatcacgaaatccatcacgtgcgaggaattataatccatgatagtctctcgtgtaccgtctttcccttccagcaacacgtatccttcctgcgtgtaccccaccgctttcagcactcccacagaaccgatcgggtgtcccaccacgtatgaaggtcccaccggcatataaggccccgtgtaaccgaattttttcaactcattatgattataggaataattcaacatcccgctccaactcaaattccccgctaccggaagatccgaaccgatagtaaactcgattcccctgttcaatatctctgcattattcaacaacatggatgtctctccctgtgaaatcaccggcaccgtcgtgttcgccagtacatcgtacgaaaacttgttataaaactctatgctaccgctcaacttatgcccgaaaaacgccacgtccgcaccgatattcagtgtcctcgacttttcccacgtcaacgtgttgtttccgcgtgccgcaatcgtattaaaagactcgttaccagaataaaccaagctacccggatatacagccaccgtcgtcacactggacgttccctgtttaccggctgccacacccgcaataccatatgatacccgcaacttcaactgatccacccaagagaccttttgcatgaaacgctcgttcgaaatcaaccaactagctcccatcgaccaaaacggggagaatttatcacgcacgtcttccgcttgaaaattggacgcatccgtacggaaactggcagtcaccgaataacgatcgtcataagtgtatgacgcattcgcgtacaccgagaaaaaacgatcctccaatgttgacagacttcccaatttttcgaaaggcatatactcggataccccgaaaatattattccgtttcgtcacgtaatccaactctgtcaacacggaattagtgtatttgttatacccgtagcgtgtcactttcggatccacctccgtcgtggcggaaataacctccgtccccaccaaggcattgaacatatgtttatcttttatcatcgtatagtccacctgcccgcgcaaattataagcctcatacgtgtgtccctcgttggaaaacacgcccccggtcgggaaataagaaacgtacctcccggactctaacggctcggcatacgtgttatacaaatttctcacgtaaaacgattccggctcgtaagacacgtgcttggtatatcttcgctgttcatattgtcccttggcactcatgttcaatccccaatttgtccggtattcaaaacctccctgtaccctgtaattcatcgttttcgaatagttatccgtgtatttccggtcggcagcaggattgtacgtccagtccgtcggagtctttcctgcataatattcccccgacatcaacaaaggctcatataccgtctgagaggttgccacgtgtacgaaatttccctcgtcatccgtcagtctcgtccacggactaagccacccccgcatactttcaatgctcgtcccattgttctcatcccgatcaaacatagtactcaccgcaaactcgaacgtcaagttcttcgtcaaccgggcattactcgccaagttcaacaacatacgtcgcttgccattttcttgcaagtaactatcttcatcatcataagaagccgagaatgcgtaatccaacttctccgaacctccccgcaacgacacgttatattgctgacgcatcatccgctggaacatatactcgttcaaatcatctttccacacctcccggtttcctaattcgataagctcctgttttttagcctcataatctcccgctgagagattctttttattatcccgctcgtacagcataccgaatggagccgacatatatcgcctccgggaggaaagtttcgtgtaaggatcattacttgcaagattaatcggattatatttatgcatcaattcctcgaaacggaattgattctccgccgaagccatattgaacaaatagtccaaatctgtccgtgaactcacagaccagtacgcatctgccgcaatctccaacttactccccgttcgtccctttttcgtggtgatcacgatcaccccgttggcagcacgtgcaccgtagatagaagttgccgccgcatctttcaacaccgtcaccgattctacatcattcgggttaatcgttgaaaatggatcgctatcaagcctatatccactgatcgggaacccgtccaccacgatcaatggatcgttgtccggcttaaaattagcatttcccatagagacttgcgatatggtaccctgcccccgaatagcaaaccgcacctgcccatccacgggggcgctgactactgttaatcccggcaccaacccaaccaacgcttgtgcaagattggacgtcggtttcttctttaacgtctcctcatccacgatcgaataagcccccgttgcccgctccttggcaatcgtctggtatccagtcaccaccacatctgccaatgcctctctatcctcttccagtacaacttcaataaattccttatcggtcaccgaaatctcctgctttttcattcccacgaaagaaaacacaaataccacattcgactgctccgcaaatgacaacgagaatttaccgtcaatatccgtgggaactcccagagtcgtaccctttatcaccacggaaactcccggcaaaggtatcccggccttatccaccacacgaccggaaaccgttatctttttcactttttccaccgcctcacttttggccacgatcgcaatcgcattcccttcaatcgtgtaagtatatggcgtaccggataaaatcagatccaacaccttttccaccacttcatccttcacgtttaccgtcaccttcttcatttgatccatctgatcatcactatacacgaaattgtaagtcgtttgtttacgaatttcggcaaatacctgctttatttccgcatctttaagattaattgtcacccgttgcggggaccccgaattggaagatgcccaaagtgttgttatcgaacacaaacccaccgccaacaacataaacactctgcaataaattcccgaaaaagcttttttttctcgcaaatttttcatactcttgttgattattaagatgtttaaattacctaaacgacagagtttaggcgattaatttattggacggaaagtgccgcgaacactttccgtcttttctatttagaaactataattctatttccttcaaccttgaatttcaccaaaagagtccgttgcaacaagttcaacaccccctgaaagttttcatttcgatccacccgtccggtgaaacgttgtgttctaacctcctcgttctcaaacaccacctgtacatcgtaccaacgactcaactttgccataatctgttccaaagtctcttgctcaaaagaaaaatacccctctttccaagcaacatatgcggccgcatccacggtcttcacttcacacactcccgtggatacatttacttccaccatctcattcggccgaatcatctgctccacactcggattttttaaagaacttacccccacgcttccactcagcaaaaccgtttgaacccgctcattatcgtacccgttcacattaaaatgagttccgtaaactctcacgtacacgtcattcacctgtacttcaaaaggttttgcatctttagccacctcaaaataagcctcacctttcaacttcaccgcccgaagcgaatccgtgaaacttaccggataactgaactccgtctcagcgttcaaccacacgatcgtcccgtccgccagcgtcactcgatattctcccccccgcgggattatcaatgtatgcagtcctgccacagcttgtccttttcccccggtcggctggttgtaaacaatcgcgttctcctctgaagtaatccttccgtctgaaatcttctgcaataaacctccctgctgctccaactcaatgcgtgttccttcctccgtcaccaaaatcggttggacctttccctttacagccaacaccatcgttttctgagatgtttccgacacacctctttcttgataccaaaaataaatccccacggtcaacagaacaaataacacagccgcatatctcgtgaaaatgatgaaatgctttttctgttgctcccgttttcctttccggatcaatgttacatattgggcaagctcttcctcgcattgctctcctgacaatccggacacgccctctgaaggatcaaaaccgacaatccgatcataatatctccggtgagcggaagactcattcaaccacgtttctaattgtaacctttcctccgtggtcaattcctctgtcaaactgcgtttgatcaacgtccattccaaagattcatcgtttgatttttccatagctctgccttaatttattcctaagacgcttgggaaaaacaaaaggttaaaacgaaatacaaatattttcaaaaaaattaaaataatttctccaatcacacaccaactaccagattatcaaaaagaacaaacgctttttcagatctggcaatttctcacggatcatacgaatcgcaccattcatctgcaccttggcattattctccgtaatccccaattcctcggcaatctctttgaatttataaacctcaatcacccgcaaacgaaaaacttccttcatcttaggaggcatcctatccaccacgacctgcaactcttcgagtagcgaagaattctctatcgcatccaccgtatccgaataaagatgagcctccaacaaattctgattatacgaatccttgatattcaaacttctcaaaaaactcagacaacgattgcgagttgccatgaaaagataagacttcaccgaggtagtgatattcaattccgcactcttctcgaaaatatccgcaaacaacccttgcactatatcatgagctgcatccggatcacataaataatgggcagcaaaacgatacaaacgattataatattgcctaaacaggaaaacataagcttcttctttcctgtccttcaattgtctcaccagcaacacatcatttgaatccatgaactaacacgtttactgaaaacaaagttattgaaatattctgtttagcggataatttctacaagtttttgatttgttatcgaaataatatcgttatgtgattactactatcgaccaacttcaccttgaatcaaaaagaataaaaataaacagcgataaatttcaccatagtgaaatttatcgctgttcattttgtacacgcttttatttcagcatttccttcaacaatcttcccggctggctagcctgtatctttggggtcaaggcctcatatgctttcttcccccattcagaagcttttttcacctcctccatcagccgcacgggaacatacaaatcgtccggatgtgttttcacaaactctaaaagatgagttcgccaatttgcactagcatcccgaattacctgcccaatgaacccctcagcctcctcgatttgctcgttttctatcatttcataatatttccccaatccctcattcaccaccatatcaaaactctcgtagtgcaattgatccaatgccaaacgagttttcacggcatccgagcctttcaataacttggtatccggttccagataatcaccgtaaagcatcatctccctgccatccagcacaatcgcaaatcgagctcccgccacatccaacgtataaagtccgggctcatccaactctcccgcaagcgtgaataacccgtccttcatatccgtcgtcaataacgctcgtacactatctactggagaatacaaacaaaccttgccatccttcacatttataatatctcctttcagtgtgaaagaatacttctgagccgaagcggcatgtgccataatgctcaataatataaataatacaacttgtttcattaccagtatctttatttcaacaattcattcaccttatcgattaacttctgatctctcaaattcttcccggcaatccggcctttctgatccaccaccacaataaaaggaatcgcctcaatccccaattgttcggcaatcatcgatttaaaattctctttcaaccaataacttccccaaggaatttgttcttcctcgtgtgccgggagccaagccttctccgtgtaatccaacgagatactgataaaatcaaccgattgtccggcatacgtcttgtacagctctttcaactgttgcatcatggcacggcatggaccacaccaagaagcccagaaatcaatcacgtacaccttcccgtctccaaatttcaagtccaccatgttccctttggcatcctgaacggcaaatgtaggaaacgtcgcacccacgacagtatgtgataagttatcaagtttttccttcagtaaccgtcccggctggctagcctgtatctccgggctcaacaaatcataccctctcttcccccaatcgtaatcgtactcggacaactgatcttctataaatacaggcatatacaaatcatttgcatgctctttcacgtaagccagaatcgtctctccacgttcaataaatttctgtccggcaagcttttccaactcggcctcttgctccggagataaattccggctcccaaccttttcgtaatactcatcataaagagccctcgtcggtatctcgtacgtctcccgaactacccccaatatatccaacatactcttcgttcccggagaattttttacatatctcgcatctaccatattataatccgacggccaatacatatccggtgcatccaacatgactttcactttccgttgatttcccatatcgatagcataatatcccgggccgggaagagttccttgtaacacaaattttccgtctttcattcttgttgacagcaacacttcatcttccggggaaagcacgttcacggttgccgtatctacattgataaaatcccctctcaacttaaaagtaaatcctttgggttgttccgcacacgcaattaaccctattaataacaaacttatcagtaatctcatcatcatcatcttttaatcgttgtccttcaccattttttcaatatcccgtaaaactctgtctttttcgtcccttcattagcaattctcacggtagccgtccccttcttgtgaatacattgacgatcgtcacacatttgccactcgcaatcggccaccacctcgaaagccgttttcggcaatttctctacccgaatcgttaccaccacgaaacaaccgtggaaataccccatcttatccataccctcggaaagcttcaccggtttctgccattccactttttcaaccttacatccctccggcacgttccactccaccctcgtgggcaaatacccgtgtccttccgggttattatcatagatattccatccctcttcaatactgaaataaatccccactttcaccacgtccccctctttcaccgattccaaatcggaacaggcatatatcctcacgtgctggtgattggtataattcattgatttcatgatcttcatcacctccttggcattcaaagccacgtgttcttgtgcttgcagcaccacacccatcaagcataataccgccaaacaaatccattttttcatatatcacctatttcctataataaacccaaataataccattcaaattcgtacttccaccggtcaactcattcatgatccgttgcattaaaccgtcgtactcgttattcgcagccagccacttttcgtataaatccttcgggattcgactatccggttccgtataactattttcaggaatattatccgtgtactttcgcatctttttcaccagcgcatccaacgttttcctcggtttcacccaacgctcatcctttatcaacttttcaaacaaatccggagtcatctcacatccagtgttctcccatacttccgttgccaacaccaaatcctccttcccatcaccgtcataatcgtaaatacaaatcttcggcttatcaccatgcccttggcccggttccagcccagcactcacctcttctggacgctcaaccaatatttccggctctgcatacgtcccgtcacccagatttcgacaccagctcacgtttccgccataaccggccccgaacacgatatccaacttcccgtcaccatcccaatcatacaacacggcatgattcactccaatcttttcttcacctaaattgcaattcatccgttcaaccttctcaaaacgaaagacttctttcgttcccgtgttacgagcccaaaataaaccatcgtataaaccggcaatcaataaatcaattttcccgtcaccatccacatctcccggaaacaccgttgaggcattcccgatattaattggtttcccatccgccaacttgataattacctgatctacatattcgccattagcaccctttttccacatataaatatccccgggataacatccagaaaacaattcatccacgccatccccgtcaatatctgcaaaagccggaaccatgggtacgcaacacgtgatcggcacgtacaacggttgaccgttcgtctccagccatttgaaatccttatacacagggcattcttttgtcccgtaattcaaatacacccggcaacgcccctgcacgaaaggtttcttttccttaggatcttgtcccggacacaaaacctctccaaattccccgacaaccagatcatcctttccatccccattcatatcataaaacgtggcaccacaacttcccgtgttaatcttcaacacggaagaatctgacatgtgtaatatctcgtaccgggaaaaatacttctcgtatttcgcctgcccgtaaccggaatgccacccaatacataccagtacaactaaacttaaaacatacttcataacatacaatttcttgatctagtgattcccgactccataatttccacccgccacccaacaagtcaatgaatcattaaatcggcaatcactaaatctgttttactttaaattttaaactatcacaacttcgtgtccctcgggtaccccggattttgttgcactttcgtgttcaaataacattcttgatgagggatcggtaaaatccgactaaaattgtccgccgcaatcgtctgaaccggctcttccgtccaagtatcctcttccgtataataccggacaacaggcaatcctttccgcagtaaatcagaagcacgatgcccttctccggccaattcccgatggcgttccatcaaaatttcctctaacaaagcatctccggtaagagtattcacataggtcacgtctgccccggaacgactagccacttccaacaaatctgcccgtgccagatcatattctcctaactcacaataggcctccgcccggttcagatacacttctgcaattcgtaatgctttataggtcaaccggatcttatcaaatttagaaatctctattaatacgagattcccctcatcatcaaacatataatcaccattttcatccaaggcaaaatcaatatcttcgacaatataactatcaaaacgataatctccatcatggaaaatatctttaaactgtccggctggttgtccgtaagggtagtaaaatccggatgaatagtacgagaaatccaacgtaaaaatctctccttcaccattaatttcctcaaattgtccagcaggatctgaagggaattcatatttaccaatcagtttactagcctcttcaaccaccatatcccaatcattcataaaaaggtacacccggctcaaaagagccgtggcaccatctgctgtgaaacgagccggtccatcctcctccaacgtcatcaaatcacgagctcggttcaagtcgctcacgatcgtgtcgtacacggtcttcacgctcgtacgggcagcctctcccaaatcaaattttgttttcaacacaattcccagattcgtctccggctgatcgtaatacggacgaccgaaataatttaccagtgaaaaatggtcaaacgctcttaacgctaaggcctctccccgtacctgtctccacaacaccgtgtccgtaatgacacatttatccaacaagttcaatgtttgattacaaatggcaatagattcataaaaaccgccatacagtgaactcacattctgattcttgtacataccacttgcatccatctcataaaaatcaatggcctgatctgcagattcgtaagccggaattatatcatcagccaatccccgatcacaatcaattttggcactaatcgcatcatgcaactcgtaagcagctataaaagtctttcgtacatcaatcacattcttcaaaatatcttcctccgtgatctctgtttccggcaataatgtcatgtcacatcccgcccctaaggccagcaacatcatgtaatatatcaatcgtttcataaacatatatttttacaaacctaaaacactaaattaattccaaactggtaattcctccctgccggcacggacaccccattcgagagaatagacaacattcctgattttgcatccgggtccaaattcggatgatcggaataaatgtaccataaattattccccctgaaataaacggtcgcggacttcaatattttgcccatccacttctccggcaaatcataagacaagttcatggattgaatacgggcgaagaaaccactgataatataacgcgtggaactctgattagaatcattattcccgtaacgcatcggcttcggacgggaaaccacatcccccggtttctgccaatatcccttcgccgcatctttcaaataaacaccaccaaaattagctccgtcagaatccgtgtacccctgagccaagttgtccatcatcgtcgtgttagcgaatataatattcacgcccagatttatgccattccaagagaagaaattgttcaaacctccccgatatttgtcttcacgggaaacaaacaccttttgagcagaataataatccgttgtcgtgttcccccctgtgtcgtaccataacggacctcccgtctccggatccaccccggcccattccggaataaaatagcactccatcgtctttcccaccttagcatagaacgtgaaatcctcgatctcgtcaaccccattccgtaacttcaacaccttgttccgattcaaactgatattgaaattcgtggaccaacggaatgctctccggatattctgggattgcacgaaaacctccaacccttgattctgcacgcttgccgtattttgcatctggctatctatccccgcggaaagaggtaaataaaacgtttccaacaacccggtcgttttcttgtaatagtaatcaatatttccggacaaacggtctccaaagaatccgaaatccacccccacgttatacacgtcggtcatttcccatttcaaatcctcgtttttatagtgatccatggaataagtcgggtacttatccgcataattataagatccatttttatataccgtgtaatgcgagaaggaactaccgaaattagcatttcccaccttaccgtaagtagctctcaatttcaaaatatccaaccaccccacgttctccataaaagactcgttcttcatattgtaagctaaccccacggaaccgaatgtaccccatttattatttcccccgaaacgagaagaaccatccgtacgcacacttccggaaacataatatttccccttatatccgtattccgcttggaacacaattcccatgaaattagatttactcatatcttttttcggctcccctttatcaattgatgccaaattttcaatcagcaacgactcctcaaactctcctctaatattcgtgtaatcgtaatcctcgtattgatactccacggatgcgaaccctgtcaaagaatgattttcccaaaacttgttcacactcaacatacttctccaagaaaaactatttcgtttggaagaggtttcagacaatgaacctaattgcgaaaaatactggtcatgtttcgttctcggatcttcaaagaacgtgctggatgtattcgtcacctcatatcccaactgtgagttccagttcaaaaaaggcaataattgtatatctgccgtcaagcctcccgaaaaacgataattcacatcctcgtcatgattcacggaataatcaaataaaggattcccttcattctcttcaaactgatcctgcgtgccatccagtaattccccggtctccggatcataagcgcccgtcaaaggagacattttctgaattccctcgtataaacgatcggcagcattcgtattcttggtctccgtacggtaggcactcgtgttaaatgaaaaactcactcgatcattcgcccgatgctgcaggtttgccgtcaacccgaaacgatccatatcattctttttaattattcccgcctgatgcgtgtatgatccttgaataaagaattttgttcgtgcatttcccccggatgctgacaagctaatatccgttgtcgaactgcctcccaaagcctcatcaaaccaatctgttgtattctctaacatactatcaggtctgaatttcaatgccttttctccatccactgtaatcttatcatcgtagtactcgttgtaataattcacgtacaacaaccgttcccattccaatgtctcccgcggagacatgaaatcaagttgtttacctaaatccaccacgccatacatagcatctaccttcacttgaaactgatcactcttgccctttttcgtctcgatcacgattaccccgttcgccccacgtgacccgtacaatgccattgcctcggcatccttcaacacggtcatcgtctcgatatctttcgggttcaacatattataacaggacatatcattcatgataaaaccgtcaattacgaataatggtgctgaagttccggtaatagtactctcttccaaacgattacatccccgaatttttattgtcggatttcgtccgatcaacccggattgtcgaacctccactcccggaaccaatccctttaaactctcgatcaaactggtcgcacccgtagcaaccaaatcatcggatttcatcgtctgtacggccccggcataagaagattttgaacgtttcatatatcctgttaccaccacgtcatccaaactttccacgtcctcttccatcgtcacgttcacagacttaacatccggagtcaccacgatctcacgtgatttcatccccacgaaagaaaccaccagtacatgcttgtctccgtccggtaatgcaattttaaatatcccggccgtatccgtgacaacccctaaagccgtacctttcaggattaccgttgccccgggaagtggttgtcctttttcatcaacgaccaaccctttcaacacccattctttttccacgatctgcttcacgggatttcctttccaaatcacgatcgttttctcctcaatggcaaaattcaatcccgttcctttcaaacaaatggccagaatactctccaccgtctcgtctttaaaagaaacatttttgcactttactccagcaatatccgcatcgctatacacgaaactgaattcagaatttttcttaatctcactaataatttgcttgattgacgcttcttcccacgtcatgctcaaccgtacctgctgggaataaaccccggcgtgtacttgcagcgcaaacaaaaccgataaaataaacgtcgccttcatcattaaaataagcttcattacttttctatgcctgtccatgcaggcataaagattttttttcataactttgtaattaagattcgacaataattcaattcctgtttgcagcaggattgaaagagtttgacaaggggcagtgtttgcagcactgctctttgtttttatttcacaataatcgtgtttttattcacttcaaacttcactttcccggttcgctcgataaatttcaacacgtgggcaatatcctcatgtttcttgatgttcaacgaataaggaatttctttcaactccttgttcgtgtaaaacacgtcaaacgaataccagcgtcccaattcctccagaataaattccaaaggcttgttatcaaacactaaacgaccatccttccaccccacatattgttctacatctacctcagccacggttaacctgtcatttccccgattaaaatcagcctgttgtccgggattcaattccacctgttgcccgtcagcctccacgtttacccgtccctgtatcaaagttgtcaacacgttctcctccttcgtataagcccgtaccccgaacgacgttcccaacacccgaacctccacctgttgtgcctcgacaataaaaggctgtttctcgttacgctgcacgtcaaaatatccctctcccgtcaagtacactttccgattctttcccctaaattgtttcgggaatctcaattccgattcggcattcagataaaccgtcgttccgtcagccaacaccaaagtatactcacccccgcgaggaacacgcaaggtatgatatatctcgcaggaatcttgcaccctacccgaagcaacctccgtgtaattcaacgtatcaccgctattcctcaccccctcttccaaagcccggtccatttcccgatccaacatcactttcgtaccgtcaggcaataccaactcggcgatagatacaccgggaacaatccggggagaaatcatctccggccccgtttcccgtgcagtatcccatgaaaaatacacgatcccacctaccagcaaaggcaaaataaacagagcggcataacgcatccataccattttccgagaacgtcgttttttccgtactgtccggcttaaaatccggttccattccagttcttgctgttccggggtcttcacgaaacgacgaattccactctccaatcgttccatggaaaccacattacgaaacaactcttcatgttccgctcgctcgtctctccaacgctttaactcatccatctccccctcgcttaactctcctttcacgtagcgaacgctcaattgttttatccggtcattattctgaatctccatattctgatattcattttatactaaagcacgcaaactttcatttggtgtaatacaaaaaccaattattttttactcgaatcaaaatatttttctaattataccctatttcaagggttaagtaacccttttcacaagattataatgccccatcgcccttccatctccctttcatcaccctttcatcgccgttcaggaaggacgaggaaaggttaaagaataggtcttgtaacgcccgtttggtagttaaaccctagtattacagtagtaaaaccctagtattagtaggtattcaggaaatccaagtaagtagagaaagaacgtttttcaaccgttccctcatataatgattggcattattcttatgctttttgaccgtgttgaccgatatattcaatgtttgtgcgatctcttcatgactttttccatcgaggctcatctggtaaacttctttacacgccgggggtaattcattgaagacatccgatagggtttgaaatatctccgattccagaatccgatccagaaatgactcggaatcctccccctctgttaccacccgcctagcatatttatcctccacctgctgatggcgcatcaaattgagacagtcattccgcacggctttatacaaataggccttcacggcatattccccccggaaatcagccctcttctcccataaatcgacaaaagcatcctgcacgacatcatcaatcatcgtatcctcgttcaagtacttcgcggcaaaataacgtaacgcaaccgcatacttgtcatacaggacacggaaagccttctcgtccccttgagaaaaatcaatgataatatctagctctttatcacccaaattgatattatttaaaacgacacaattcaactttttcctttccctaccgtttacaaagataaaacttttatttcagaacgaaatataaaaatagagagactcgatgataaaccttttctccctcgttttgtcttaaatgtaaatgcattttaaaaacgcatgaaatttaccggccacttaaaattctaaattccatgccattacaaacgttaataaaagaaagtatgaaaacagtaaccctaattatctcgtcgctttttcttttcatggcactaggagtaagcgcacaacaacacggcccacaacatcgcgggcaaagaggtcacatgaaccccgaagaaatggtaaaaaaacaggttgaacaaatgaaaaccgagttgaaactcaacgaacaacaagaaaaacaggtaaaagatttgcttaccgaaaacatcaaacagagaggtgagctcatgaaaaaatatcaaggccaacgggatcccgtgatggtcaatatgaaaaagatggaagagcagcaaaacctttccctaaagaaaatcttgacagaagagcaatataaaacttacttgactaatctggaaaagagaaaacaagaaatggaaaaacgccggaaagagatgatggataaacgtggcggacaaagaggcggccatggcgatcctgctactgtaaatgaagaccacgaatgtaacggttgcggtggttgtggcaaacacaagtaatcctatatatcgatcaaatcataaagccgaatcatttctgctaacgagaaaatgattcggcttcatttatgaataaaaatcctctactcccccaatttctgctctaaaaccttctgtacttcttccggcttcggattcacggcaagaatcgtcccgtcccgatcgaccagaaagacaccgcccccggcatttcccaacatataacgggtccacaatttctgcccatcatccagctcgaccagttgcaaccaagggtatttatcctgagcaatagcctgcttcatccgttcggtattcttgaattccctagcaacaccgacaatctcgaaacctttatccttatacttctcgtaaatcgggatcatcattttcgcctttgcccggcaaggcatacaccatgaggcccataaatcaatgatcgcaattttcccattgatcacctccggaacatttaccacacgcccttccaaatctggagcctcaaattccacgtaatgcccgcccggtttcacggaatgaaaaccgtcgattaacatcttgcccaaacaggtatatttactggatgcgaatttttctgccaacacgtgataagcattttccaattcatcgtccagctccgcctgatacacctgacgccgttgtaattcatccaccacaaggaaatagtacaactcatcccattgccccgcacagaatttatgcatgaaagaaaaacgtttccagccgatctcctgttgttgcaattcttggtatttccggtatctatcattaaaaacccctccccgtatctcgtagcttttatcggcattcaccgtgatatgcaattttccgttctcgacgataaacggaacagtgtaccacactctcggattcttagttacaaagatcaatttgtaaccctccacgtgcggtaattccaacacgtatttaaaacgtccatcctctaccggaacgtacgtcccgtggtaacgggaatccaccgtggcatccactaaaagtacttcttttgcctccataccgatcaactcgccatgaatcacgcaacgaacctttttctcccccgcaatagccagatttcccacgaacaaaagcaatatcaggcatttcaaataattcgtcatattttctcatttacaagtaaaaaaggagtcgcaagcgactcctcgaaactacattcatcactattttgtaaccggaaatccttcctgctcccgatccaaacgatacaaatgataaaaattaccgtttccgggttcataagttacgtttatcacctctcccttaccattatcacttttaacaaggaaaccatattcatccaacgcacaagaagtcatttctccattcaaattcaacgacaatgtccgggtgtcactataatttttttccaacaaatacccgtcacctttcaccgagatcaaagaaccaccggaatacgtgtacccacgctcatttattaaatcccaacttaactcgctgtgcttattcacctgataaatccgattcgtcacgattcgctttccatcatacacatattcatatttataaagcgtacgagtttcataatttttagcatcatccgggacaaatgtatcataaaatgaacggacatttacaattgaagtaccttccccatactcataaataaaagtctccttataatccagtgtataggtattatcaaaatcatcgcccaacccgaaatcggttttaggaatataataactaaatacttgctgtgtaaccatactctcttcatcaagagtcacatccactttgtacaaagttcttgctatcacgggaatactatcttccaaagaataattccccgtcccatatttttctttcagccacaaatccaaacgagcgatagaatcggcatccacgttatacacgtaatcattcacggcataggtaataacaccttgttctttcgtcactgaaagtcctccttttcggcgaccgtttttatcataacgactcatattttccaacttatcattcacgtattgaattttcaacgtgtaatccccccaatgatcgttatgtccggtaatttcgctcacccgaaccggattaatcgggcgtacccctacctcgatattatcatcgtcatcattacaagccacccaacccattgtcagtaataacaggcagatcatatttcttaatattgttctcataaatcgcttattttagttacccactttattataggccactttcgtaatccggccaaatccttcatatcttccgtgaatctcacgattaggttccagagttccactcgtcagtttgactataggaattgttagtactttcccctctccggttgattctttataagtcgtaataatcaacatccggtattgagcattttgcgtggtcatcccggtagaactcgtctcactactcacattcatccgaccatattccccccgccacatcgttagagaagtaatttccccgtctctttctctatccacaatataacggctctccgctgtcacattctgggaatcacccaaggctatcgtgtatatctgatcttttgttgcataataaaaatctgtcgagatcggagatgcagcaaaacccacggcttcgtttattccgggacagttcgtcaaaacataacgtcctttcggtaaattacttccagtatcttcctctttggtctgcatagcagccagccaataatcatttcctttttcagctttgaaaacagtcattaactgggcattttcaccctcacccatgtatatagcgtcatacgcacccacgttgttcacgtcaaacaacaatcccgggttctgttccctaaattgcaggaagccatcataacgactattgacttgaaggaatcgattcttgttttcatcaaaagcataaggtacagcatagtaatatgtcccacagacgatcatctggcttacatcatagtcagccaaatcaggagtgtacatgtaaaaattgtaatacaaattaccccaagatgaatttcttggatataccttcccattcacattcaagaattcaactccccaataatcccacaacatcatattcttaggctgaagatcaccgtcaatcggcacgaagaaaaggtcgttattcatttcccaatccgcaaactcgaatggatcaacccggtaaatatccttatctgtcaagatcgtcagtgtccgggaatcagatttcacgaacgattgcatatctttcaccaaaccgttcaggttatgttgattcacggaagaataaacattccgataaaaccgagtattcttttccaacaaaccacgagtaaaattcatagacataatcaatgacacatctcccgtctccccatcccgtgtatcggcaaccaacagtccctcacccaaagaactttcaactgtcacggatattcgggaaaattcctgaatgtcagtagtcttatccgtaaccgtcagaataagatcatacgcagtactattcggtgcagccgaaataggctcacggaaagtcattttattcgataatacggtctcaggatactcgttcccctgaatcttccattcgtacgtcaaattctcgtcggacaccccgttcttgtaaataatcgggttaatctccaacgtatcaaattgaaaaatcttcacggctgtttccgccccggcaaattcgatcacgataggctttatgattttaaaatctttggcagaatgatcctcgtaacaagacatcgccacgaaagccatgtataataataaaaatatcgatattcttttcattgttttcttc

SEQ ID NO: 16 - DNA, 23733 bp, Butyricimonas faecihominis
ttgtaaagcaaacagccttatatacaagaagaaggactgcctaactccaaacttggttaggcagtccacaccacatcgaaatacggtgagttaatctattataaacgtaaatacattatccaaacgatgggaatatccctcgttttctataataattgcaatacgataggttcctttgggagctttacaggcaaacggaagttgcattcgcccacctccttgcatcacaagttcttctttaaaaaggtctgcattaccatctgtcgaagttacatctgcaatcgaatacataataggttgtgttcccagaacaccctcgatcgtagaagttgaccaaggaatagcatcttcaatcttagttattaacccaatatattcatcacatatcggatcaatgtcatcgtatccttcatcccaaaacacgtccatgccattaccgtaaataccatccaactcatcataatgatagaaccattcatcaatctcacccaaccgggtatatatctcttccatccgccccgcatcagtctcttcgtccaaagatgccagttcctcctccaaagcatcactctccgcatatataccatccatttcctcctccaagacgttcaattcacgatacgccaaagccatctctttcaactccggcgggtactgtaattccattgcctcaatctgttcaagaatacttctttcgccaacatataacgtatcaatagaatacttggcatgttccgttttcaaataaccaattgtaacctcttgacaactagtcatgcacaaaccagcaaaagctatcaataaatatattgttctcatcgtatacactttataatccttttagactaaaaccataactcaaggcgtgtaccaccccgttattcatttgaatatcggttgacacacttcggttggcatcactattaccggagccatgtagatagatatacaaaccaatctctcccttttccgggatataattataatcctcccggtaagtatagacgaacatctctccctcaagcgtcttacaaactcttccttctacttcagtataaccaccccgaatcgcctccaaacgtcctctcggaatatcctcaaccaccaagcgttgagggataataagtcgtttcagtatgtgacgacaggtctctaccggaatatcccgtaccatcttccacggttttgtcggatgtgcctccttataatcaagcatatatgccaatatacttaaatttgtaatcccgaaaaaagtaatttgttcattctgccttgagccatcaaaatactctttcatcccggcgtgttcgatcataataatcgtggaatcccaatcatctggctgactatgcaaatattcccacacggtacaatcatgcttaccgtttgccaaaccggtatcaacatattggtaatccgtacaggcacccagaacaacaagagtggccacgaccaaacacctgaaaaatacatttaccttctccataaccaatatttattttgtgtcatcaattcattattattaaaagaccgttgagcaacaggcctatacaaagcgccattttcaatatccttagctgtgagttgctgataagcttccgaaagccggtctaaatacccgttacgaataatatcaaaataccgttgcccttcaccgaacagctcccggtcacgctcgttaaatatctcccgacgcaaatcctcgctatctgtcgatccggcatatggccccaatccggatcgttctcgcacatcattcaaatcttccacggctgtcgacagccccaagcgggcccggctctccgctctcaataatttcaagtctgccagtctccaaatcaccttattcccttccacattttgaacagctccttgatcaccttctattttagagcgaatcacatcatgccatttataaaagtaagcgtaatcggagatgactttaacagaatcaatcggattaccatcatcgtcacgtttcgtaattttccaccaaaatacatttcccaaatcataccaatataactctttacgtgcatcatcctcttccgggaacatattttccacggtttcaaccgagattcgtgccgccaaataacggggaaaacctgtttccgcaagctccgggctagaatcaaattccgggtaagtacacaataaaatccccggataaagatattgtagccatcctatttgcatataatccatatctttatcagaaacctctattgaaaaaatggtttcgtcactctctcgtacccttccaagcgtacgctctaacaacaaggcgatcgttggttctagtttataaaagccgcatttaccatcaatcacatccgaagcatacctttctgccttctcccaataactttcctcaccgtaaagtcctcccatccaagcatatatattagctagtaatgttttcaccgttcccaagctggcatattgctttgaggttaacttgttaccatacgaatcgaccaacttttcatgcgttggcaaaaccaacgctttctcggcacattcaatcgcttttcccaacacctctttcacgggactcttcgctaaaggttcggtagccgtggaattaggcggaatcggggcatctccccagttacgggcaatattaaaataacaaagtgcttttataaaattagcctgagccaaccagaattctttccgctcttctgtcattcctccaaagcggaaactattatcaattaacaaatcagcatgtccaatgatcgaataataacctccccaagacacgccttccatgatcgagaatgctgtcaaggccaaattcctttggtcttcattccaatattcatcacatggtaacgctgcaatatcaaatacatcgacgttcataacagatccccacatatcaatttccatcgccatcatagtcgtaataacagcttccacatcctgttccgtcttgaaataactataataagtcacgtcattctccgactctactgtcaaaaaatcatcgcaagcgaacaatggtagaaaaaataaatacatccatatcttcttcataactctttgtattagaaattaacactcaacccgatcgtaaacttacgtggtagcggataagatcccaatgcatcaattccgtcaaaaatactcacgatctccggatccaatcctgaataattggatagtaaaaatagattctcagccgtcacgtaaattcgagcactcgacaacccgaattttttcgatacattctcattcaaattatatcctaaagtcaactgtttcaatcgcaacaaatgtatattttcgatatcactatcataaagcccgacaaattggtctccattattcttataagattgcaaacggggatatttcggattctttgtattcttattctcccacgcatgaaccttacgtaagtccacccggatagagttttcaggagtttcccacggctgcaaactataatcatcgtatacccgcaatatatgtctgcctaacgaataattaaatgccatgcttaaatcaaaatccttccatcgtaaatcacaaaagattcccccgtgcatttgtggcagcgggctggatgcaaagtactggtcatcctccgtaatctgcccgtcaccgtttagatccagaattcgacgagtccccggataaaagattccttcatttattcccatgtcatacaaaggttgtttcaccccactcgccaagtaaatataaggaacttcatccatagtattataaaaaccgtcagtcttgtaggcccgcatttgatataacggcttcccgataacctgttctttataatccatacccgtgtaactcttctcgaaacgactccagttacgggatgctgtcaacttcatccgccatttcacggcagtctcgcgcaaaatattagcctgcaactccagctcgatcccctcgttagaagtttccagtacattctgccattgcatatcgaacaaataagtatcacccggcaaatcaacctgattcaactgatccttcgtgtaacgatagtagtaatcgagaaccattttaaaacgatagtccatcaagtccaaatccaaccctaaattatactggtcggttgattcccaagacaacttccggttaatcagcccgcctttcttatttgcggtcataccgtattgcccgagaaaagtatacgcgtaagccgaaaacagcccttgcgccaaataaggttgggaaaatttttgcccggaggttccccaactaccgcgaagtttaccgaaactcaaccaataaaaacgtttcataaaaggttcttctgaaaatgcccaccccgcagacacggacgggaatgttgcccaacgcaccttttctccaaagacagaggatccgtcccgccgaatcgtaccttccaaaatatatttctccttataattataagacaaccgaccgaaataactacacatggtctcctcagtcaaagaagagccataagtatacgcccccttagcataccctccggaatacacgatattagaagcacctccccaaccttttcccacgtaatgcacataatcattcggccctttcaacccggatccgctattattgaacttttggtctttttcgaaagaaagcccaagcaagacaccgaattggtgatcatgttttatcttgaatttataattcaacaaattctcattcagcatcataatgcttcgtgaaatatcaccttccgattttgaaaagtgattctgccgatctaacgtactgggagtaaatttattcaaattctgttgattaaaatcaagagaaccggaaacagacaaatgcaaatcacgaataaattcataatccagttttagattcaaacgtgccgtgtaactgttattcttctcaatcttggaattcaaatcttccatcatgtactccttcacgtaactatcccccggcaatagcgaagaagtccggttcggatcaaccgatattccttgtatcttggaactcagtcctctttctgcctcccctctactacggtcgctatacgtgaaagtactcataaaatccatcttcaaatgtctcatcggcttagatgaaatattagcggataacgtggcccgttgaaaatcagagctgatgataatcccttcctctttaaaataaccaactcccacgatatattgcatagcctcgtttcccccggacatctgtaaatttgcatttatcaccttagccgtacggtacatataccgccaccaatccgtggaattattaaagaatggattcaaactatcttgcaaataaggaacctccggagcaatcttatctctaccaccccaaaaataattatagaccggtcccatatctttccccaccagattgtacacctcctcgtaagaagtcggtactttccattctttggttttcacatcataataaggctcaaccgtacgtttcaaagcgttaagcgcatacatacgttccccgtgtcccccggtaacttcaggagtcttgggcagccacgaagctgaataagaaaattttgccgaaagttggcttttaccgacacgtccttttttggtcgtgatcagtatgaccccgttccctgcacgagaaccataaagtgccgccgctgccgcatctttcaacacttctatcgactcgatcattgccgggtcaagatcggcaatcgtgttagccccggtaaccgatgacgtaaaggattgaataggcactccgtcaaccacgtacaaaggagttccgtattcccgatcctcaccctctccctttgccccgatactcgtgtatccccgaatagccacgatagacccgccaccaccgggagcgccggagagattattcacctccactcctgccatccgtccctgcaacaaactctccagactatgcgtcggcaattcctgaatctcgctccccttgatcgaggaaacggcacttgtcatcaatctccgtttctgggaaccgtaggcaaccaccgtcacctcgtccagatccgacacatcttcctccagaaccacccgaatcgtatccctcgtcgcggcactgaaattcactttcttggtcttgtagcccacaaaagagaacacaagcgttcccttttccatcggcaacgacaagcggaacatcccgttcacgtccgaggccgtccctaccgtcgcactatccagtcgcacggtcacccccggcatcggtattttcttaccatccgtgacttttcccaagataattttccctttctgcggttcggccgggagtgcagaaaggatgataaattcatccatcaactcgtaagtcaacccggttccctccaatatttcacgcaacaccacgtccaaacgagtattcttgaaattcacattcaagcggtaatcactattcaaacggtgattattatacaccaccgtataaccggtctgtttatgaatctcggaaaaaatttccttgaaactcaactggctccccgtgacggtcatcgtcttctgggctaacgtgccggccgttacattcgtgataaacacgaccatcaaaaaaacgcctaacttcataacctgacaaatttttgacaacttgttgtgtccaacaagcctgtttcttcgttttttattcatacttttgtttcgagttagttaatatttacggtattactaaacctcccggagcgtggtcgcaacacgtttcgggattttatttttcatatattttaatctgatctccgaaatcgacaaacgaaatatccctcgtcttctcgatcattttcaacacgtattccagatcccggtatctcgtcacggccccggtaaaacgcatctgtttcaccttctcgctggcaaaagtgaatttcacttgataccagcgttccaacttcacgaccaactcttccatcgacatattctcgaaataaaaatacccggtacgccaagcgctcacccgactgacatcctctttcgtgagaacgatcgaagtactcgccttgtccatacggaccacctcacccggcaccaacgcacgagtctgtcgattccgtgtatcctcgaatttcactttcccctttaacaatgccacttcaaccttcgcctcatccgtgtaattcatcacgttaaacgacgtccccaacaccttgacatttacctccgccgttttcaccacaaaaggctttaacgaatcggaagtcacttcaaaaaaagcctccccttccaaataaacggctcgttgattcccgacaaaatgaagagggaacttcaacttcgaatcggaattcaaccacacgttcgttccgtctgccagcgtcagattatactcccctccccggggaacaatcaccgtgtgatattcctctgtcatcacgtccttcccgctctccggttgagggaacagatttttcactgaatcactcttcaagacaatcccttccgccaatggcacggttcgatcattctctctacccagcatgacctcgttccctgatggaaattgcaaaatagcctctctctccccgtgcttactctccaacaaactgattttaggcaatgtctccggcaccggttctttccggttcgtgtagtacacgtggaaaatacccaccaacagtaagaccgccgccgcggacgagatcacgccccacacgaatcgtctccgccgtttcaacctttcttcccgccatttttcctgtatccgggtcttcatcccccctgcccgttcctcacgtgaacttaaccgcaaccgttgacacatcttcagggtttgtttaaagcattgctcttgccccggagtctccttcacccatctctccaaatccatcttctctcgctcggaaatatctcccaagtaaaaatcaataatccgttctattacatcatccgaaattcggttcatatcatttcattttgcctctaagacgggaaaagcaaaaaacgggtgaatcaacaaacacattatttttcaaaaatcaacaattatccactttacaagctacatacgattgttttattcaataaaatattttagatttgcacgataaataaattcatgaaaaatcaaaacgatctcgaccacgatttgcagcacatcttcgataaatacgcgaagaacttgtgtctttacgccctcaattacttggagacagaggccgatgcggaagacatcgtgcaggatgtcttcattcgttgttgggaaaaaagagatattctgttatcagacgaaaaggtgataaaaacctatcttttcaattctgtcagaaacgcttgcttggacaaaatagagaaaaaagatgtcatgcgttaccacatcgacattataaagcaagaaattattgacgaggaaaccatcacgtttgacgaaaaactccttctggaaatcagagaagaactggcacaaatgcccgatcaaacccaaaaagtcattacccgtgtattcatgcaggatatgaaataccaagaagtcgccgacgatctccacatctcgatcaacaccgtcaaaaccttgttacgcaacgggatcaaacacctgcgttcccacttctctcaacacctagaactcttaattttctatctccaaaaagcgacacgataaacaggctttcagtcctttaccgttttatttattaaacatttgatcattttcttcacatttattaccttcgtaaaaatttaatctaatccttagcatgaaaaatacattcattactacgctcttattattaaccgtcgtattttgctctgcccaagagaaatacgttccttcacaagaaaaccttatcaaccgggaatggttccgggatgccaagttcggtatgttcatccactggggaatatacagcatgctggctgacggcgaatgggtgttaactaataaaagcctgaacgaggcggagtaccaaaaactggctgacgggttctacccttccaaattcaatgccgacgagtgggttcgtatcgccaaggacgccggcatgaaatacatctgtttcacctcccgccatcacgatggattctcgatgttcgacacgaaacaatcagattacaatattgtcaaggctacccctttcaaacgggatgttatcaaggaattggccgaggcctgccagaaacacgggcttaaattattcttctactattcccatattgactggcaccgtccggattattacccgtggggacgcacgggacggaacacgggtcgtaccccttccggcacgtgggaagattacttgaaattcatggatgcccagttaaccgaattacttaccaattacggcccgatcggtggtatctggttcgacggttggtgggataaacccgacgcggactggcaactggaaagacaatacaccttgatccaccgccttcaaccgggatgcctgatcgggaataaccatcacaaagcccctttcgacggggaagatttccaaatgttcgaacgggatctaccgggacaaaacaaagccgggtactctgccgatgcagaaatcagcgccctaccgttggaaagctgcgagaccatgaacaacacgtggggctacaacatcaacgaccggaattttaaatccacgaaacaactcatccacacgttggtgggtgccgccgggaacaatgcaaacttattattaaacgtgggtccccgtccgggtggagatttccccgaaggatcagttacgcacttgaaagaaatcggagaatggatgcgcacctacggtgaaactatccaaggaacccgtgccggaaccatccctcaccaagactggggagtcacaacccaaaaaggaaataaactctacgttcacattctaaatttgaataaagaccagcttttactcccgatcaccaataaaaaagtgaagaccatcgtgcatttcaaggacaaaactccggtgaaatacaccaaaacaaaagaaggaatcttgctacaactgggaagagtccccacggacatagatcatgttgttgaaatcacttaccgataatagcggtcaaaaaacctgttcatcggaaagaatataacatgggattaccccaaaactccccttgattcatgattgggctatcctttcgctatatcataaacatagcatcaacataacaataacacagcataaacacattcttatatttatgccgtgttattgttatgccaaaagagtacctttgatggaacgcaaagatagcccaaggaataagaacgatgaaaccaagaggcgatcaatctattctaaatctagtcctttgccgaatatcttgtgatgaagccccgatcatcaccgtgaaccatcccggctcaacccgccagttcagcgaggcatcaagcactcgtaaatgttctcctgtaaggacaaattcaacccttcgggattctcccgaagtcaaatgaacccgttgaaaagccttgagctgcatgaaaggagtaaccaccgatgcctgttcgtcccgcaaatacaattgaaccacctcatctccagcacgtcctcccacattcttcacatctaccgaaacccgaaccgaatccccctcgacacgcacatcaatcccctcgtaaacaaaagtcgtgtaactcaacccgtacccgaaaggatataatggggcagcagttccctccacataatcatgtcgtccggcagatttatgattataatacacgggtaattgccccacgtgacgaggataagacaaggggagccgtccggcagggttataatccccgaacaacacgtccgcaatggcccgaccaccctcaccgcccggataccaagccgttaaaatcgccgggatatgttccgcggcccagttcaactccaagggacgcccctgaatcatgaccagcacgacgggcttacccgtggcatataacgttttcaataattccacttgtttgcccatcagcgacaaaccaatccggtcaaacccctctcctgactccatgtcactctccttgcgttcattcgcaacggcagcccctgtctccaagaaatccgtttcaaaatcccgtgcgctagacccccccaaaaccaccacaacaacatcggaattttttgcagtctcacaagcctccccgatcgacgtgtccaacgtgtcccgcacggcacaccctttcacgtaacagacttccgcaccgggcaacttttgccggataccttcgagtacagtaattaccgaaccgggtgcctgtggtgccgtatagtctcccaactgattataaacattatctgcattcggcccgataaccgctacccgtttcacctccttcgacaagggtaacaattgattttcatttttcagcaacacaacagactggcgagccacttccctcgccacctcccgatgcccgggcgtgccgatcagcttttctgccttcttcaccttcacgtatggattatcaaacaatcccattttaaactttaaccgtaaaatacgactcacggcccggtcaatgtcagcctcggccaatcgcccctcccggcaagctttcaccaaatcggtactaaaacaatttccacccaaatcggaatccactcccgaacgtaaagctaatatcccggcctcttcccggctggctgccactcgctgcgatatcaacccgtctatcgagtagagatccgaaaccacgaatcccgcaaatccccactgatcccgtaaaagctgattcgtcaggaatggattcgccgtacaaggaatcccatccacctcgttataggccgtcatcaatgataacgcccccgctttcactgccatctcgaaaggataggacaactctgtcaacaattcccgcactcccacatgagccatcccggcattatgcccgccttcaggcaccccgtaagccgtgaagtgtttcaacgtggctataacattttcgccactccccacgtttcctccctgtaacccccggacataagcacttcccatactcccactcaagaaaggatcttccccgtatccctcttccacccgagaccaacgcaattcccgggcaacatccagcacaggcccgtaaccgatatgtcccccttgtaaacgggcctccaatgccacgatttcggccactcgctcctccagttccgtgttccacgtacttgccctcccgatagccgtgggaaacaccgtcgtcccgatagccatatgcccgtgcggacactcttccgccaaaaacaagggaattcccaaacgagtgctatcccgtgcgtaacgctgcatggcattcgtcatctctgccgcctcccgcggggacaagcccgtccttaaagtctttcgggtccacgggtcagccctcagcgttgcccaaaaacacccgatataacgatttttcagatccgaccgaaacaagtccgtcaaccgaacctgaccattttcatccttctcgtaataattccagcctaaggtatgaaccaactgtcccactttttcttccagcgtcatttgccggagtaagtcctgcaaacgcacctccacgctctctgccggattctcgtaaggatccagcttgccattcttgttcaggtcccgaaatcccttcccactcttcttgtaaaccccatccccacaaacggaaatcaccgggagaaaaaacacgagaaataaccaaatcttttgtttccgcatagcaacacattattcgattaaacacaacaacacaaattttaaacccaaatatagacaaaagtatcttttccccttcttttttttcgtaacttagcacccgtataactaaaatacatagattatgttttcacaagatgaatttaaaaaatatgccaccaagcataaagggattagcagcttgaaccttcaccggttcgaatctgccgtctccagctatataaacccgaccattatcgaggaacgccagctaaacgtggcaagcatggacgtgttttcccggttaatgatggaccggatcattttcctcggagtacctatcgatgacgatgtagccaacattatcatggcgcaattactcttcttggaatcggcagacccgaccaaggacatccagatttatttcaacacgccgggcggttccgtttatgccggattaggtatttacgacacgatgcaatatatacaatgcgacgtggcaaccatctgtaccggaatggccgcatccatgggtgccgtgctgatgacagccgggacaaaaggtaaacgttccgcgttgcagcactcacgcatcatgattcatcaaccgatgggcggggctcaagggcaagcctccgatattgaaatcacggctcgcgagattatgaaattaaaaaaagaactttaccagatcatcgctgatcattccgggaacccgatcaagaaagtagagaaagactctgatcgcgactactggatgaccgcggccgaagccaaagaatacgggatgattgacacagtattaattcgggaacacaagtaatgcaagacaaatgttcattttgcggaagatcacgcagtgaggttgatcttctgatttccggggtagacggttttatctgtgatatgtgcgcacaacaggcgtatgacattgtacaggaagaacaaagaggccattctaccccccttgatatggatcatatcgaagtcaaaaaaccgatagagatcaaacaattcatggatcaatatgtaatcggacaagacgaggcgaaaaagcacctcgccgtggccgtttacaaccattataaacgattgacacagaaacattctaatgacgacgtggagatcgagaagtcaaatatcatcatggtaggacgtacgggaaccgggaaaaccctgttggcccgcactatcgccaagatgctccacgtccctttcaccatcgtcgatgccaccgtgttgacggaagccggctacgtgggcgaggacatcgaatccatcttgacccgcttgctacaagctgccgactacgacgtggatgccgctgaaaaagggatcgtcttcatcgacgagatcgacaagattgcccgtaaaggagacaacccgtccatcacgcgtgacgtgagcggtgaaggagtgcaacaaggattattgaaactactggaaggttctatcgtgaacgttcctccacagggcggacgtaaacatcccgaccagaagatgatccccgtgaacacgaaaaacatcctgttcatttgcggaggagccttcgatggaattgaaaagaaaatcgcccaacgcatgaacacgcaggtagtcgggttcacggcaagcaaagaaacggccgttcttgaccgggacaatatgttacaatatatcgcaccgcaagacttgaaatctttcgggttgattcccgaaatcatcggtcgtctcccggtactaacctatctggagccgctggaccgtcaagccctgcggaacatcctgacggaacccaagaatgctattatccgccagtacgtgaaactattcgagttggataatatcacgctgaactttaatgaagaggttttcgaatatatcgtggacaaggctgttgaattcaaactgggagcccgcggactacgttccatttgcgaggccatcatgacagacctgatgttcgagattccttcacaaaattgcgaatcgatcacgatcaccaaagaatacgccgaatccaagatggaccggctgactgcacaaaagctaagagcttaaaaaagggggagggtgtcaaaagtcattttatcacccccctcattttctttatttactaaagagaaccccaagagaacctaccaaaatttaatagaaatactttcacttattcgaaactctctcgaagattcctcagagatccgacattacataatatttaagccacgactaatcttcgagtaatctctgaaaaagcgagattatctgggttaatttacttctttatttgggttggatttgtgtaaatataatgtcgtcaaatcggattcgtaatatcccggatcaccaccgaggcacagaaacacccaaacaaaggtggcatataagaaattgtcccaacattcgactttttattctcactctcgcttaaaacaacagcttccgggtcaacttcttcgggggaaaacacgacttttactcctttatagacacccagtttatgcagccttttccgtaacatccgggctagattacaattataggatttggaaatatcggctatccggatttgttcggggtccatcttgcccccggctcccatggaactcacgacccgataccccttttgcaaactatggtatattaaaaatatcttgggcgccaatgtatcaatagcatccaccacgtaatcatacttcgccatttccagaatatcaatcatgcggtcatccttgataaaatcattgatcacgtgcaattgaatatccggatttatatcccgaaaccggatcgccatgatctcggctttcgccttaccgatattactatccaacgccggaagttgacgatttttattcgtcacgtccacacaatccccgtcaataatcgtcatctctccgattccggcccgacataattgttcggcagcatacgccccgacacctcccaatcctgccaccaacacgtgagctttcttcaacaaacccaaccgttcttcacccagaagcaactccgttctactcagccaatccatactattttctaaaaacttgattacaattattcctcgttatttctttcaacgcctctacatctacccctagaatggcagatgccgcctcgtaaataaccgaaatctctacctctttatcatcattctctaaaaacaaccttcccaccgggatcatccgcaataactgaaaagcattcgaacgtgaattcagcaaagccgctcccacggaaatataaaatccgtgatccaacaactgccgcaatatctgttcattattgttatacccgtgaataatccaagatacggaagaacctgttcgtttcttcacggcaatcaattccgaatacgccttcacacaatggataatcaacggcttacgcaactcttccgccaaaccgacttgaacgtccagtatctcttcctgcgtcttcatacaaataggagagcgacggtccaaaccgcactctcctatcgctattactttttccatccgtaccgtatcctctatccccgtaaaaacattctctcccagcccggctaatttcatgggatgaacccccacggaataaaacacctcctgcccctccaccgatttccgtttttcttctccttctacccacgcctttccttcaccaacatccagaatgttaattccttcaccaacatgatgcgtgtgtatatttacgtacgaattcaattctttctattatttcttattgcacatgatattcaagatcgtcttatccgtctcctccatacccttcgttccgatcaaacccacgttccgaatggtacgttcaatatcttcctccacgattccatcattattcgtcttgattcctctcatggacaacaaagcggcctgtacggcagccgataccccggaatataccttcaaagcacatccctgttttgccccgtcacacatcatacccgtcaaattagaacacatcgtcttgatcgtgttcaccatgttatcgtaagttcctcccatcaaataggtgattgcggatgccgcaccagttccggcaatcagaataccacaaagagctgaaaggtgtcccatgtaatggtgaatatgcacggcaatcaagttactcaatgccaaagcacgagccaattgttcacgggatgccccaaatttctcggcagccaccaccaccggcagatataccgtgattccttgattaccactaccggagttcgtcatcaccggtttcgggcatccatccatacgggcatccgatgctgccgtagcacgaatcaacgtgcggtttagcaagtcatcttccaacaaccccttatctatattttcttttaatgtcttaccaatctgtaacccatactccgagttcaatccctcggctgagattgccttgttcatctcggcaccctgcaacacgaactcgatgtccttcacgtccacttcatgcacgaaatcccagatacgcttcacgctcaattccggtcctttatcttccggttttgacgtatccagacggaattctcttttgaaaatctcttccccgttcttctccaccaaaacgatattagtatgcgtgtgagcaataatcaccttcaccgtatcatttcctttcgtggccaaagcctcggcatacaatttatccggcgcatcctctttcaaagaaaccgtcacctgacctaacatatctttcgcacgctgcaagttatcccccacgttcacctctttcaacacttccaacccgtactccgattttccacaaacagcgcccaaagcggcagcaataggcaacccgaccattcctgttcccggaatgccaacacccataccattcttgtaaatattaccactaaccagtacgtccaaacgctcgggcacaccccccaatacttctttacactttgcacacgccaaagcacaggctaccggttcggtacaccccaaggccggaacggcctcttttctcaatatttcaatgatttgttgatctgttacttgattcatcttattattcctttttcatgtagaacgctaaatttttgcgactacaaaaatagtgttatttatctatttttctaccacaaaaagacaaattatactatctttgtcgattgaagtcgaattagttgaacgcacgatagagatttacccatgaaattaacactcgtcatattatcacttttcatcacgtccctcgcttgggcgcaaacagattctattcccccggtcaaaaaagagattgacttcgtgaaacaactctcggaaacagattctattaccggaggtaaagtgatcattcatgccgatccgaaaatcgaacaactattaaaactgaatatttccgtgaaccggaaagaacagctttttcaagggtatcgcatccaaatcctatcccgtagttcatacggtacgaacgtggacacgctgaaaagctataccaaacgattcgaagaagagttcccggacattccggcatacctgcaatacactgatcctgattttaaaatccgggtaggtaatttccgcacccgcatcgaggcaatccctgccttgaaacgaatccgtaaaaagtactcaggtgcttatccggtaaaaacgactatttacctacaagaattgaatcccgtagtggagcaagacacggttacggcaccacccgtgggattttagattttagattcccaccgcacaaaccctatgcaatttcagatgctagcccggattcgccttcggcgggttacaggtttcttcaactttcatcttttagtttttatcctttagttttccaactaccccctctaactcccccttacacagggggaggatacactacattgaaacatcgtgaagccttcttgcgttcgtctctccccctgtgcaaggggggagccggtgggggtagttctttcattctaaattctaaattctaaattttaaattctaaactttttaatttttcctcttccgccgagaaattaatcatcgggtaggaatgggaaatcatggcaatttcagccaacattttctttaccaaacgctgataatcctcggactgcgggtcgaaaggacgatgcgccacccctttattaatccgtccgatctggttcatcaaccccaacacatcgggagtaatgaaactatacagaaaacgttcccaaatgtaatccaccgtaagaccggacatatgtaacatatcatctgcataaaaacgatagtcccgtaattcatccaacacgatctcgtaagccggaaaataatacacgtgatccaatttctcccgcaactgatcaatcgccaacaacaacgtggccttgctcaactggttcccgtgagcgccatccttccaatggcggatcgggcttaccgtgaacaatactcgaagtcccggattaatctcccgtaaacgctcaatcaactccacgtattccttcacaatatcctccacgcttaaccgactacgctcaaactcctgcgaagggatcttgtgacaattcgacacgatcatattttcccccatatgcttgtacacccacgctgtcccccaagtgattaccaataaatctaaagaacgaagttctctcgtggccctctccaaacgctcgtttatccgacgcaaacactcttccggatcagtggacgagaatgccccgtgatgatacaaactcacccatttctcaccgactttccttaaatcatccttcccgaacggctttccttccataatcagacgcaacacgtttgccacggacaacgggttataaataatcccgcaaggattcacatccacgtcaaacttgtaatacgagaacttaccacccatattttccgcaaaacacgatcccaacatcatcagcttggaattataatctatcgaaaaatccggtgccgcaattgtaatcttcgtctgtaaattcatatctatacttattataaataatctctctatctttacaaagttacattttttacgctcatttcctccatcatttttatacttttgtcaaaaatttcatgcatgggaatcatctccattttattgatcgccgtaggcctcgccatggatagccttgccgtaagtatcagcggtggaattgtcatgcgccctttctgcatgcggcagtctttacgtctggcccttaccatgggaatttttcaaggagggatgaccttgctcggttggctcatgggagtcagcttcagctcgtacattaccgccttcgaccactggattgcctttatccttcttggttttctaggtggtaagatgatctacgaatcttttggggaagaagaaaccaccatctcgtccttttccaccaaaaccttgctcacactgggagttgccaccagtatagatgcccttgccgtcggagtcagtatggccttccttaaaacaagcatctatttccctgccttcatcatcggtttcgtgacattcgccctctccctgatcggagttatcagtggttaccgtttcggaaaaatcaaaggcatcaacgtcgaattattcgggggaatcatcctcatcgctatcggagtcaaaatcctcatcgagcatctgatggaataattttcaattttcaattctccattttcaattatattcgtatctttgcatccacatatctatggggtagacgtggatttgacagcatgaagaataggtatgtaagcatgtcgggcgtagtgaagccggcccgtaaatcccggacgcaaaattttaattggcgaaagaaattacgctcttgctgcctaatcgaatcatagtagattgaggcttaatctccgctcaaggtagtggagacgagacatcccgctggcggtcccaccttgtgccaaccagcatccggggtgcaggcaatacgaggttagtcaacatcttgtttcgtggtgctgatgaaataacagaaactaaggtatagtttgggtgcttttttccgggctatattcgaaaaccaacaaaaagctaagcatgtagaaagcatatggattccgtgtttggactggggttcgatcccccactactccaccatcaaacagaaagaggctaaaaagcctcttttctgtttatcttcaaacgggaatgtattacatcaaaaattcaaccacaacttaaatgctgtaatcttttcctcgctaataataatctgtgatttatagggtggtttcacgaaaaccacaattcgaccgttaaaataaggttccacatgactaatagctttcacgcaaagcaatacttgtcgattagctcggaagaacagatctgggtccaattgttccaccaacttattcaaagaaaggtcaacaatatgttcctgcccggtataggtcaccgcaaatgtgattttattctcggaatagaaataagccacgtcactcacttccaacggacggaaacgttcccctcccgcaatgagaaagcgagtacgataggctttctcccgatgccggagactatcaaggataacatccaagtaaccgttttccggagatgtatttgcagcaaccagtgtttcatatttcacgatcgcctcaagcaaacgtttctcatccacgggtttcaggatatagtctacactatttaccgtgaaagcccgaattgcgtactgatcataagccgtggtaaaaataatcacggaagaagggcgagcagatgtcagaaaactgaacgaatctccatccgataactgaatatccagaaacaataaatccggatgcgggttctcggcaaaccattgcaccgcctcttccacgctccccggcaaaaccataacctcccaagcgggacgcaatcgccggagcatagagtgtagcaaacgggctgccggcacctcatcttcaataatggctactttcaaattattcatcagcaaaaggtatttttactgtaaatgcacctaatttatcaactatttctatctctttacctgtaatcaacttacagcggtttgccagattctgaagcccgattccggaagactggacatccttcctagggtgaaccaaattactcactaccagaaaattatcatcaacccaaatggcaatcctcatcggatgagtggcagaaatcgaattatgcttgatcacgttctccgccagcaattgcaacgtcagcggtggcaccatccgttcccggcaatcatccggcacttcaatatcgcaggtaatacaatctcccaatctcactttatgcaaaaacaggaaagcatccagaaaatctagttcatctcccaacgtcacaagagtcttatcctgacattgcaacacgtaacgataaacattcgaaagattccgggtaaactccacggcattacgaggattatactcgatctcggcaatcagcgtgttgagactattaaacaggaaatgcggattcacttgattctgcaaagccacgtaccgcgccgtattattctcttcctgcaaagccgcagtatgttgctgtaaccgcaacatctctcgtatagccctgaaagccagcaacaaccccaagataactaattccaccaaccaaacgagaaccagtacgaactttcccccggcatagaaagtaaaaggacgcgatgcccccgccagtaacttagccgaaactagtaaaccatagttcagcaaaaagaacatcaacatcaccaacaagtaaatcacaacgatcctccaccttctccggatattcaaagcgtagctcacgttcagccacgagctgatacgcattgtgaaataccctaaaatattaaatgcaagaatacagaacagacaagccccgaaagaatacaactcttcctgtaccaatggtgaaaaaccggaataactcactaacaggagatatgaaaatacccccaacccggaaaataatccggcatacagcaaaatatccagtttcttagtcatattatactccaatctattcagcaaagttagtctaatttacaaagattcgtacgcgttcaaggcttttattaacccggaataatagctctgcgcctccgttttagcctgcacgtaattaagttgcgaattctcccgataggtctgagcatcgatcacttccaatatagacgtttttccctccccataccgctccaacgctttcgtctcattttctttggccttctccaacgaatttcccgtcaatttcacctgttccagtgcctgtaacaaattcagccgtgccgtctgtacttccagtgccacgttgtctttcacccggttcaactgatcggaagccataccgacttgcccccgggaagctctcttctcacttcgccgctttccccactcaaacaccgggatggatactttcgcatacgccacgtaattcgggtccatatccgtgcggaaattataccccggagaagaataactcccgtcaaccccgacatagacctgtggcttatactgcgcatcattcaatcgcaacgcactttccgccatcctcacctgttcctcggccatcctgatctccggccgattactcccgtttccccgaagaaccgaatcctcaaccagcaataaaggaacattctcttctatcatggtcgggttagacaactccaacccgataatcgaatttaaagccatacgccccgtctcgaaattactctttgcttgcaacagacggtactccgcctcgttcagttgcacctccgccatcaataaatcctgcgggtccaccaacccggcatccactctctcccggatcgtttttaccaacgaggacatcgaatttcgaaaatccgtggccacgcccacgatctcctgccgggccaccgtgttccaatactgaatatccgtctggtaacacacggcattcttcaccacctccgcctgttgtgccgccacggcttgccgtgactgggccatccgaatcgattcaagcacccatcccccggtataaagcggttgcatgagcgacatcgacaccccgtatttcatattttttcccttaaaccccacggaacgtcccaacgaaggcacatctaccgatagttccatgggatttcccgtgtactgaaaatttcctcccgcctccactttcggcttcaaatcggcacgggcggatttctccagttccatactcaccgaaatattcttttccgcagccttgagatcatggttatattccaaagccatgttccggtatttctcaagaagagagctttgttgggcggacacggtaaacgcacccgccagcatacaac

SEQ ID NO: 17 - DNA, 22985 bp, Butyricimonas faecihominis
agaatattcagtccccgtgtaagccttaaatttttctgcaaaacgattaaattctgatacaaactcttccttactaatggcccgttcatagaccctacataaaaaattgatataatccataacgagaaccgtatccttcactccatacaggaaatgtaatttactcgcatcagggatcgccccctgttttagccaagcttcagccatacttatatccattataaggtatgcttcaaattcaatattacgtttaaaatccggtcgcatataagccgaaccgccacataaaccgaattgcaactgatgtatcatttcatgaataattatagaaggatcacctaaaactcgcttttcttttatcctgatcaccccgtcattccaatctgcatatccttcttttatttcccctgttttagctaaaactatcctcatccttatctttttcaaattcacaagtgcgcgaataacatctcttaaccggggaaattcgatattaactacattacaaatactctcacacatacgcacgagatcctccttcggtatgcccggatcactatttattatatcaaataatgacaagaccatactcaacgagacttcctccgactcgtaataaaaagaactctcactttcaatcgtttcttcttctgctatataatttccgtcatcgtaacatcccaccaagaagacggctgacaatagaatccatataatccttttcaaacactctttcgtaaccataaattttttacactcgttgcatcaattctattgtatcaatcgcgtaatcgtgttccccgtcaaatttatagtaattcggattcatcataatctccattgcccgccgataaagctcttgtagcattttgttaggtaaattcacgtacacggatgatgacatcgtgaatgttaccgtctggattttaccgtccgaatcgcaataaaaagctatccaaaaactacctccccccttatctgccgcctcctttaaaatttctttcaactccggggttaacaattttgccgcacacgaatccctccattccgatcgttgtgccacatctccatctgtcggttctgcaacccgctctacggtaaaccacttaccgaacaacttgttaaactgcctgatttttatctcgtacacgtctccttgttcatcaagaggggttgcctcaaacttttgcgcatacacgccagaaatacaaaaatagatacctaacagtattataattcttttcataactagaaatttacattttcaattatttagatttcagtagttcctctatcttttttgccaattctttcccgcgaagattcttagctacaatccgattgttctcgtccaatagtaacgtaaaaggtatactccgtacaccatatatccgggcaatctccgaagcctgtcctttcaggtcggaaccgttcaaccaaggcaacccatcctccataatcgcctgtacccatttagatttgttatcatccaaagatacccccaatacttccaagcctttatcatgatacttcttgtacaaccggatcacgttaggattttctgcccgacagggaccacaccaagatgcccagaaatccactaacttcgccttggctttaattccgtgcaacgaaatcggcttcccttcaggactattcaccgtaaaatccggagccactttatcaactgccactcgtccgagttccgacaattgggcggcaataattctcccatagacagaactcttggcttgttcacccaataagttatacaattcctgcaactgttcaacaggagcctgcaacccacaagtcaatacgatatacgcggcggtactggtattcgcattctctttcacgatctctgtttgccgtttttgcatattctgcatgaacttctgcgcttgcccggaaagagcctgaacccgcatctggttggcatcctcgtaggctgtcttcatgtcagattgcaacttttgctgttgctttttggcctctctttgcagcgcattgaattgattaaaaacagcttgttccgttcctccttccacttcaatagactccgcaccaatctgtattgaataatctgtattctccagcattaacgggatcattccctgacgatcggatgtcatgatcgttgccatcacgggttccggaacctgtcctttaaattcaagattcccttccttaagtatcgatactcccaacacatttactgtcccgttcagattgggaacgaccaaataaaaagtatcttgttgcaattgccctaaattacccgtaatgtggtaacctttttgagcattgcatagcccccaaagggccatgcaagctataaataacatgattcttttcataattatccttttatcatcattcactaaaggcgacaaaatcagccaagattatgccaaaattcgcataataagcctgatcgctcacggttattttgacatacctgatttctttaggctgtttcatacgaagtaacgtgatctcccccgccgtattcccaatctcgttatcttcatcaaaagtagccccttcccaagatgcttgatcttttgacactaacactttcagaaggttcggacggaaattatgtttcgtgtcccatggactactgatcgggctcgtcgcatcctgcgccactttaaatccggaaacggtctccaccttccccaaatcgataagcaattcatgctgccggaaagaatttatctgctgaggattccatatcgtcgcctgattattatccaataaaaattcaggatgagcattatacccagtctgatcggaaggtaaaaccgttattcccgcagccgtaaaatagtgcaaggtggcaggcacttccgaatgtccttgttctttcaacacagacaatggattcgggaaataatgcttgttatatctctccacttccactccttgcaattcatgaagcgcttccaaggcaaaccgactggctgccgtatccgccaacacgctctgcttaacagcatccttataggcctcgtataaataccggttcttacccaacaccacttttttcaagttcgggaaataaaacaagtcttccaatgtggacaagtcataatcaaactccaacacctctaccgtgttaataaagttttcatccaattcgtcaatgaaataatgagtttgaatctcccgaacaaaatcactattaaacacccgctgatgtacatctaacggcagggaattaaaaacaatatccactccgggaagttcttgcaactgccctttccgctccaccgctacctccttgtttacatcaatgttatccaccacgtaatacctttgtttcagaatactgtccgtatccgtcaattccaaggtaacaagctcgttcggatttgatttcttataataccgaaggcttgctgccgctaaggtattttgccagcggtcaaaatagagaaccagtttatcctctcccaacggaaagcatttcgtcacaaccggggtaaacccgttcaacgcttcatgcgccatggaaaacggtcgcccataagcctcggcccccaaagaacgccttccttctttatccacggcatacacacgaaacgtgtatgtcacgttacccaaatttttaattgtacaactttccatatctttcgtcaaaagcgagtctccggtctgctctccaccaacccactctatcaaaatattttcccgattcgggtccaacgtatttttccaagaaacaacaacactctcccatcccaatttcaacaaaacatccgtacattttcccgtgtaacgaatccgaccattacccgcatactcctcccacgtatcttcttggtcttcacacccggcaaagattccggcaaagattgccgtcaaaacaatgattatatatattctcttcataattcatctatttattatttcccgtatacttcaacctcatgcaaagtcacccgttccgtggtattctcataatattgattcggtattttcttgaaaacactgttaaattcaactttgaaatacctgtagggaggattatcaacagaaaaattaaccgtaaggtaacatggttcaacggcttccagttcactggttgtctttattttcgtggaattgtcaacatcaccagcacgttgtatccatggaaccgccgctgtcagcgactgatagaaattacccactttgacccaagaattgttatcatctttatcattagaggcatatatcgtgacatcattaggcaacatcgttccataacaggttacgaaaacagacggttttgtcatagtattcagatttaacatcccgtacattctaatactggacacttgcttgggttccttaatatccaaaataaaatatttcggggcatccggcttattcaccgcataggggagggttacaaaagaatacatattcgccggagacagcgtgttaccccaagattcttgaaaagccaatttccgggacccttttacatcgccatcaaaaagatacttccaaccaaccataaatccttggttatcgttctccacggacaaagagaacgggtctaaccattcgaaattcgatggatccaatttttccacgttatacgaggcaattccctcgtatattttctgcatggccacatttcccctgaaatcttccgtcttcacgacaaccgtattcatgtctcttttttgagccaaagaataatatttcacattctccccggcctcaatggcaaaagtctccagtaaaagggtatctaattcctttgtcatcggatttgtcccgataaaaaacacgttacaaagtccggtagccgcacagggaactttatatttcacctggaatccatcccaataaggcagcacttctatattgttaaagaaagccaccggaccggaatcctgcgtgttgaaagtaaactccatcgctttcgatgcctcgttactctgattcaacaatgacacccgtaccggcacgttatttcgagcctcgttaaacccgtcaagtacgagagaatcataagcatacgaggcgatcttgatcattttctttcccttataatcttcatactctgctctaacggcaaaaatatctgtattttcaggtaaggtgtaacgcatgatagcccctcccggaatggcctcgaacgaaacattttcctggggaatcgaagcgtcaaaataggaatcgttgtcctcacaggcaaacaatccgaatatcagtaataatatcaaaattgtatttttcatcattctatttttaaaagattaaaatctacaatcaaaatcgtaaatctaaaattcatttaccatccgggattctgcacgtacccggcaatcatagcttcttccgcctttatcgggaaaagataatcccgcggagccacgaacttcgccttatcccatacaaccaccggaccttcgaagttattatagaacgtacgggcattctcccccaaaacattccatcccaaaagtttgtcattcaattccagatgagccaatttccaacgccgcaaatcccagaaccgatggccctcaaaagcaaattctacaaaattttcctgttgaataatctctctcattccttcttttgtctcaatcttatgtggttgagaggaatgttccttccaagcaatttccacgtcgggaataccggcacgcctacgcactttgtttaaagattcatacaccttatcatccggtttgctcaaatactcattccacgcctcagcctgaatcagataaagttctgccaaacggatcatcggccaccgacaatcgcccaaactaccggtattactcgtatattgataagtctgtacctccgaacgagagaatttcttcacgtaataaccgcacaaattttgcggttgagaatacaacaaaaaagactcgtgaattccgaatgcctctccccgataagcttgtacaagcatattcttgttcgcggcaggtccgcgttgccaatagcaccgatcggcagccacgttggcatagaaacgaggctcccgtttcagatgtagattcaaaacatcctcatttaatgccacaacattctggtaatcattgttcacttcccgtcccaatttgtaacgattggcataatcccattccttatccatgttcaagggaagaccatttttggtataaaacatctcaaccatcttcatactcggagccacacatccggtcaataacgcatcccgatccgaatgaccttcggggaaaagaggtaatgtgaacatgatatacgaattcattatcgaagcatttccggttaggaaaacagcttcctcgccctcgtaattcggttcccagatcgacatttcaatatctcgcatctgattcaacaacttggttgccttatttccttcacccgtctttaatttatatccccgactttcacacatctccaccgcagcatctgcagcctccgccgcccgtttccatttttccggatcgtattccgtactgaacaactgttctcccttttttcccttaaaattcacgtaatactcattcccgttgaaaagaggtgatgcttgataaagtaacacgcgggcttttaatgccatcgcaccttccttgctcaagaagagtttatgagaaattaatctctctttaccatataacaaatccggaatcgcctcatccagtaaacgaacgacctcattaaaacaagtatccacgtgcgagcgagggatctgcatttcggccaaatcagcattcacgtcaatattcttcggtactaatacaatggggccgtaacgtctcatcaattcaaaataataaaaagcttttacggctatcgcctctgctttccaatttctcttctcggcagctgtcaaatcgtacacattatcaatattggaaataaacgtattcaacatccggatcgaataataagttgttgtccaaatgtttcctaacggatcctgactcatttgcaggccatccgcaatattgaataatttagcgatattgttatcccgaaaataattcccggtaacgaattcatccgccccgacaactcctgcattaccaccaaacccggtgaaaaaagatccagccataaactctgtagcctgagtcaaccatatatcagcactcgccctacgttcgaaaatggattcaaacgtctccacgtccttttccggcacctgatccagataatcgtcacaagccgtaaaagccaatgcaacaatcgcaataacagatataaaatattttctcataatcatgatacattaaaagtttacattcaaaccaaccgaataggttttttgtatcggataattaaatccatttcctcctaactccacatcccaaagatcaaagttcgagattaagaacgggttattggcacgcacatacacctttaagttcttcaatgccaatttacgtgaccactttttgggaagattatatcctaattccaacgacgtacaacgcaagaaacggcactctttcaaaaaataggtactcattcgagtttctttatctgttgtataatcttcctgtggattgtgagccgtgatactctttgtcgataaccggggccataacggtctttccgcctgattatccacagaccagtgatccttataaatcgccgtcagcaaagcatgattcccataaaaaggagagatcgctgccggattaataaagaatcctcgctgtccggacccttggaaagcaaaactgaattccagtcctttgtaattgataaaaccattaaatccgtaaatgatacggggcgttgtcggaaaaccgatatgcacagcatctttcacatctatcacgccatcgtcattaatatcccggtaacgaatatctcccggcattaaatctccaccttgaaccggagagttgtcgatctccatctggtcacggaacaacccctcggcaatataaccgacctgttgcgaaatgtcgtgtccctttttccattgccactccggcttatcggcagcttcttcgatttcccgataggttgctttactataggtaaacgtaccatttagaattacccaaagatccgaattgaaagcatgctgaatcttacccgcaaaatcaagcccgcgagatcgaactttaccaatattatccaatggttggagtcccagtcccatcgcttccggaataaccgtacggttagccaacacgttatgacgaacttgttgatagatatcaaccgtagcctcaaacaagccattaaaaaacttggtttcaagtcccagattcgcctgttctgcaatttcccaagtcacatcattattttgataaccggtgattctatatctcgaaatctgtcctaatcccggacggaacgaaccagacggttgatcttgccctatgctcggaagatgcacgaaacgcggggtattaatgataccatcattcccgacttttccataagataatctcagtttcaaaaatgacaaccatttagacgaactcaataaaaacggctccttggaaacaacccatgcacctccaaccgaagggaagaatcccatccgatgatccttcgcaaaacgttctgaaccattataaccgaaactaccttcaagataataccgttccttgtatccgtatgaaagacgcatggataaccctagattacgtcgacggataccgtccaatacgctattgggagtagactgaagggactcttgtccggataacacggccaaataagaagtcgtgtggtctttccatgccgccgtgtgcagaatcttaatattataagccagctgattcgatccggttgttgttccattccccttggataaagttctttttccctcatccggatttaatgcttctaaagtatgtttaccagtaacatgatcataatctaacaaactatagtagaaaggcgttgtcatgtatggattggaataataaccggcttgactgaaagaaacatctccccggaattcaagtcctttcaacagaaaagagagattctggatgtattccaaacggtttatcgtggaaaaacggctccgatccacgtatccccgctggatcaaggcgtacggattctcgctatcccgcgactttccaaaacgtaaatgcggccaattgtacgtgtcatcagccgggtaagtcggggaaaaatccaccggattagcataaaaagccaaagaataggctgtttttacatcttccaaaggcccatggtaagaatcgagcgtggtgaaagagtttacaaccaatttaatgcctttactcaaatcgatattcaaattcaaccgaaaagaagtattattattcttaatattcaccttaaattgattcaatcggtcggtcttcaacatcccttcatcccggttatgattaacggaagcatagtactgaatcacttttgatcccccacgaatgttaattcccatgtgatggtttatcgagaaatttttgaacaagacatcgtaccagtcattggtcggataaacgaaatcaggatatttcttacttcctgttctggaaattcgctctgccgaatatttaggagtggcattaggatctcggctcaacagagcttgattatacatttccatccacgtgatcgggtccacgacatcaatctcatctgtcggcatcgttgctatcgcctcataacgaacagaagtatagaccgaaccttcctgccctttcttggtcgtcactataattaccccgtttgcccccctggcaccatacatcgccgtggcagaagcatccttcatcacactgaaagtctcaatatcttccggatcaatacgggccaaatccaacttagaggcctccaccccatccaacagaatcagcggatcaatatttgctcccgattgaaaagaagtaataccgcgaatgtaaaacttcgtattcatttcctcctcggtcaaggctccgggaatacctccctgttgccaaccaatcataccggcaattttcccagcaaactgggaggtcagatcactattggaagacttcaacatggaagcatccactgtcgtaatggccgaaaccacactctcctttttctgcgtaccgaaagcaacaacagcaacctcttcgatattttcaaccgttggattcagtcggacgtcgattttagtcttacccttgattgggattacttcatccttataccccacgaaggtaatcttcagcacgtcatccggtttggcctcgattgaataccgtccttccatgtccgaagcgataccccgagatgttccgtgaacaagaattgtagccccgggaatcgggttcccattctcgtcaacgaccgttcccttcaccatgatcaagtccttctgttcttcggcagttttatctttttttgtactgatcaggattaaatcgcccacgatctggtgggaatactttgatcctttcaacaatacggtcaaggcagaatcgacactgacttccttcacctgaatcgaaaaacgttcattcgaagtggcatcccgattatcgcggaagccataagccaaacccgtttgtcttttaatttccgacaggatatttactaaagtcctgtccttcaagtttaaagtaaccttcttttgatcttgttgttgtacttctataaattcagaagcaaaaagctgtttcgggcaacacaacgtcgaaataaacaacaaaaatataccgacggcaattttatttgcccctgttttgatgatttccactttctttttcataaatttgtgagaaattagatgtaacgtttttacttacgtcgtaatgaatgaacaacgaccaaaggtttctgacctgagaaatcgaaccttttggtgatgttttaaaagggaatcttctctaagaagattctcttttttggtaaatatgaatttactctatataatatgcacctccttctgttttgataggtttgtcaataatcagtcctaaagcacgcaccacccactcgacggtagatgacttgtcaaactccaacgagaaggtttgtttttctaaccccggggcaagttgaatctctaccccgtaccactgggcaatgtcaaaaacaattttatctaaccttgccccattatatttaaaactatttcccaaccaaccgacgtaatccgccggatctacattttcagcacgcaccaatgaatccttcatggaataaaatacccgttgattgggagtaatcttagtttctttaccattcgccgtcataccaatgctcccttccaccaaaaccgcctcggataatgccagcttttcacaataaaacaggttaaatcgcgttccgtagactctcactcgtgtattcccggctttcacgacaaagggcttaccagatttctttacctcaaaatatgcctccccggaaaactccacttcccgtaaagaatcccgaaattcattcggaaatcttaattcactaccggcattcaaggtcacaacagaactgtcagcaagtttaactttataggtgaaacctgcgggaataacaacccgattataacgtatcggtttctcggcatcaattatttcttccgatagccccgattccttaacgatataccccactttcgcatctttcaaatccaatgtctctaaagataaaatatcatgatcattctccatggtaattaaagtcggcacttttatttcggttaaagcaatcgtgggtattttcttctcctccagtttctctccccacggtaaccattgcgtcaaggtaaagaacacaagtattgccgcagccacagagcctcctgcagacctccatacacgcaccattcgtttcttacgcccccgtctctttatctcggtcaacattcttttaaccgattctttcttatcgatcttcgacacttcatgaacagattccaccatctcttcaaccttacccgaagacattttttccccaatctctccaacctcccgaaaagcaagcccctcttttatattctcggattgctttatcgcctcttcggccatctccaaatcctttttctcaatatcgttttcacgtttcctcatattttctgcaataaactttattagcttttgtatatatatcagttttctctccccatttttacctaagaaaatgaaaaaaattacatttaacaatgttaaatatgaaattcgaaacaaaagagggtgcttgataaatattatccaattacacaaaatcatatttacatttcaaagtctacccggaaatatcactaactttggcataaaaattaagactatggcaactacaattatattcaatgcttgcatcatcaccatgaatgacgacatggaggtgatcaaaaacggttccatccgggtggaagacaaccagataaaagagatcagggaaggaaagatcgaattttccaacgcggagtatttcgatgcggaaggcatgatcgtgatgcccggatttatcaatacacatactcacgtccccatgaccatgttacgtgggtatgccgatgatctccctctccacacttggctgaacgagcatattttcccggcagaggcacgtatggtgaccccggaaaacgtggcagttgccgcccgctttgcttttatcgagatgatcaagtcgggaaccacgtgtttcaacgacatgtacttctttgaagacatcatcgcctcggaagccaaaaaagcgggtatccgggccgtcgtgggggagtccctgatcgacttcccgacgccgagttttcacacggtcgacgaaggggtggcccgctgtgaatccctcgttcaacaatggtacggggacagcttgattcatcctaccatttgcgcccattctccctatacctgttcaaaagagacgctacaaaaagccaaagtcctctccgagaaatacaatattcctctccacatccacgtggcagaaacccgtaaagaagtggaagacctcacggcacaaaccgggatggctccggccgaatacctttactcgatcggattgctggacagaaacgtgatcgcggcccattccgtctggttaaacccgaaagagattgaattatacgcccgaacccgcacgtccgttgcccactgcccgaaaagtaatctaaaactggccagtggcatcgccgacacggatacatacatgaaagcgggtattaacgtcagcatcggcaccgatggcacggcaagcaacaacacgctggatatggtggaagaaatgcgcttcgcagccctccttcccaaaggctccctctacaacccggaagccgtcaacgcccgaacggcattacgaatggccacgatcaacggggcaaaagccctcggtattcatcacctcacgggttcacttgaggtcgggaaacgagccgacttgatcgtgattcatgccgatgccagcaatatgctcccgatctacgacgtgtattcagccatcgtttatgcatccaacagcaaaaacattcgttccagcatggtaaacgggaaatggattatgcgcaaccgggagcttatgaatatcaataaaacggaaaccatggagtccatgaaacacatcgttaacagccagattgacaaccgaaaatgatgacatggaaatgagtttttcattttcgaatttccattttcaattctcaattatattcgttagttttgcaaacctttttacaaagaaaggagtttataaatactataaacccaattagatatggaaaataaaaattatggaggactcgacagcgagtttacggcatacgaaactgccgagattgtagtattacctgtaccttatgacgggacaagcacgtggctgaaaggggcagataaaggtcccgatgcaattcttgaagcatcggctaacatggaactctacgatattgaaacggattccgaagtatatactcatggtatcgcaaccttggaaccggtgacagaggcctcatctccggaagccatgtctcaggaagttgaaaaacaagttgacaagatattaaccgacaaaaagttcccggtgatcctgggaggagagcattccgttagtatcggtgcattccgggctttcgccaaacactatgaaaagttctctgtcctgcagttggatgcacattccgatatgcgtagcgaatacgagggatcgacccacaaccacgcttgtgtcatggctcgtgccaaggaagtggcaaccgtagctcaggtaggaatcagaagttctgccattgaagaaaaagagaacatcatgccggaccgtattttctatgctcacgatttacatgatgccaaagaaggtaacaactggatgtacatggtgtcccaaaaattacatgacaacgtgtatatcacgattgaccttgacgttttcgacccggctatccttccggctacaggaaccccggaaccggacggactctattacagagaagtgctgaactttctgaaattgatcaacgaacgtcacaacattgtcggtttggacgtggtagaactttgccccaacgaagttaacaaatcatctgacttcttggctagcaaactgatctaccagatattgagcataaaatatcaaaaccaatgaaataattttaaatgacgaaattgagtcaataaggtcctcataattgtaccttatatttttaagataaatagaatggaaaagaaagatttattaaaagacactatcaaacacatcgacatcaagtcgtatgactcaacccaattgatcgacgcgatgcgcgatatgtcattcacctctcgcgatacggccagagcaaccgatattctgatgatgatggtcggagagaaagagtgtactaatattcttaccattgccggaagtaccagtgctgccggatgtatgcaggtttacgtggatatggttcgtaacaaaatggttgacgtggttgtttctaccggtgcgtctatcatcgatatggacttattcgaggcccttggttacaaacactacaagggacatcaggatgtgcctgacatgcaattaagagaactttacattgaccgtatttacgatacgttcatcgatgaagaagaattacaggcttgcgaccacacaacttacgagatcgctaacaatttggagccgcgtccctattcatcacgcgaatttatctgggaaatcggtaaatggttacacgaaggacacgccgtgaagaaagacagcttgatccagacttgctacgaatgtggagtacccatcttctgccccgcattctctgattgtagtgcaggattcggaattggtaaacaccaatgggaacaccccgacaaacacgtgtcgatcgactctgtaaaagactttatcgaattgacccagatcaagatcaaggcaggaacaaccggcttgttcatggtaggtggtggaaccccgaagaacttcgctcaagacaccgttgtttgtgctgaaatcctcggattcgacgtaccgatgcacaaatacgccatccagatcaccgtggccgatgttcgcgacggggcttgctcttcttctaccttgaaagaggcttgctcttggggtaaagttgacgttacctacgaacaaatggtttacgctgaaggaaccaccgttattcccgctatcgcaagctacgtttaccacaacggaccttggaaagagagagaatacaaaaactggaacaaattattccaaaaataattacgacacgagggaaacgaaagtttccctctttcttttttcccctccttaccgacaaacaggtatattaccagtaacttgcctcgggaatgcactatactctcgttaatatctgaatcgtgaattcatgattcatccaccacaaatgaaccaatcccatccgtcgacttctcgttaagttcccgttgacttcccgttaacttactaacgagactccctagagactccggcacaagtaaccgtcatcacctcactgtatttctactctttcctccttcgcaggaaacgagtcattgaaatcgcttgcttatggaaaatgaatagcggcaatgataccccgatagccagcacggccaaaacaaaagcggttgtcaatccgttgcggaaaatctctacaatcaggttggggagaatttcctcatcctccgttctcatgaaacggatcaatgccaagattgtcttgtaagcatacattccgggaatcatgggtagcaatgaagggaaagaaaaaacctctgccgggcaatgaatcaaccgggcaaaataaatactgaacaaaccgatcgtaaacgaggcacataacgtggaggggattaaacccaaggccgtgtgattcaacaggtaaaatcgaagagcgtggcccacggcagccaacaaagccgaaataagaatcgctttcctcgggggattggaaatcacggcaaaaccgatagccgctatcgccgcaaaaattccatcaagcaatacagataatactaaatcccagttcatagcgtatccaatcctaaaattaataatgttaccgacaaccccaatgcaatacaaattataagtatcgccgcattcaccgcacgagacatacctatcagcacatgacctcccaaaatatcaataatcgaattaatcaaaggtaccccggggatcagataaaggacactggaagccaaagctatatccggggtcttaccccaaccgaaataggtcccggccgaggcgataaacgaggcaataaaagccgatacaacgaaaacgaccatatgattcacgtggcgattcatcatctcctgccgtacccaaaaacccacgcaagtcgcggcacaaaccagcatcatggcaatcccgtctcccccgaacaagcgacagaatgccgcgttggccaaggaaaccaaaaccagcaccacccaacgggaaatgcggggttcgttcatcacctcatggtaatgagccgttaactcgcccaacgacagatgatgatcgtaagcctcccagctcaaggcacttaactcagaaatcacttgaaagttaatcgccaaggcaggaatctttcgcacgtaagttcgccggatagaataatcttccgggtgcttgatcgtcatggtaatatttttctgaaaaatcgtcacgtcaatcccatacccaaacgactcggcaatacgggaaacactcctcacggccctcgccgtgtgtaccccgactcccatcatactcgtggtgtaatccatcaagaaattcgagagttcctgaatatcaacctttctttccatattatttaactatctaccctaattttcccctcgtattcggggccgcaaatatacatcaaaattcaagagaaagttgtatatttactcatcgaaacgggagatggaaaacagaaaaattattcatatcgacatggacgcgttctacgcctctatcgaacaacgggatcacccggaatacaggggaaaaccgcttgtcgtggggcgtccggagaaacgcggggtcgtggctgccgccagctacgaggctcgccgttatggcatacgttctgccatgtcgtccatgaaagccaaacagctttgtcccgacctcattttcgtcggttctcacatggaatactataaatcggtatccatgcagattcacgaaatattccacgaatacacggacatgatcgaaccccttgcactcgatgaggcatttctagacgtgaccaagaacaaaaaaaacatcccgttagccgtcgatgtcgccagagaaatcaagaaagagattaaagaaaaactaggactcgtggcctccgccgggatctcttacaataaattcctcgccaagatcgcatccgattacaagaaacccgacgggctttacaccatacatcctgaccgggcccccgcttttatctccaaactcccgatcgaggcattctggggtatcggcaaagtcacggctcgtaaaatgcactcactaggcatacacacgggggctgacctcaagaaatgtacactgacattccttacccgcaatttcggaaaagccggtaccttgtatcacgattttgccaatggcatcgatcccagaatggttacccccgaacgaatccgtaaatccgtaggctgtgaaagtaccttcgagaatgacttgacgaactatatcgctgtcatcatagaactgtaccacgtgacaacggaattaattctccgactagaaaagtctgatttcaaaggacataccctaaccttgaaaatcaaattccacgattttacccaaaagacacgtagtgtcactatggcacacgagttacgaacaaaacaggatattcttcccctagccaaaaaattactcaaagatttagaacttacgcaatttagaatacgccttctaggtctctctgtatcaaatcctttcgaagaattaaccaccgatgatcctttgcaattaagaattaattttgattaattatgaaacctttacgttcatgggccgtatataggcatatattttgaatgtaatcatagtgtaaccgaaacttaatacataagtgacaaggttacgatgacaaaacgatacctttgtatcggatttcaaaagagacttcgattttttttcataaatttgttattggtattttgggtccccgctgagacagcgcggaccatttttattttagcataaatcctaacttttgtctccctgtattcgtatataaaagtgtgtatcgaaaattaatcgatataacagaaatttaactactaatttttttgtatataaagaaaagccgatacctttgtatcggatttcaagaaaagacttcaattttttttcataaatttgttattggttgcctcctgctgtgacagcacgaggctttttttctttcaccgatgctaaactagcaaatctttttttacccgcaaacatttgcgtaaaatttaatagtgttaaaaatcagatttttattaacacgctgattatctggccaagtaaaaatcacgttaacatttacacgacaggaaatttacaaaaaaaaagatcgtgcctgattcattttaacaaattcggcacgacctctttattttgttattatctatcgaattattccaaataagtatacccgtacaatccggaacgataattcgacaagaattcccgtccttcttctgccgagataattccctttttcacggaagaagttacccatacctctaccgtacgagccattcttttcggcataaattgaacgtactccaacacgtcagccaccgtctctccttcaatcaccttgtcgatcacgtaatcatcacctttcactttgatgtggacggcattcgtgtccccgaacaggttatgcaggtcaccaagaatctcttggtaggcacccacgaggaatacccctaaataatacggttctttatgattcaactcgtgtaccggaagatggtacgagaaattacgcgtcgagataaaattatcaatcttcccgtcagaatcacaggtaatatcctgaattgttgccgatttagtcggctgctcgttcaaacgagaaatcggtataatcgggaatatctggtcgatcgcccatgaatcaggcaaagactggaataacgagaaattacagaaatatttatccggcaacatcttggagattttcttcaactcgtccggggcatgtttcgtggccactgccatgtcgtacacgtctctagccacggaccagaacaaccgttccacttgcgcacgggtgaacaaatcaatcaagccaagattaaacaaaccgagagcatcctcccgaatctgcatggcatcatgccatgtctcgatcaaccggggctgattcaggttctcccataaatcatacaactctttcaccagctcgtgagcattctcgtcgatttcctcgttttcatcgaaagcgggcaaacttgtactggcaagtgcctcgaaaatcaacacggagtgatgtgccgtcagagaacgtcccgactcggtgataatattcggttgctccagattattcttttcgcaagcatctaccaacgcggacacggcatcattcacgtactcctgaatcgagtagttcatactgttcccgctcgtggccgagcgtgttccatcgtagtctacacctaagcccccgccaatatccacgaaatgtatattgtatcctaaattcttcaattgcacgtagaactgagaggcttccttcaacgccgtcttgatacgccgtatattagtcacctgactaccgatatggaaatggattaacttcaagcaatccgtcatcttgttcttttccagaatatccatggcttccagcaactcgctcgaatttaccccgaacttactgacatctcctcccgactcttcccacttgccactcccggaactagccagttttatacggatcccgatattcgggcgaattttcaagcgtttggagattgtcgcgatatttctcaattcgttcagtttctcgacaaccaagtatatatttcgtcccatcttctgggccaaaagagccaactcgatataattctcgtccttgtaaccgttacagatgatcatcgcatcgtcgtcaatatcaatcgacaacaccgcgtgcaattccggtttcgagcctgcctcaagaccaatgttatacttggtcccgtgactgacaatctcttccaccaccgggcgcatctggttcactttaataggataaatgataaaatttttccccgtgtaaccatattccgttgccgcggcttgaaaacaactagagattttctcgatccggttatcaaggatgtccgggaaccttaacaacacgggagccgatacatcccgcacctgaagttcctccatcaattccttgatgtcaattttcggtcctccgactttcggcgttactgtaacgtgtcccttctcgttaatcgaaaaatagttcagcccccaaccgttaatattgtacagttctgctgaatcgtcaatactccattttctcatttttattctataagctcattaagattgattgtcccgcaaagctacaatatattttcaatattatacgcttaatcacctaggatttcacgattttagccattagatttcatgctccccggcatcatgacaggcagaacaacaatcccatcaaacgacctcacattttctggatctcctgaataccgtcccgatctatcaccaaacggtaacgcttgtactcgacctgctccccatgtagcaattgtatcaagaaattaaggtaatatatcttgtctcccatgatcgggccgtaatccgcctctccccttggcacgtataactcgtagtcccgctcatccattttctgaacgaagctccccacgttaaaacgcaatatctcgttcaccccggcaatatcgtactggctatattcgccaagcgcctccggatcgagctgcacccatttccggtaaagaataattttctccccgccattccgattgtccgcctccaacaaatccggacgggctcttcgctcgataatctcctccgggacttttctttccgagataaaatccaccccgtccttgatccacccgaccactctctcgttcatactgatcgttgtcttccggtcaaaataattcttccccagccgatgggcaaaataaaaacgcatcaactccttaatccggtccttcaacatatagctcaccaccaaagccacgaacaacggcatcgtgaaattcccgtattttttctgaaatgaaaaagctaccaccgtggcaaatatcatggaaagtcctgccgcaatactataatatatctgctccaccagtaccccatcttttttcttcgatgccttcaagaacaaatcactctccgcgtatttcttcagcatcccccgccgatagatcaccgtccgattccgatccttactctccggatctgccacgagataaccgttctgtttcttgtaatcaatctccgaatgtaccaaagacaacaataacttcaccatccgatcataacatcccggatccgtcgtcttcaagccgtccagtaacttgaacgtatgaaactccaccagattggaaagatactcatccccgaaagagaaataattcaacgcctcccggggaattcccggcacgttaataatggacttcaaatcccgataccgtttcacgatcaattgcacgtattcaacataccgattgaccatcccttcccgttcaccactttccacctcatgatgaatcgtctctcccgccatcccccgaagggcacttttaaaaatggatgtaaacatcttgatctggtactcgtaagaggctaacgcatccctcgtcccatccgccaccaaatgcaggaacgcatcctccaagaaaacgaaaggcgtccattcgccactcgcaatctcctccaacgtgtagatcggggtgatcaaacgcacgttggacttcacatcccggtaaaaagcctccttgggataagtcgaggcattaatatccaaactatgaggtacgaaaaaccacgtgttcatcctgaactcgttctcctccgtgtccctatcgacatggtaaccaaccttacattccacggagtaccgatcatgcaacttaacctgaatatctatcatatcataaaatcacaacgcaagatacgaaaaaaagtataatgaaaacaaagtacctcaagctaaaagaactccttcttacagcagaatattctataattttgaaccgtttcgcacgatcattcgttaattcatctatttaggtataattcatactgaattatttgcttcctgtttttttaatacataactttgctatactataaatttaaaataaaagagcatgaacaagcaacaaataattaaagccgtggcagaaaaaaccgatatgccacgaaaagacattgcaaaagtattttcttctattttcgagactattttagaatgcttggaaaaagaagaatcagtacggttaatgaactttggtagccttaccgtaaagacttacaaaccacgaaaaggctataatccatcttcgaaaatagttgttcaactcccggaaagaaaagccatccgttttaaattggccaaacgtgcagctttaaaaaagctaaaataataattgacaatatacgac

SEQ ID NO: 18 - DNA, 22898 bp, Butyricimonas faecihominis
atgtatattattactgccgcataacgattacaaaattacacaaaaaaatatatctaacaaaagtgggaggattttttaactttttaccatagacattttattagggaagcgtaggttcaactggcaagtacaaataagtagaaatgtttgaacaacaccgttttaggaagttgaaaaatcaagtttctctctcggtatagcgtttattttggccaatatcttctttagtttagcatttgtgtatttcccattcgtgttctatttagctccttattatgagtatgtagcaagttacttatcaaattcagcctctttgagggtcaaatatggttttgcaaatggtgactgacaagacataaacaaggtcagcaggaattttttacataaatggacatgaatgtatataacctaaaataagaataaattttaataagggctgcccaaaaagaaaaaaatgcagttgccatcctatagatacttgcagaaaggataaaatttacttttagaccttttgggatagcccttattaatacttcagataaaattccttaggttatattttcaatcctttggaccgggtttcctccttggcatacagtcccggacgcccgattatgacatggttggcaacgatactatccgccggactgcgtatctgcggcggtgcattttcgggatattgcgcctgcctgttcctcacatcttccgcttccggcttgagctgttgcccttcattctccttttctgcgacttcgggcgtgggtggcgcaagctccagctgaatttttcggtcaagggcggcaagttcggacttcaactgcttcagctcgtcctccttcttccacaccttacccgctatctcctgtaactgcggtatctccatctccagcacctcgttcttcgccttgtactggtcgatgatggagggtatcctctccatcgcgttgaggaagttgcgggcggcggccaacgggtcagccatcgccagatgcccgttgttgtaggtgtacttgtagttcccctcgaccacgaagcggttgtcggtgaactccaatccctctttgagtatcctttcgctcaccacctttatcggaaaaccgtaaagttcaccgacctgcgtgtacaaccctccggtcgtggcattcttggctatctcctgcaaacgctttccgatgaccttctcatcggcggaatccactccgtccacctttattatattaaggcggttgccctccttgtcggtctgcaccaccgacaggaagcggttccagtcctccgtcatggcatctatgaaagccgtgttgttgcgcaactcgccggtctttgactccagcttgaactccgaatcacgcttgcccttgttgaacgacttgcgttccccttcgagcgatgcgatccgcttttccagtttcgccttgtccaacaggtcggtattgccggagagcaacgccatgtattccgagaaattcatgcccgatttttcgtccattgccccctcgtcgatggtacgcgcacccatcgcaccgcttttgagctggcttatgaaagtctgcttgcagtgcaggaggttgaacttgtagctgtccagtgacttctccaccgcgtagatgattacatccacgttgttcccggcgaaatgtttggcaatctcattacctgccctaactccgcgtccgtcacgctgttgcaagtcggacggtcgccacggcgtatcgagatgatggatagccacacaccgtttctgggcgttcacacccgttccgagcatagaggtagagccgaacagcacacgcaccgtcccggcgttcatggcgtctatcaccgccttccgcgccttgtcggtcttgcactcctgaatgaagcgcacctcgcttggcggtataccgtagtcctccgtcagtttgcgcttgatttccgaatagacgttccacccgtcgcccggctggtatgtccccaaatcagagaaaacgaactgcgtgcctttctgggcgtcgtatttttgataatactccgcgatcatcttggcacagtgactcgctttgttgtcgggatgatcttcgtaattcgggtctatcatgcgcatgtcgagtgccattttccgggcatagtccgtggcgatgagcatcttcgccttttcttccgtttccgaaagcggcagcctgcccaacaaggtggcatcgcccgtcttggcgaactgcatcagtttctgtatgaagtcctcctgttccggcgtgggcggtatatggtgcagtatctcgttcttggcaggacggtcaacgcccacatcctccgccgtgcggtagtccgtgatttcattatagaaggcggcaagctccggcactttgatgaagtagcggaaacgctccttctggaccacattgttcgtcacgttaaattcaaaatccgtcgtcttcttggcaaatatcgccgcccaagcgtcgaaacaccttatgtcctgccgttccagctccttcgggcgcaggtacttgaacagcaggtacaattcagtcagtgagttgctgatagtcgtgccggagaggaaggtcgcacccaagtcttttcctgtgcgctcctgtatggtgcgtatggcaaagagcatgttaagtgccttctggcttccctcgctgtttcccaatcccgccacacggtcgtggcgcgtgttgaaagtcagattcttgaactggtggctctcatctatgaagatgtggtcgatgcccatctgcttgaaatccaccacgtcgtccgtgcgtgactttatggcgtgttccaccttctccagcttcgcttcaaggttgtgcttgcgcttctccaatcctttcagcatcgcccgcgacacgttctttccctgctgccgtagcacttcgaggttttcctccaccgtgtcaagctctgcttgcaggatgcgctgctgcaattccggcgactgcggtatcttgccgaactggtcgtgcgacatgatgacgcaatcgtagtcgttgttctttatattattgaagaagcgcacacggttggcggtcgaaaagtccttctccgaagcgtacagaatacgtgcgttgggatatgccgcctgataggtggctgcaatctccgcaacgttggctttcagcccgataatcatcggcttgtgtgccaaattcagacgcttcatctcatgcgcggcgatgcacattatcagcgtcttaccggttcccacctcgtggtcgcaaattccgccgccgttctgtttcaacatccagacgcaatccatctgtgagggatagacgctcttgataccccggcttgccagccctttcaggttgaggtcgggaaaggtctgatgggagccgtcgtagcgcgggcgcacgaaacagttgaacttgcggttatacatcgtcacaagccgctccttgaactgcggcgactgctcttcgagccattcggagaagccgtttcgtatctcgtcaatcttggcgttggcgagttgtattccctcgctgtcgcgcatcttgatgtcgttgccatgctcgtccttgccgatggacttcatcatgtcagggcaggtgttgtgcagggcgtgttttaggaggtgcataccgtcatagttccggtaataccccttcaccagaaactcgtccgtgattttcatggtgcggtagccgcacaccaccgaaaactcgtccatgcttgcggaataggcgattttcacctccgtgtcgaacagccggctcatgtaggcggcatagacacccgtcggaatccagcgttccccgaaattgaagtccagatcctcgaaggcgatgcgctgcggctcggcatctttcagagcctccaacgcctgcttcacctccggcatacgctcattttcgggattgtcacccatccatgcctctatgcgttccgctttctctatgacatttccggcgatgaaacggtctttgatttcgtaaccggtcacgagcggattgtagtagatgcgcccttgcagggcagtgagcaaatcctccgccgtgctgtcggttatctcccgcatatagtcgagattgaccgtaccatatttgttgagcgacgcagacagggcttcttcgggagagcctacgttggcatggctctccaccgcgaaggaaacaggatgctcgaagatgtccgccttgacgaactttccgttttccatccgttccagcgaaaggatgtcgcgcccgcccgcatccatcatcactaacttcacgttctgcttggcgttgaggttgccgtagcgcatgacaaactcatcgtaacaggtattcagatgctctcgccacggaacatttgcctcgcgccggagcgattcataacggtacagacgctcgtaggcgtcacgcagcgacacatacaacaacgccttttccttctggtatcctttcaggtcgagcggctggaatgtcgccccgtatggcgtgatgtctttcaggtagccgatgttatgacgcccccggtcagccaccagcgacccttcgcgcaggtgcatctccggcgtgcggtggtaggcacgcggagaaaggtccacgacttcctccttcggcttttccgcttcgatgtcggggaaaaggaaagtccccaccgcttccgatggggtatctgtaacggcaggtgcggcgactgcctccggctgtgtttcctcctgtcgtggctgctcacgggaactttccggcacggctttcacttccgtcttttccgccacttgtttctcgttatgctgccttgccagttcccgaagttctttcctacgctccggcgtcaaacccatcatcatttcatagaaaccgttgatgggaggattggtatcccagtccagtgtggcatagatgtcgtccgggtcggcaggcttggcggtgttctccgctttcacctccttattctccattgcgggttttgcagttggagctgtcggtgtaaccgtgactttcggtttgggcggagtggactttgccgtaactgcctttttcaccgtctttttctttttggaggttttcggttggctgacctcttccgtcatcccccagaggtcaagcagggtgagctgcacgcctgcggaatattgcgggcgcggttctatctccggcttttcatctgcgggttgcggcttttctgtcggagtttccaccgtctgcgccgaggatactgtttccaattttatggcaggacgctctactttattttgaacggcaactttttcttccgttcctgcctgccggattgaacccgaatacaagcgcatggcaagcctgtaatggaaatcctcgtcgagcatacggcgcaaatccccggcgatgcctgctgccttgccctcgtgcagataaaccatagcgggcttcccgtaggggtctgtgtcaagtttcgccatcgtatgcacgatgcgttccgggtggtggatgaaataggcgttgtcggtcagggcggttttcgtgtccgtctgtatcacggtcatcagccgctcgtcctgcgacatttccttcttgctgaggttcttttgcaggacaatcaggtcactgcccacctccgtgcccgcgttgtccgtgaacaggttgttgggcaggcgtatcgcggataccagattggcctgactgaacagctcgttacgcacggaggtcttggtgctattcaataccccttgcgaggtgatgaacgccacgataccgccgtcacgcacggcatccagtcctttgagaaagaaatagttgtggatggttttctgggcggagcgtctgccgaaagagtcgctccgctgaaactccgcgtcgaacacggcaatgtcaccgaacggaatgttggacaccgccaagtcgaaataattgttgaacggtctttcgattttctcaaaaccgcaggtgcgcattttctggtcgggatagagatgcctcaagattgtacccgtgagcagatccttctcgaaagccatcacatccgcattggggctgtgccgcagcatggaatccacgaacacgccgacacctgccgacggttcgagcatacgggcggggcggacgctgtaatctgccagcacgtccgcgatggtgtcggttatctctttgggggtgtagaaagcggtcagcacggacgctttcagcgaatccacaaaccgcttgtactctgtttcgtccttgctgttctcacggataagcctgtgcagctccaccgtcggggcgaacagttcgaggtcggatttcgcccaccggacggcatccgtcagttcctttgcagggttgaggatacatttcagaccgccgaaaccgcagtacctttgaagtatggcacgctcttcggttgtcgctgtcctattttccctgtcaaggatgaatgccgtccgtatcgcctcgatgttgtcccgcagtttctgtttgcggttaaacgccatattcgtctaagtaaaggacggttgctcccgtcagctccgtgtagagcaggtcgtaatcggaagacagggcgaaattgtcatccgagaggtcatagacggagaacacgttgccgacaagcggcagcagtttcaggacaaaggcttcacgcttctcttccggcacttcatcggcaaactcgttttccacgacttcgcggaggatggcgtaacgggaataatgcagcccgcgcagcagcgtgtccatcgccagttcctgcgcaccatcggcgggatagccttcaagccgtgccctctcatacgtttcggcggcacggtcggcccgttcccgtatgaaagcggtgtcgtcagcctgttcaaacttgttcgtgcggagatagtccagcaggtacagaccgtaataggaaaagtcggtctgaccctcgtttttcttcttgttgttcattactttggatttagcggattgataattaacgggataatcggttggaaaaaggaagaaaaaggcactcggtatccctccgagtgccaccactaaatccaaagtatgagtgtaatccggtatcgaagaacaattcattactctgaacaagtggcaaagttaatactatttcttccgtcctgaaaatttcttgtcctttttagcctccgggaacacaaaagtcgtgttatattccccgtcaaaggcgacaacagcatcgaaactcttgccctgtttgctcttgaaccctttgagcagcttggtatgcccttcggtgagcaggtctttgatttcatcgtcggacagggtgcgtcccgctttcagccggaacacgggcagtccgcactccgtgttgtcgcagcgtaccaccttgccgtagaaccgcatcctgcccgtgccacacttgggacacgcgcagccggagtcacggctgccgaagagcttgtcgcacgagatcagttcggaggttatctcacgtgtgtacgcctctatctccttgcggaaggtgtcgtcggacagttccccgcgctcgatacgcgccagctccttttcccattcgcccgtcatggcaacatcggcgatgcgcatcgtcttgacgacggaattgagggcaagtcctttttcggtgggaacaagcgacttcttgcagcgttccatgtaaccgcgcttgaaaagcgtttcgatgatggaggcgcgtgtggcgggagtaccgatgccacagtccttcatcgcctgccgcagtgcgtcgtcctcaatttccttgcccgccgtttccattgccgagagcagggtggcttcggtatgcagcggcttgggtttggtctttccttcggtaatggacgagcctttcggtgtcagcgtgtcgccttcctgccagccggggatggtaatttcctctttttcctcgccatagacggcacgccatccggtttgcttcacgacgctgccttttacggtaaactccactccggcacattccgccgtgacagtggtcacatccttgacgcatttctcagagaatgcctcgaccatgcgcccggcaatcatctgatagatggtattgtcctctttggagaggaagagcggtttctcacccgtgacgagcagggcatggtggtctgtcaccttgccgtcgtccacgctgcggcgtgtcggggcggcttttgcccgcaccttgtctttccattcgggctgtgtgccgatgaaagcgagcagtttgggaatttcggcaaacacgtcttcggggatgtagcggcttcccgttctcggataggttatcaacttcttttcgtagagtttctgcgcgatttcaagcgtctgttccgccgtgaagccgtgcttggcgttggcttctttctggagcgtggtcaggtcgtagagcaagggagtttcctccgtcttctccttgcgctcggctttcgtgacagtggcgcaacctgccgcctttaccttattatatagttccatcgccggttctttctctttccatttctcggaggatgagaatttcacgacttcgccgtcgcaaccgtccgttgcgatatggagctgccagaatgcttcggacgtaaagcggcggttctcccagtagcgttcacataccatagccaacgttggtgtctgcacccgccccacggaatacgtgccgtgtccggcggcgatggataacgcctgtgtgccgttgatgcccacgagccagtcggattcgctccgcgctttggcggcgaggtagaggttgtcgtatttgctgccgtcttcgagtttccgcagtccctcgcggatagctttgtcggtgagagagctgatccacaggcgcacgaaaggagtggtgcaacccgtatagtggtagaggtagcggaagataagctctccctcgcgtccggcatcggtcgccacgatgatatgttcgcttgtgtcgaacagtcttttgatgacttttatctgcgacaccacgccgctgtcgggcttgtaacctttctccgtcctgacctgacgggggacgagcgtgaatgtgtcgggaataatcgggaggttgtcacggacaaatccgcgcacgccgtagccgtcgggcatggcaagctgaacgaggtgtccgaatgcccatgtcacggcataaccgcctccctcgaaatatccttcctctctctttgtcgcgcccacgatgcgggcgatttcacgtgccacggagggcttttctgcaatgattgtcttcatgtcttcttcttttttgttgatactttggattttattttggattcagtggcggacacgggattacattttcatgcccttgcccgttttcttctgcggcttctcctgctgctgttgctggcgggcgtccttcgggttggtctgacctttctgcaacggctctctcagattctttgtagcctcgttggtcttgccatcgttgttcaccgccacctgcgtgcggctctcgttggacggagcaacctgctgtgcattgtcagggttcgtgtcgtagcggtacgggcgtcccttctccgggttgaacttgatatacatcgtggcatggaagccctgcttgtcggtcacgttctccagcttcacggctttacccgccacatagtcggctttctgctggtcggtgaagctcacgccgctccatttgctgatggggcggatgctgccgtcctcgttcgtccacgtgttgcggcgttgctccttcttggtctgtgcggcattttccccgccctgcgcctgacttttcgatgtgtcgcctttggtttcctgtgtctgtgcggtacggggcgacttgccggttcccggcacgaactccacgccgcgctgctccacgttcacttgcagggtggtgacgaactttctgccgtcgttgcgctcgatgagcttgtcgcgtacgggcagtccggcgcggagcatgtcccgctcctgcgtggtgatttccgtcttgccgatgcgctccgggatgcgcaccctgcttgccggaatgtccgtgatttcattcgtcttgcggtcgatgctgatgtaggaggggatgatctcgcccgtttccctgtccacaatgtccacgaccctaccgagattgcccgtttcgcggaggttcttccggtcattgtcggagaatttgtgttccttgtactcatccagcttctgctccttgcggatgaagtgcggcacgaggctgatgtttccctcaccgtccttcttgaaggagaggcgggcgtccagctcgaatgattcgccgccgaaggtcggtttgacctttaccaagtcggacttgccatagttgagcatcttcgtaaggtcgccggacttttcaaggttgtcccgctttacgccccatctgtcctccagctcctgccagttgattttactctcgtcgatgggctggtagccacgtttgccctgcatctgttcggatttgtcctgttgctgttctttccgttgttccatgttctcctgtttttgaggttcttgtttctctgtctgttgtgctgccatctcttcctgcaccttcttctcatagtcggaggtgtccaccttgtgaggggcgagcagctccttgttcgcttcggggtctttcagcagttgcttcatcacctctaagagattttcagcttggtctgccgcaatgcggtagaaaccgaagcggctgggttccttgcactgccggaagaagttcttgaagaagttgtccagcacgtcgccatgtcggtcgaattgcaggaaactctgcgcgttctccgcttttgcgggggtgcgcttgggtgtgccgtccgcgttcagcccggctaccacgctgatctcgcctgtcttctcgtcacggactaccagcacgtccttttcgtcttttttctttgccatctgaaaaatgttttaatgggttatttatgaaagaaattatggatacgagccttgtagaaggctatatcttcctttttgaagtccttgatatggttggaaaggaatgtcagcacgtcctcctcgctgtaataggtcttcttgcccagcgtcttgtagggcaatgcgcctacgctgcggtagcgttggagggtgcgtttgcttatctggagcaacatgcacaaatcctgattgtcgaaaaggcggatgctttccgtgatagtgggctgtttcccctcagccttcatcgccagcagcagttcgtcctgacggtcgagccgttccatcagcttctgcatccagccctcgaagttgtttcgtgtgagcagttccatgacctatgtcctccttccttttggtttgccgcccgtgcgcagcgtgtggttgtggaacagggtgtctattgtcccttcctcgttccttactgtgttgtcctccaatagccgcagtatctcggaaaggcggtagcggcagcttccgcgtaccaccacatactcgatacggtggtcggtgcgcatacgctgcatggtgcgcttgctcacgttgagcatcttcgccgcctgtgccgtgtcaagcagcttgtcttcggtttcccgcttccgtttcttctcgtcccttgcctcgcggatgtaccctgcgatgttcgcaatctgcgccatcatctccttgtaggcggaactttccattgttatcactttcatgttcagtcctttctttttgtttctgcgacaaaattcggcaataaacaaaaggggctttaacaactcactacgtgactcacgtaagatttttgcggaagatggctccgtaacccggtcaaacggcgcaacaggcagcctttcagcggaaaacgatacgtcttgtatgccgtttcgttacctttgcggcaaactctaaatgacatgaatatggaaatagtatctatcgagaaaaagactttcgagatgatggtggcggcattcggcgcactctcggagaaggtcgccgccctgaggcgcaaaagcgacacggggcgcatggaaagatggctcacgggcgaggaggtctgcgggcagttgagaataagcccgcgcacgttgcagacgctgcgtgacaggcggcttatcggctactcgcagataaaccgcaggttctattacaagccagaggaggtgaagcggctgataccgcttgtcggcacgctctatccgcacggcagatgatttgatttattcacccactgaatccgaagttatgatgaacgagaacaacgatgtttttacgatggaagacgagccgatagcctctgtggtgcaggatatgcgcaaaggctcgaaatggctgtccgcatttctggaaagctaccgtcctccgctggacggggaacgttacctgacggacggcgaggtgtcggaactgctccgtgtgagccggcgcaccttgcaggaataccgcaacaaccgcgtgttgcccttcatacttttgggagggaaggtgctttacccggaaacggggctgcgcggggtactggaagcgaactaccgcaagccgctggagtgaggcggtttcatgaaaaagtaaacgggtgacaccttttgtggtgctacccgtttacttgtcttatggggtatgtgcaatcagcaatacccggcttttccgttctgtatgaacatcacgtatgtctgccgtttctcttgtgagagtgcctttcccaccagccatgtgcggaacaggtgggtgttgtaggtattcaccctgaaagcgaccgggatgatgatttcaagggcgtacacgtccgcgtgcagcccgttttcaagctgcatgtagcggcacacctcgtagtcgttcagcacgtccgacttgcggacggctctgatggcggcgttcactgccgggacggtcgtatggaacaatccggctatttcggtggcggtcatccacacgtcgttaccggttacgctgactgccttgtcctcgatgatgattgtgtcacgtttcatggcttttctttttagatggtgcaacctgcaaattcctcgacgccgttcaatcttgcggcaaggttctccatgtcctgattgagcttctctttggttatctttgcgtaaatctgcgtcgtctttatgctcttgtgtccgagcatggagctgaccgtttcgatgggaacaccgttggagaggaatatcgtcgtggctgccgtgtggcggctctgatgccacgtgatatgcttggtgatgccgcaacgcttggcgacggcacggataccggcaaggcacgtgttataatgcggaacgggaaatatcctgccgtccccgcacagtccccggtatttgccgattatgcggttggcgatgtcgagcaggcggatgttggacaccacgcccgttttctggcggttgatgtttatccactcgtgttcgtcgaagtaggtgcggatattctcttccgtaaggttgcgcatatccgcgaacgacagccccgtgaaggcgcagaacaggtagaggtcgcggtacaattcctgtttggcgtttttcagtttcccctccatcagcaggcggatctcatctttggtcaggaaactgcgtgttgtttcctccttcttgatttcatactcgcggaacgggtcgcgcgtcagccactcgttgttgatggcgatgaataccatcgtccgtaacgggcagacgtacagccacacggtattggtgcagcagtgcttgtccgtgcgcaggaacatctcgaagtcggagatgaaagccggggtaagctcttttagggcgatgtccttcacatggtagcggatgtcgaggaactcttgcatgtgcttgtaaacggtgcggtacttcagcagcgtgcctttggctttcatgcctgcctccacctgcttctcgtagtcctcgttgtgctggcggaacacctgcatcagcgtgtggtagcggtgttccagtccgagaaaggcgttcttcaccttctccgccgtgacgaagttgtcacgctccatgatttcctgataatgcctgttgatgcgtacccgcatcttgtcaagcatacggttcgtttcgagtgccgccgtgcttctgcccgtgacacgtccacctttggtgtcccacagtttcggatcgacagtcagtttgcagctgaactgtgtctggctgccgtccaccgtgatgcgtcccatgacgggaactgtcccgtcctttttcactacctgacgcttgaggtagtagattactgaaaatgtactcttcattgtccttaatttttgggtttcaaaattagttggtgaagagtccggtgttggtacgcaaaacggggaggaacggcgcaatctttttccgtaacctgatttttcgcatgagttatggataactcactattccttagagccttgtttcgctattcgtacccgtttgtcgcattttcgggcatggttacgaacaagtaacgtagcggcgtcaggatttggcttcggcagggattgtaatggcttcacggattatcgccacttcaaccaaaacccttgtaactcaattctatcactatatctttccgcatttcacttttttgtagtaactttgcataataaaattggactgggaaaatgagtacgaaagaggtagagtgggacgggttgcctgtcccgaaacgatactgggcgattcttgccattgccatgggaattacggtttccgtgttggacggcacgattgctaacgtggcgttgccgtctatcgcggaggatttgcaggcgacgccatctatgtcaatctggatcgtgaatgcctaccagttggcgatcgtggtttccttgttgtccttgtcttcgttgggtgatattttgggctatcgacgggtatatatcgggggattgctcatatttagcgtgacttcattagcttgtgcgctttccaattctttgctgacgttgacggtagcccgtgtatttcaaggttttggtgcggctgctttggcaagcgtgaatacttctttgatccggattatttatcccaaacgacatttggggcggggaatgggtatcaatgcgctagtggttgccgtgtcggcggcaggggggccgacgattgcggcaggaattttgtctgtcgcctcttggcagtggttgttcgcgataaatgttcccattgttatcgtggctttgattttatctttccgttttttgcccgtgaatccggtaaaaagaagtgggcggaagtttgattggattagcgggttgatgaacgcttttacattcgggttattgattttctcgatcgaggggttcactcacggggtgagtttgtccgtgttgctcccggggattggggtggttctgttggttggttactttttcgtgcgtcgccagttgtcgcaggaatatcccttgttgcctgtcgatttgttgaagataccgattttttcgttgtctgttgggacgtccgtgtgttctttcgtggcacagatgctggccatggtttctttgcctttctttttgcagcacacgttgggactggatgaggtggcgacgggattgttgctgaccccttggccgttggcgacgatgatcgcggctcctttggccgggaggttgatcgaacgggttcatgccgggttgttgggtggtgtgggattgtcgatattttccgcgggattatttttattagctgtcttcgcggatcaggtttccaacgctgggattgctttgtttatggctatgtgtggattcgggttcgggttattccagacgccgaataatagtatattaatttcttccgcgccacagaacaggagtggcggggctagcggtatgctgggtatggcccgtttgaccggacagactacgggcgcttcgttggtggcattaatgtttgttgtttttccggtggacgggacgtatgcttccctctattttgctggagggtttgccacgcttgctgctatcgtgagttttacccgggtttccttgccggaaccggagatgctgatgacgacgaaaaagaagaagacagtatgatttaaaaagaggtttctacataagattgtttatttagaaaatacagttgttgattaattccgtaaatttgtgtaatggcgttttcagcgtgtaactaataacaaatttatgaaatcgagagatattctattttcgagtctatttgttgttttttatttggttctctttttttctgtagaggcgcaagttaagtcgagcagggggacgttgggttacacgttcgaggagaaaaagcgagatgcacggacttcgggagatccgtttttacaacgaggggacacgttgtacttgctttatgatttgacggattctttgcaaatgagaacgggagaaggtgttgaatggtggcaacgtttcttgacgaaggaggaaattgcgattgtagaggacccttcaaatgaagatatgtttgatcttggcgaaccggatatgtttcttgtgcggcgttggaaattgagtccgaaaaaggaattgtcatccgaggaaattagagaactgaccttgacgacacgtgacgaggtaattgctttttatgaacgggaagtgaaacgaatggcggagaggaaagccaaggataaaggatttaagatatacgttcgggtttggggatcttttaacttggaatggtattttgataaaatatatatgattattccaaaaacggatagttcggctgtcatgtacgatatatataccttgtgaatttatgatttttgaaaatgggagcaaggcgagagtttcgttatagtttctaggaaatctatatgaaagctaggatttttgtctaattttgcgtgattgaataagaatgcttaattagatctatgggtatagaaaggacatggaaaacgattgtttttctaggagttatattcgtcgggagtgtgttgcgcgtagcaggacaggggaacgatagtctggtgaacgtgtcaccacgtaagttcgtgcatggtttgcgggtggagggacgtccggagtatattttcccgacaagttcttttctgaagggggcgaatgccgaggggaggattatccggggagctttttccactcacttgaaatatttgttccgttatcgcccggggagtgttgacgagcgtatctatggagatgtttatcaagggatagggctcgggttttataattttggggaatcccggcagttgggaaatccggttgcgttttatttgtttcaaggggctcgtatctctagtttggctccttggttgtctttgcattacgagtggaattttggtttgtccgcgggatggaaaccgtatgactcgtattataattcgtataacacgatgatcggttcgaaggtgaacgcttatattaatgctaatttttatttgcgctggaggttgtccccgagggttagcctgctttcggggttgacggtatcgcatttttccaacgggaacacgaagattcctaatgccgggttgaacacgatcgggggaaatatcgggttagagtgtaatttctaccggaaggatgatttgaagtcgttggagaggaaagtggctttgatcacacaaccttttcgacggcatttcacgtacgattttgttttcttcggttcttggcacgatcggctggtgaagacttccgacggattttccccttccccggaggcttaccccgtgttcgggtttaattttaccccgatgtataatttgaattataaactccggttaggcgtgtctctggatgggacgtttgacgggggagctaatttatacacggatggggatgtgtacgggagtgtggataagtcagacattgttcgtccccctctaggggatcagtttgccctagggctttccgggcgggcggagtacgtgatgcccttttttgtcgtcggagttgggatcggggcgaacgtgatcgggaagaatgatctgaatatgttctaccaactgttgacgttgaaaatagccttgtcccgtgcggtatttctgcacgtggggtatcgtctacaaaatttcaacgaacctaatttcttgatgctggggataggtttccggtttaacgggaaatataccgctttttagaattgttattcccagaatattactgagaagttgttgaaaatgtattacggtgaaaataattatcttttcagcccgatttccttttggctggcattattttgtacttttgtaaataaaatgagagccgaatggatataagtcataattatgcggaggcggtaaaaactataaaaggagcgatattgcgtagtcagtatcgtgctatttcttctgtgaataaagagcaactttctttgtattatggtgtaggacaatatgtctcagaaaattctcgtgatggattttggggaacgggtgctattgagacgattagtcagcaattacagaaggaattaccggggttgcgaggtttttctgctgctaatatcaaatttatgcgccagttttatgaaagttggagtgggcagttgaaatcgctaaccgcggttagcgaagtggaaaatgacaaatcgctaactacaattagcgaaattgatacttttcaattggtgggaaataaagatattgatggagaagtttttgatttgtccgtatttttgtctcttggttttacacaccacatgatcattgtccgtaaggttcaaacgcttacagagcgtttgttttatattcgccaagctgtggtaaataagtggagtaaagaggttttgacggcaaagattgcggatgacttgtttcatcataagggagaattggcacataatttcattcaaactattccggatgttcgacaatcattgaagactattgaaatgttcaaagatgaatatttgctagactttattaatgtggaagaacttggggaacgagacaaggaggatattgatgaacgagtggtagagcgggaaattgtgcataatattaaaaaatttatcatgacttttgggcgtgattttgcatttgttggtaatcaatataagttggaagtgtttggtgtagaacattttcctgatttgatattttttaatcgggaactcaatgcattggtcgtgatagaactgaaaaaaggggcgtttaagtcttcgtatttagggcaactatgtacctatttacgccttgttgatgatcaaatgcgtaaaccacacgaaaatccatctattgggatagtactttgtaaaagtgcagataagaagtatgtagaatatgtgattcaagattatgataaaccgatgggagtggtcacctataaaacttctgatgatatgcctgaaaggttgaaacaggcgttacctgacatggaagaattgaaaaaattgttgtagttggggattagtttccggtttaacgggaaatataccgctttttagaattgtttgtattatacggggtggtagtgtcgggatttttggctaaatttgtgatatgccttttaggggtgtgttaatatttaattaagtgtatatatggcatttacgcattttcatgtacattctcagtattctattctcgacggggcggcgagtgtgcccggtttggtggagaaggcgattgccgacggaatgaaggcaatttcgttgacggatcacgggaatatgttcgggataaaattattctacgatacttgtcgcaaaaaggggataaaacctattttgggggtggaggcctacgtggcccgggtgtctttgtataacaaggagaaaccggtggaccgttcgggagagcatttgataatcctggccaagaatctgaaagggtatttgaatttgatcaagctttgttctgcggcgtttgtggacgggtattattatcgtccgcgtattgataaggctttgctggagaagcatcacgaggggttgattatttcgtcggcttgtttgggaggtgagatttgccagaagattatggccggggatatcgagggggcggaagcggctgccttgtggtacaagaatttggtgggggaggattattacctggaggtgatgaggcatccggcagaatcagccaaggagagagcggaggtttacgataatcaggtgaggtgtaacacggagattctgcgtatgggcgagaagttggggatcaaggtgattgccacgaacgatgtgcattttctgaatgcggaggatgcggaggcgcatgacttgttgatctgtctgaatacacgcaaggatttggatgatcccaaccggatgcggtacacgcggcaggagtggttcaagacaacggccgagatggaagagttgttcaaggatattccacaggtaatcgagaatacacaggagattgttgataaagttgaagattataaactggattccgacccgttgatgccggttttcccgatcccgccggagatcggtacggaggaagagtaccggaagaaatacacggaagaggatttgttcaacgagtttacccgtaatgagaaaggtgaggtcgttatgagcgaggaggatgctcaaaagaaagtgaagaagttggggggatatgatcgactttaccgtattaagttggaggcagattatttgaaggagttggcgatgaagggagccgtgcggcgatatggtgagaatattccaccggatattatggaacgtttgattttcgagttgcatatcatgaagacgatgggtttcccggggtacttcttgatcgtgcaggattttattcaggcggctcgtgatatgggggtgatcgtgggaccggggcgtggttctgccgcgggaagtgccgtggcgtatagtctgggtatcacgaatattgatccggtgaagtatgatttgctgttcgagcgttttttgaatcccgatcgtatctcgctaccggatattgacgttgactttgatgatgacgggcgtcagcgggtgttggagtgggttacacagaaatacggggcggataaggtgtcgcacatcgtgactttcggtagtatggctgccaagatggcgattaaggacgtggcacgggtgctgaagttggatttgtcggaggcaaaccggttggccaagatggtgccggaaaccccgaaaatcacgttgaagaaggcttacaaggagaatcctgatttggaaaaagaacgggagtcctcgaacccgctggtagcaaaaacgcttcatttggcggaaattttggaaggctccgtgcggcagacgggggtacacgcttgtggtatcttgatcagtcgtgacccgttgacggaacatatcccgattatgccgacggaaggggaaagtttgatgacgactcaatatgacggtcacttcgtggagccgatcgggttgatcaagatggactttctgggattgagaacgctttcgattataaaaacctgtttggataatataaagaaatcccgccacgagacactggacgtggatgcgatttcgttggaggataaagagacattcgaattgttttcaagaggggagactaccggtctgttccagtttgagtcgccgggaatgaaaaagcatttgagggcgttgaagccgaaccgttttgaggatttggtggccatgaatgccttgtatcgtcccgggcctatggagtatatcccggattttatcaagcgtaagcacggggaggctcctatcgagtacgatcacccgatgatggagccttacttgaaggacacgtatggtattaccgtttaccaagagcaggtgatgttacagtcccgcgcattgggtaattttacccggggtatgtcggatactcttcgtaaggcaatgggtaagaaacagattgacacgatgaaccagttgaagacgcagttcatcgaggggtgtaataaaaacgaggagttcgtgaagggatgcaaggagatggggaaggaggtcaacccgttggttgataagatttggggagactgggaggcatttgcatcgtacgcgttcaacaaatcgcattcggtttgctacgcttatattgcttaccagacgggatttttgaaagctcattatcctgccgagtttatggcggccaacttgagttgtaacttgtcacagattgagaaggttacggttttcatggacgagtgtaagcgaatggggttgagcgtgctggctccggatgtgaacgagtcggatgatgatttcacggtgaaccacaagggagatattcgtttcgggatggccggaatcaagggagttggcgaggctgccgtacactcgattatccgggaacggaatgctaacggggggtacaaagatcttttcgatttcttcgagcgtttggattacaagacggtgaacaagaagacgttggaaaatctgattaccgcgggagggttggatagtttcgggttggatcgggcgcagtatttctatatgcctgacggtcacacgacatttcttgaaaatctggtgaattacgggcagaaaaagcaacaggatagtttgatgatgcaggcgacgctgtttggggggatggatgaatatgacgtgaaaaagcctaccattcctttgtgtgaaccttggacggacgtggagaaggcgcgtaaagagaaggaattgatcggtatatacctaacttctcacccgttggattcgtataagttagagatcaaggcgatttgtactcctttggagagtctgagcagtgatttgagttcttacaaagaccgggacgtgacgattgcgggaattattgttgccatgcgagaggggaagacgaagaaagggaatgattttggtattttgacaatcgaggatttcacgggttcttacgagttacctttcttcggggaggactatatcaagttccggaattattttattctggagacgtccatctacatcaagggtagagtgcaggaaaagaagtggggcggggccggagagctgacttttaacgtgcagagcatggatttgctgagcgttatcagcgagaacctgattcgctcgatcacgttgcaggtggacgtggaaaagctgacacacgagcttgtgttggagatacataaccagttcgtgaacgagaagggtgatctcccgttgaattttattttgtatgacgggacgggacaccgggtaaagatgttttcaagaacctgtaagatagggcgttcgagagaattatatgaatattttgaaaataatgatgctattaaaatgaaaattaattaatttcgccatgtcaaagcgttggatcatggcggaacttaatccaacgcttttagca

SEQ ID NO: 19 - DNA, 22874 bp, Butyricimonas faecihominis
gttttccctgtacgtattaagtagcggggctgagaatcgtgtggttcagaaagaggatgagaaagaggtgtctatagatgaatttattcataaagataccccgaaagatgccgggttctttcatgtttatgtacaggatggaagatattatctggaagtaccggatgataaacttgaacgggatattctggtggccgtaacgatcataaagggaacggcacagaaagagcggagtacggatgctcgtttcgggtatggcggggactccgtgtatgatcggttgattcgttttatcaagaatcaggatagaattgaaattgtatctcctcaggtattttacctgggagatactcccgccttgtatgatgattatattaaaaatgtgatctctcccgtgatgtattctttggagattaaagccaaatctgccgatagttatttggtagatattaccgatttgtttctgagtgattgtgatttgttttccttgaaaggagcgaaggtagccttaaaattaggcggttatcagcaggagcagtcctatgctttggatgtaaaagcttttccggaaaatataaatttccgttccatgcgtggttatgctgttgacggggaagtgaaggatggtgggtacacttcttctctttgggaggtgggggcgtcatggtttcttttaccggagaaaccgatgagacaaagaatgtttgatgatcgggtggggtattttaccttcgtgttggatgggatgacgaaacggaatgaccagatggaaaaagcggcatttgcaactcgttggcgtttggagccgaaaccggaggatatggaaaaatatttgcgtggagaacttgtggaacccgtgaaaccgattgttttctatattgatcgggcaaccccggaatatttggtgccttattttataaaagcggtaaatgcgtggcagggtgcttttgagaaagccggatttaagaatgcgatttacggaaagttagccccctcgccggaggaagaccctgaatatagcgaaggtgatattcgttatccgttagtatcgtacaaagcctccccgattccgaatgcttacggtccgatggtgtttgaccctcgatccggggaaattatcacctcgcatattgcaatatttcattcggttctggatttgttacaacgttggtatttcgtgatgtgtggggcggttgattcccgtgcaagagaataccctctaagccatgaggtaatgggagaactggcggcaaccgtgttgactcatgaagtgggacatacgttaggacttcggcataattttatcggtagtacggcctatccggtggatagtttgcgtagcaaggcttttatccgtgaacatggtttgggaacttccattatggattatcaacgttttaattatttggcacaaccggaagatggtttggaaccgcaagatttattgcctcgtatcgggatatacgacgagtttgcgatagaatgggggtatcgttgttttcaggagacaaataatctggtggaaaatgatttgaagttacgtgcttgggtggatgaaaagcggaaggacccgaagatgttttatatcgtggaaacggattatagtgatccccgagtacaatctgaagatagtggggatgacatcatcaaggcgaatcgcttgggaatgaaaaatttgaaatatatcatggagcatctggaagaatggacaaaaacgagtgatccggattattacgctttacgaagacgctatctttccgtgttgagtcagtaccagaattacgtgaaccacgtgatccgttacgtgggtggtagttatacggataacccgacgagggaagaagagagtttaacggtgtatcaacctgtacctaaggaaaaggaagaggaggcacttgctttcttggaagaatacgtgtgtcgggaaccggaatggctttttcggcccaatttaatggaaaagaccggtattaattttgaatattatgagcaggaaccggccaatagtatgataactaaattgttattaaagtattcgatattacataaaaaccggcaattaaacccggatggtttgactattgacgagttgctggatcgtatgtacgtgactctctttgaagaaaagggtaggagtggagaattatcccggtatgacagggcattgcaaaagggatttgtgcaggatcttgtcgtgaacggggagaatccgacgactttatttaacggggttggagttcgtatcaagcaactggtttcgaaaataaaacaatatgtgttgaccgcctcgggggagggacaagatgcgttgacggtcagtcactacaaaacactttataattttattactctgtgggagagcggaaagaataagtcattgattgaattgaactaaatatattagggatgaaagtattgaatgtatgtttgttactgatagtaactttattgatgtctcgtccggttgttgcgcaaaataatgcagaaccgatgacattcagtcaatttaaggaacagaaagatttacaaataaataacggtttttacacggtttatcgtttaggagataaatattacttggagattccaatggaaggaatgggaaaagaggttttgatcacgacacaagtggtgcggggatattcggcttttctttccgagacttcaggagttgtccggttttcgatcgggaaaaacaatcgagttcaagtggttcgtaaccgggttacggatgttgctgcggattcaactgatttttgtatggcgaatgcgattcgaaaatcaggacttgtaccggtggattttaccttgccgatagcggcttggggagaagataagcagtcggtgattattgagttaacgaacgaattgaataatcccggaagtgggttatttaaggtgagttcttatagtttattaagccatccggatcctaatctttctggaattgacggtttccggatgttgaatcaaggggttgttttttcggtgacacgtacccagtcggatttttatgcaaatcctcaaatgcaacagggatcggatgtcgcctctacttttgcattggaaatggttattcagcaactgccagaacattccgtgaccttgaaagccagtcatccggcttatggttttgaaacaatcgggattaccgaatatgataccaagagatacgtggcccgtaaaaaagagtatatacagaggtggcatctttcggctcccgtgaaggagttgcgaaaacagaagaaaggtttgactattgaaccggaaaatcagatttgcgtgtacatcgatccgatcaccccggccccttttgtcgagagtatcaagaaggccatgcaacaatgggaaaaagcattcgagagtgccggatggaagaatgtcttccgttatagttcggaggcgaaagatgcagccttgacttaccggacgattctttttcgttggggaaatgcttttaacgatgttaatttttccatgattgccaatcctgtgaatggtgaaatattatgtgcccgaattaacgtgatggatgccatggcagatgaattgttaggcacttatttcttgcaatgtgggtggctggacgggagaatccggaaggatcttcatagcttgggggtacggcaagatgtgttgaccgttcaactggcatcgattttggccaaggtattgggaatgaaacctaataaagccggaaataccgtttttaccccggataatattcgttccgagaaatggttgaataaatatggaatatcggcatcaattacttccggtatggtgtttaattatctcgctcaaccgggtgaccgggtaagtgtcaagaatctttttcctcgtgtttccatgtatgattatgatgcgattaactatgcttatggcaatagtgatgccttaccttccatgcaggcggctttctatgccccggaggataaatgggacccctatgctcaagacggtttcttgtcaaatgatattttgtcggcaagtgtgaaaggcatcgaatcggtacgggagatttatcctcaactgggagaatggatgaaccagttaccgaaagatcagaatacatggaaaagtgtatccgatttctcgctgaaagtgcttgcactataccagacttatctgactcagattgtgaaattggtgggaggtcgttctattcgtccggtcataaaaggagtgaatgaatctccggttatttatgtcccgagagaacttcaggaaaaggctttacaatatttagagacagaaattttgacacaacgtccggagtgggttcattccaaagaaatgcaacaaacggggacatacgatataaaccatatgatggtaggattggccgagaaaatcacgcaacattttatagatccgaaagtcatcacttccctcgtggcggcagaaagtgcatacggggagaatgcgttcacggcgaaagaattattcgcgtatgttgatcgggttatttttgaaaattttgatacccggaaggctgttactacctataaacaaggaatacaggcttgttttatttcggattttgcccgaacaatggcacagaataacatctcttttggcttgggaaacgagtctgcgggagtccttcatgcctatttcgtggaactggcgagaaaagtgaaggaattgagtgaaactcaccaagattcccttacccgggaaaactaccgggtgatgctgatgcgaatgaaccgagagtattttgataaacaataaggatatgagaaagattttatttttgcttgtaggactgttggcatactgtcaggcagagtcacaaaacagggaaatcgagtttgaaaagtccactttgcaggatgctttaaataaggctactgccgcgggaaaaatggctttcgtggattgttacacggaatattgcggcccttgtaagacaatggcggcgttggttttcacgttggatagtgttgccgacttttttaattccaattttgtaaatgttaaattggatatgctgtcggaagatgggaaacaatatgcggataagtacaaaatcggggcctatccttctttcctacttttgaatggtaagggtgagttgctttataagtttgtcgggggaaaatcggcagatgtgtttatggccgaaattagaaaggggatgaaacctgataaccgggtgaaatcaatggatgatacttacgccacgggtaagtattccaatgattttttacgggagtacgtgcagttgaaattgcagttgcttgagaaaggggaaagccttagattggggaaggagtatttcgataaaatttcgccagaagaacgtttacaaccggagaactggttcttgtttgcggatcggactctgggcgggatcaatagtacgaatatgcgatacttgcttgagcattggcaggatttcgtgagggtacaaggagaagaaaaagtgtatgaacgaattacagctttctaccgggatatgacggaatgggtgttacaaggttggtatttccgggattttgaacgtaatccggaggatttcgtgtactatcggcaacggatttcggcaattcctctgccttgtcagaatgattacttggttatgatggacgtggcgaaagcggtcaccttaaatgattccttgacggttcggggacttttggaagatcatgttgccgattttagcaatgaaaatcaacaaatcatgttcggtgggatgggatggttcccttcctataacggggtatatcatgaacagttactggaaattgcccgaaaggtggttcaaggtggttcaacctctaatttggccaactatttaaagactttacttaatccggatgaggcatacgtgggcgagaaatatgacgtgcagaatctgaaggataagatcggttccacgatgattgtacctttctttcacccggcgaaaccattgttttggtactcttacgagaaacaaccgggcgagagagcgtattatgcctatgacccgaaggaggggaaacgagaggtgtataactaccggattatagatagtttggtccgggagatattgccgggggaagaagagagaatatattataacccggaatttgatgataacgggttggtggctaaattagaggtcgggggaaagatattcgtgtatgatgccaagaataaggctttgattccttctgaacgcaagaaatatccttctattcgtccgtatggggtttctcccgatctgagatacgagctaatcgtgaaagagtataatctttggttggaagataaagagcaaaagaaacaggtacaactgacttttgacggggataaggattacgagtttgaaacggcaaataccgaatggttgtcggatgacgggactttttatctcacgagagaagacaaacgaaatatccggacgtttcctctggtgtattcacttcgggaaccggcaccgacagtcagcgagtacaaatatgaattaccgggagataccgctgttttaaaacaagagttgtttatcgggaacgtaaagacggggatgtttaaaaaggtggatgtggtgaaatggcgggggcagctattggaagtgctgaaagtggcagatgtacaggatcgggtctttttcatccgtaaaaaggggacccgaaatgaatttgaattatgctcggtcgatgcgaaaacaggggaggtaaaggtgattttgcatgaagtgagtaaaccatatctgaatgaagagttatttagttgccgggtattgaatggaggaaaggatattcttttgtggtccgatcgttccgggtgggggcattattatcactatgatggtaatggcaagttgctgaatgtggtgacttccggggaatggacagcgggacgcataatgaagattgacacggtgaaaaaacagatttatctgtacgggttcggtaaggaaaaggggagaaacccgaattatacttatttgtatcgtgtaggttttaatggaaaacgattgaccttgttaacccctgaaaatgcaacacatagcacgtttgttcatctgggaggaggtctgatcgtggataatttttcccgtgtagacacggtaccacaaatttccgtacgtgatataaacgggcgcttgctgactattttggaaaaagcggacgtttctcatttgttggcgtatggttggaagtacccggaacagtttaccgtgaaggcggctgacgggaaaacggatctttacggaattatgtggaaaccttatgattttgatcctagcaagaaatacccgatcgtgtcgcaagtatatccggggccacaaacggaaaccgtgtggacggattttaccgtgctggatcgttataataatacggctttggcacaaagggggattatcgtggtgtgtttcggacatcggggcggttctcccttccgggacaaagcgtacgctacctacgggtacgggaatttacgggattatgcgttagcggatgacaaggcgggattggaacaattgggacgtaaatattcttttattgatacgaatcgggtaggtattttcggacactcggggggtggtatgatggcttttgctgcaatctgtacttatcctgatttttacaaagtggctgtggcctcatcgggtaatcacgataatcgtatttataatcgtacgtggggagagacttatcaaggaatcggggacgattataagtttaccgtgaaaacaaatcagaaactggcaaaatacttgaaaggtcgtttacttctggtgacaggagaggtggataataacgtgcatccggctaacacgtaccgggtggtgaacgagttgattttgcaaggaaaggatttcgatttgttgatcttaccgaatcaaggtcatgcttttgatgggccttataaatcttatttcgaaaagaagaaaagggattatttcacgaaatatttactggctgaataaattgtaatacgaatcgtgtaagtgtgaaaggagatttccggtaaagcggatttctccttttttaatatcgtgggaaagaaaggttcttgaaataattctatctttgcagcgtcaaattcagatggtcattatggcaagaaaagaaattacatatactccctcggcagaggtttgttcgaaagagattcatattgtgttggaagacgatgtgatcgtggaagtcggtttcaagaagggatgtgccgggaatacgcaaggggtgtcggccttgttgaaaggaatgaaaaaagatgaggccatccgtcggttgcggggaatatgctgcggacgaaagtcaacttcatgtcccgatcagttggctcaagccttggagaatatggcgtaatttaaccgtgtttctaccgatataattggcagaacgttgaacaaagccgagataaagacgacacaaagctgagatacagccgagttgtgtcgtctttatcttttggggatgtcttggatgtgcatcgcctaagccctaaacagggataaataagggtagaaaatagtaccgttttctatttcaggtattctataaagtgtaagtaaaacgtgtggtaatatttattcaaaactatactttatggaagaatcaattgttaaggtaaagcatttatctcatcgttacagtgtacaatgggcgattcgggatattaattttgagataacggaaaacggtatttacggtttattgggttctaacggggcgggtaaatcgacgacgatgaacattatgtgtggggtgttgaaacagacagaaggggaggttttcatcaagggagtaagtatgagagagaacccggtggaggccaaacgctatatcggttttttaccccagaaaccacccctgtataatgatttaaccgtggaggaatttttggctttcacggctaatattcgtcgtattcccacgggagaggtggccgaggcgattaaggtggtgatgggacgatgcgggttaagccatttccgcaaacggttggttcgcaatctatcgggagggtatcagcaacgtttggggatagcccaagcgattattcacaacccggcatttgtcgtgctggatgagccgaccaacgggctggacccgaatcagatcgtggagattcggcatttgattaaagagattgccgaggaacgtacggtgattctctccacgcatatcttgtcggaagtacaggcaacgtgtgattatatccggatgatcgaggaaggacaggtcgtttttgccggaacggtggaagagtttgataattatatcgtaccgaacacgatattcgtgagtctggcatcggccccgccggtggacgagttgaagatgctttccggtgtggaggatgcggtgagcatgggaggcatggattaccgggtaaacttttcggattcccgggaggcgattacccagatcgtggaggcaagtgtgacccggaattggcaattgttggagatacgtatggagaagagttccatggatagcgtgtttgccgaattgtcggccaagagtaagaaccgctaaaaaggagagcttatgaaaatgatattcaagatagcgaagacggagttacagtctttgttttattcaccaattgcttggttacttttggtggtgtttgcttaccaagtcgggatgattatgtccgggatgctggaagatattgtggttcggcaggccatgggatatgaatcgtggagggtaacaaccatttttggagaacttttcgggaatgtacagggaaccctgtatttttatattcccttgctcacgatgaacatgattagccgggatttgagtggcgggacgatcaagttgttgcaatcggctcctttgcgtaatgccgaaatcgtgttgggtaaatacttggcattgatggtattcgggttggcgatgatgggtgttttgttattttacgtgcttttcggggtgtgtacgattcaaaatatagatttcccttacgtgttgacgggaatgttggggctttacctgttgttatgtgcatacgcggcgatcggtttgttcgtgtcgagtttgacttcttatcaagtgatggcggctttcgggacgttgttcattttggccatgtttaattacgtgggtggtgtgtggcaggattacgagtttgtgcgggatattacctactggttgtctatacggggacggacggaagagtttatttacgggttgatttgtagcgaggatgtgttgtatttcctgatcgtgattttcctgttcctgacgtggacggtctatcgcctcatcaaccgggtgcagaaacggagttggactactcgctgggggatttatctaggcgtgttcttggtgtcgatgatgttggggtacatgagttcccgcccggcattgatggcatatcatgattctacccgtaccaagagtaattcattgagtaaaagtagtcaggagatcgtggcattactggatggaaaagtgaagatcacgacttacacgaacttgttggatcgggacttttggagtacgttacccgatcatattaattttgataaagagactttccggccttacacgcggtttaaacctgacatgaaaatccggtatgtttatttttacgataatgcgaataatccggagttggaggaacagtatcctgatatgagtgacgaggaacgggccaagcaaatcagtgaaaattatggtgtgccgttctcgatatttctggccccggaaaagatgcgggagatagaagatttgagtgccgagggcaacaagaccatccgtgttattgaattggaaaatggtcagaaggcgtatttgcgtttctatttccacggtggttggaaagagtctccgggagaggccgagatttcggctgcgttcaagcggttggtgtcggaagtccccacgatcggtttccttgccggacatggcgaacggaatatttaccgggagggggatcgggaatacaagcggatttccagtgataaaaatacccgctcgtcaatgattaatcaagggtttaatattgaagaggtttatttacattcatcccttccggatagtattgatattctggtgatatccgagttgagatcaccgttatcggcaggagagatgaactatttgcaggagtttatcggtcggggaggaagtcttttcgttttgggtggacccggacgtcaggaattgatgaacccgattattgaacagtttggtgttcgttttatgccgggccaactggtgcaacccaccccgttacttcaggcggatttgattcagtccgtcccgacggatgaaggtgttgcgtactggtccgatctggattatatccggaagaatgaagggtgcgtggctatgccggggtgcgtgggattagaatatactccgatagaagggataacagttgttccgttattttcaaccgatacggcggggtgttggaatagaatcgtggcgacggatttcgtgcgggattcggtgtattatactccagaaacaggagatcaagcgggaattttcacgacggcattagcgttgacccgtgatgtgaacggtcgagaacaacgggttctcgttgccggaaacacggattttcttagtaacggggagtttgccacgggacggagagaggttcggaattttaacgggatattgaaacatgccgctttttactggttgtcacatgaagagttacccgtgaatacggcaggagatagccctatcgaccggaaattgtatatcggtgaggccgcgatggaggtttggtctatcgtgtttatggtcgtgatacctgttatactggctcttgccgggatcattatatgggtacgtcgtcgcgggcgttaatctttaaaagtttgttttatgaatatgatatataaaatagcaaagaccgagttacagatgttgttctattcgcctgtggcttggctggttttgattatatttacgtttcaatcggggatgattttctccgggatgattgaaatgatcgagcgggaacaggctatggggtatgacccgctatttatcagttcttcgcttttcaatcgactgttctatagcgtgcaagattatcttttcctgtatattcctttgctgacgatgggattggtcagtcgggatctgtcgggtggaacgatcaagttactacattcttcgcccatgacgaacacgcagattattttgggaaaatttctttccatgatgatttttgccttgttgttagtggggatatttgtcgtttacgtgatttattgcctgttcgtggtggagaatttcgatgtgtgctatattcttacggggattctgggcatttatttgctgatatgtacgtatgcctcgatcgggttgttcatgtcgacgatttcttcttaccagattatcgcggcggtggggacctttgtacttttgactttcttgaatttcgtgaacggcatttggcaggatattgatttcgtgcgggatgttacgttttggttatctcttcggggacgagcggagagtttcacgggaggattgatttccagcgaggacgtgatttattttataatggttccggggatgttcctttggttctcgatcataaagttatcgtcccgggtaagtcatagttccaaggggcggaatgccatgaagtacgtgggtgtgtttttggtggtggctgttgttggttacttgagttcccgtcctcatttgatgggatatgttgacacgactagggaaaagagccgaacgttgaccccgaatagtcaggagatcgtgaaaaagttggagggaggtctgacaattacaacttatagtaacttgctggatgatgattttatgaaagccatcccccgctaccagaattacgataagagtaatttccgggagtatattcgtttcaagccggaaattaagatggaatacgtgtattactatgattcggttcaaaacacgaggagaaggggatttttggctgatcttcctttggaaaagagggcccggcaaattgctcactcccacaaaatcaagttttcgaggtatttaagtcccgatcagattaaacaggttattgatttgactccggaggataatcgttttgtccgtcaggtaacgagggaaagtggggagaagatgttcctgaggcaatttgatgacatgatgcgtgatccttccgagggggagatttcggcagcctttaaacggatggtgatggagctgcccacggtcgggttcctgaccggacacggggaacgggatatgaatctttatagggaccgggattatgcctgtttcgcacgtgataaacggtttcggtatgctttgttgaaccaagggtttgaggttcaagaggtgaacttgaacgaggatattccgacgttagttaatattctggtgattgccgatatggcaaaatccttgaccggggaagagatggaacgtttacagcggtatattgaccggggtggaaatttgtttatcgtgggtgatccgaatagccgggagtacatgaacccgttgacgcaactcttcggcgtggagttcatggaaggggtactggtgaaaccgacggagaatttccagcctgatttggttatgtcccggccgacagctggagctttggaattatcgtatttctacgagacaatggatagctggaaaatgagtgctgttatgccgggtgttgccggattgaaatatgccgaggataaggggttcaaggtgaccccggtgttgcaaaccgatactcttggagtgtggaacgagttggaaacgacgaactttatagatgatacggttcgctttaatcccgcagttggggaggtagaacagttatacacgacggcagtagctctggtccgtccgatgggaggtcgggaacaaaagatcgtgatactgggtgatgcggattgcatcagtaacgtggaacttttcaaatcccgcgaagagattgaatccggtaatttttacattatcctaggttcttttgcttggctttcagacggggaggctcccgtggatgtgcgtcgtccgaagtcgattgataaccgtttgttcttgggaaagacgggggtaaaggtgacggatattttattcaaatggtttatcccgattgttctgctgataggtgcgattttcgtggccatcaggagaagaggaagataattttcttggaaaaagtagtaccaatttgtgtttcaagtattctttaaatagttatgagtatagatagcatacatatcatattggatttgattctgaaatcttgggcagggacgctcacgcaaccggaagaagaacggttgaacgagttgctggaggacccggagtgggcacggctgaaacaggatttggaagatgatcgttttatcatgggacgttttaaagaatacgagaaatacgataagattgccgatttttcatgtttcttgaaacgaatccgcaaacataagaaacggagggtgttgaccgcaagtgtccgccgtacgatttacgtggcggcctctttacttgtttttgtcatggccggtggcgtgtggtggtcggaacggacagcgatgatttccccggaagaggggcgggaaatcgtgatagagacgacgattgatcggaatagtgtacggttaattttgggggataaccggatgattccgttgactcataaaaacgaggctatcgtgttaggcatgaggggtatattacattctgagggcctgagaactttgaattacaagtacgtgaagagtgattctctcgaaaacgtgtccgagtaccacacgttgattgtgccgaagggagaaaggcagaaggttattttttctgatagtagctgggtgatactgaacgcgcagtcaaccatgaaatacccggtggcgttccgtggggaagagagaaaagtgtacgtggagggagaggcctattttgaggtgacaagagatgaggaacacccgtttatcgtgtcggtcaagaattttgacgtgcgggtgctgggaaccagctttaacgtgatgagttatgatgatgaatttgcatcgagtgttactttgttatccgggaaagtggaaacgacttccgggcatgatacggttcggttgtcaccgggcgagcaagtgtcgataacaagtgataaccggatgacggttcaaaaaacagatataaatgtcgtagtgtcatggatggatggaaaattcggttttagtaacgaaagactggatgtgatcatgaggaagatttgtcgttggtacgatgtggaagtactgtatgcggttccgggaatcagagaacgtcgctttaccggggcgcctgcaaataatatgccgttgaaagagctgttggaggcattaagtaccacgacaaatctacaattctctttacaggatggagtgataaccattaaacaaaattagaacacgtaagaaattaacatttaaacatgaattaatagaatcataggtattctaaatgggagaagtatacctactaactaatctacgaactgtggtgaaacccgtgcgggagatcgtaatgggatatgatgtcaagcaaggtttcatccttatgaaaattaaaactgatctatatgaaaaagaagaagtctaatctatctgcaaaacgcgggagagttggcacgttgttgatgctggtgatcctgttgcagtcctttggaatcggagtcagtcgggcgcagtcgaacgatgagccgagattgaccgtggagttcaacgaaactccctttatagacgtgatcaattacattaagcgtcacacgaagtttgatttcctttataataacgaggaggtgcagaagattccggccgtgacacattctttcaaatctgttccggcgtcacaggtgcttcaagcctgtttagagggaacggaatatactttccgcttgtttcagaatatgatcgtgatccaaaagcggcagaagacattagagcctgttagtgttcggggaaaggtgttggacgagaagggaatgactttacccggtgccacggtaatcgtgaagggaacgagtatcgggggaagcacaaatgatcagggaatgttcgtgttcagtttgcccaagatggatacgatttatctgttggtgagtttcgtgggaatggaaactcaagaggttgcgatcacgaactttacgcgggaagtagtggtacgcatgaaatttgacacgaaagaggtggaagaagtggtcgtaaccggttacggtaatgtacggaaaacgagcttcacgggtaattcggtgacggtttcccgggatgaactgttgaaagtttccaaaacgaatgtcatgaaggctttggaggtgtatgatccttcgttccgggtgaagaccaataatcaatgggggtccgacccgaatgccttgccggaaatgcagatccggggacaatcgagtatcggggtgaaggatttggaccgcaacacgctttccaaatctgccttggagaataatcccaacctaccgatttttatcatggataatttcgagaccacgatacaaaaagtgtatgacatggacccgaaccgtatcgagagtataacgatactcaaagatgcggcggcgacagcgttgtacggttctcgggcagccaatggcgtggtggtcatcacgacggtagcccccaaatcgggggaagtgcgggtgacttacaacatggttgggacaatctcaatgcctaacttgaatgattataacctgatgaatgcccgtcagaaactagaggcagaagtggcatccggcatgtacgatggggaaggagaggatttttggatacaaaaaatgagaattgaagaataccaagggaaactgaaaaacgtacgggaaggagtaaacacctattggttggcgaaacccttgcgtacggaatttaaccataaacatagtttgtatctagaagggggaaacgaggaattccgttacgggattgatttagggtgtaataacgagaacggggtcatgaaaggatcttaccgggatcgtatcgatgccggattctcgatttactacacgacttcgaaagtacaggtgagtaattatatcagttatggcgtgacaaaagagaaggaatcaccttacggggaattttcgcaatataccaagatgttaccctacgagcgctacaaggatgacgacggtaaaatgttgcgtattttacaatggtcgcgggtattggatttcgaaccgtacaacccattatacgaggccgatttgggtaattttgacaaggggcaaactaacgtgctggtcgaaaacttgagcgtgaactggtttatcaagcctactttctgggtaaaaggagagttgggtatcagtcattcaacgggtaagcgggaggcttttattgatcctttatccgttaaaaataacttggaatatggtgatgaccgaactaatgtggggagtttaacattaacgaacacggaatatacctcgtgggaggggaaactggctatttcctataatgaatcgatcaataatcataacatcaatgtcgggggtggattggaagtaaaaacgacacgcaggcgcacgaataccggaacttataaagggttccagtctgccgaattttcttcacccgaatttgcccggtcgatgccttataaacctagttttcaagaagtgcaaactcgtctattcggtatgttcgctcgcttgaactactcgtatcaagacatataccttctggatgcatcccttcgaattgacggttcttccgagttcggttccgacaaacgttacgctcctttcttttcaggaggtttgggattgaatattcacaagtacgatttcatggagaaatacggttttatcaatcacctgaaagtgcgtggttccttcgggcaaacgggtaaggtgaatttcgccccatacgcggccgttcctactcacgagattgatattgacgaatggtatatttccggtccggcagcaagcttgatgacaacccgcgggaatagggatctgaaatgggaaaagaccaataaattcgatgtcggtttcgagttgggtttattgaagaatctactttaccttgagttttcatggtacaatgaaatcacgaacggcctgatcaccgatgtcaccttgccaagttccacgggattcaagacatacaagagtaacatgggaaaagtcgagaacaaaggattcgagattcaattccgaagcgatttactcagcacggcagattggtacgtggccgtctttgccaacttggcgcacaacacgaacaagataaagaaaatatccgatgccttgaaggcttataatgatgcggtgaacgagtattacaaccaagaaatcgaaagtctctgggacaaggacaatccaaacctgaaccgggtgatgacgaaatacgaggaagggcaatccctttccgcaaagtacgggttgaaatcccttggaatagaccctgcgaacggtcaggaactctacgtgtaccgggatggaacggtaagttacgactggagcgcgacagagatgcggaatatcggggatgaaatgccttggggtaccggttctttcggtgtgaatttacggtggaagaacatcacgttcagtaccagtttcctgtatgaattcggtggcgatttctataacgagacgttgatagacaaggtggaaaatgccaagatcgaggaatataacgtggatcgtcgtgccatgagccagcgttggaagaaattcggggatgtggtcatgtacaaggatattaaggataatacacagactaccgatccgacttcccgttttatgcagaggaataacgtgttgagttggaattccatgacgattggttacgagctggaccgggagatgttgaaacggatcgggatagagaatatccggattgaagtcggaacgaacgatctgtggcggctttccacggtgaaggctgaaagaggtttaagttacccgtatgcgaactcggtaaatttttccgtgaatgttagattctaatcgaattaaaactatgaacatgaaaacaataagatatatcatgggacttttcctgttttttaccttaacctcctgtaatgattggttcgaggtaagcccggaaacccaagtgagtagtgatgacctttacgagaagggaaacggtttccggatgcaggtgaacggtttgtataaaagtttggggagtagtagcctgtatgcccaagaattaacgtggggtttcctagatgttctggggcagtactacatccggcagaatttagataacgcttaccaagaggtgaatgatcgccagtacgaaaatgccaatgtcctaccgataatcgacgggatttggtcgggaatgtacaaggttattgccgattgcaacaatattatcgaacacgtggataaagcctccaacagtattttcgagcttggtgaacccgaacggttgaaaatacggggagaggctcttgccgtgcgggcatttgttcatttcgatttgcttcggctttttgccccggctcccgcggtgaatgaaaatggctcgtggattccttacgtgaccagctcggagtccgtgattaataataaattgaccgtaaaacaagtattggaaaacgtggagcgtgatttactagaggctcatacgtgtatggttccgtgggattcggccatcgtttatagtgattattatgacgaggaagttatccggatatggcatatcatggaacgtttttggacggattggaataccgaaagtgaaatcgcagaattcttcggtcaccaacgttctcgcatgaatatggcatccatacggggaatattggcacgcgtgtattcctacatgggagagaaaaagaaagcgtacgatgccatcgaggaggcattcgcaatgggcggtaagtgggaaccgtggggatttgagaacatggactggcttgagccggggtatggtcgcctgttgagtgatgtggtttttaatgtttataatactcgtgcgggagatataaatgccccgtttatgacggccgaacggccgctttatatacgtaatgtttatgatttattcccggcacagcatcagatagacggtcggtttgagcgtttgctcagtatgttgagcggaaattacttgtctatcaagagtaaaaaagggaataatgatgttgcatatcttcctattttacgcaagagcgaattgtattacatcaagggtgagtacttggcatctatcgggcaaataagcgaggccgtggacttgctcagggaaatcagaagtgcccgcggggatatatctttggatgatctgaacatgatctccaccgaagccgggtacattcaagccatgctgaccgatgcccggaaggagttcatcggtgagggacaatcattctacttgttcaaacgcttgaacctgcctgtttttgacgggatacagaatattgatttccgtgaccagtatgcgctgcctgttcctaaaagcgaggaagtggtcttttagaatttgtaaacctaaaaaagtaaatgaagatgagatacataattataattctcgtgaccatgtgcgttttcacggcttgttccgaggataagttcacgacttacgattcgacgaggtacctgtattttgcgaaaggaataacggccgatagtatcaccgagtcttttttcttctacccggacgagaccacgcatgatattcggttggagctattgtttgccggggatccggtgacggaggccatgacctaccgcgttgacgtggatgagagcctgactaccgccgtgaaaggaacggatttcgatttcgaatcggagagaacgtggccggtgggtaaggagcgggacacgcttgtgttgaaattgatcaaaacgccaaaactcgataaccagatgtttcgggtagtactaaaagtcactccgacaactaatttcgaagtcggcccgaccaagaatgcccgtagccagcgggtgatttttacctctaaggcgattgccccggcgtggtgggatgcccatatcacgcagtactaccttggtgattatagtgatgcaaagtatgccgagttcatcgaggctaccggcattagcgatatgacgaacttcgggcctaccgaattaaggtattacgccttgaaattaaaataccacttgctggaattgaagaatggcgggaatccggtcatggatggtgacgtggaaatgagtgttcctattgttggataaataaaacaaatgtcatgaagatacataaatatatatggtgtgctatggtgatgtttttccttttcggttgttttgacgataagggaaattatgactatgcggggattcctgaggtgaaagttctcggttatatcacgaatgaggaggaacttgggagtttctgggatttaacggttggtgacgtggtgatagtcgaacctattcttgagtacacgggtgattccacggctctcgctctgaaatttgagtggattgccgagaatgggactactgatgaggtgaagaccatcgggtttgggaaacaactggtttgggaaacggatatgggtggttttataagagtttccttgtttatcaccgacacgttgacaggctatcagatcattcacgaggagttagcgatgtggcccacgaacagtgaatccacctccgaggcatggatggtactttccgaggtggatgggaaagcttgtttctctatacttgaagatgcaagtaactgggagggtactaattacgtgtaccgtttccgcgagatggtggattattatccgacacagaacggaggacaggaactgggcggtcatccggtcaagattatgaatcattggctggggggcggaagttcgtcagcccccggtatgttactccttcttcaaaacgggggtattggtccgatctacatggggaatcaggattatcgtcgggctctggacttgaaggatgatttcattaatggcgtgttacccaacgtgatcttcaaagatgccgtggcgaaccaaaagagtcatatcctactctcggaggacgggggactatacatgaaagcagtcgaaaatctggatgtatggttcacgggtaaatacctcgatgtccctgccacgatagagggaggaatgaaaatcgatcgtttgatacggatgccttactccggaaataccacgggaactttcgctctcgacgtgctacatcatcgcttgctcttcatccaagatcataacgacttggagtacgaaggcgtgtggggagatgcgaacgcaatatccgagatattcacggagtctgttcccggtattactctcgccttgaataacctgaaagacattgatgtcctgtattgtggctcttacgtgggacaagtcatatcggaatggggaattccagatcggacatctgatgtgtttatgctttataaagacaaccgggcggggagtgagaccgtcgggcaatattgcatctataccttccaatttgcttacgattttgaactatggattaacaaggctatccccaaaatcgagagagcatttcccgcggctttccagtatgcgattcgagaggatgggcaattctttgtttcacccgccgggcaatatgaatttctgttctttagttccggtgcttcccatagtgaattgtggggatacatattccggggaacgggaggaacagacccgatcaagttgtttgacttcggaggtcggaaaatagcccggatctcgtcgacagatgcgggaaatggaggtagctcgatgggaatggatttaactgtggcgcttgaaaccggggaaatatacatgttcaacgtgaataactcccactttggcacgggtatcactccgaagtggacgtcaaccaagaattacggtaagattgttgatatacggtatgatggcccggctaaacatgcgatttaaaatgatatggagtgtcgtgccgatagaaggccgtttaaccatccggctatacagccggatggttaaata

SEQ ID NO: 20 - DNA, 22002 bp, Butyricimonas faecihominis
gttatatatgtttatattctctgaattttctttttatttcgatacgttcaccaccaaagtttattaataagccgtggtctgtattggtagcggttaagtaatttactaattgggtttcgtgtatgggaaggagatgttgtaccgctttaagctcaatgattatttttccttctacgattatgtccgctctaaattctcctacaatttcatttttgtaatatacatttataggagtttctgtatctgcatgaatacctttttcttttaattctattatcaatgctttctgataaacattctcaagaaaacccgcagcaagatgtgttcttacatcataagcacactgaataacagtttttatcagattttctatttccatatttcttttttgttcttatgttcttctgtcttataaacaagataatatgtctcctttgtgtacgttggggaatgctcttgtttgttgggttgaatcttttgttccatatttttattcgtgtttgtcaaagatgagttcatattttcttaatcttcgtttggatttaaatgtccatttttccggattccagtaggagtattccacgggagttgtattggcatagatatgttgaatccattttccccagaattgaaggtcattgtcttcaaacctgtaatcatctggtttataatatttgccgcatagttcagatccttcttccagtactattttggtgtgggggtagacgatatgggtagtatcattcaatcgagtgtccatgttttcttcggttctccaattcccatatagccggagcgtgtcgtaattcacgatgatccggagcgtgtcgtctgtattgttaatcacgtggtactcgtcttgacaccagtaatcgcatcctgtaaatagaattgttagtagggagaaaagtaatgtttttagtcggttcttgtttttcatgttgtattgttattggttgcgtgtaatataaaatgcctgaggtgtatcttgtaactacaagtgtaatgctttttaggagaataaacaatcgaagtgaaaataatttcttggtttgaattaaatcactaactttgtcgcttgatcgggtgggattttcccgccgcgggatcacttgacaagtggttccggtttaaatttaggtttaaataaaactgtaattatgaagttattagaaggaaagaccgccattatcacgggggcatcaagaggaatcggaaaggctgtggcattggaatttgcccgtcaaggagcgaacatcgctttcaccgatttaagatatgatgaaatagctcaggaaaccgaaaaagaaattgccgctttgggtgtgaaagctaaaatgtttgcttccaatgctgctgatttcgcggctacgaatgctaccgtggatgagattgttaaagaattcggacgtgtagatatacttgtaaataatgctggtatcacgaaagacaccttgttaatgcgtatgagtgaagaacaatgggatgccgtgatcaacgtgaatttgaaatctgtgtttaatttcacgaaagccgtgtctgccgttatgttacgtcagaaatcgggttccattatcagcatgagttccgtggtaggagtgagtggtaatgccggacaagcaaactatgctgcatctaaagccgggattatcggattcacgaagagcgtggccaaagaacttggctctcgtaatattcgtgctaacgctgttgctccgggatttatcattaccgatatgaccgcgcaattgtctgaggacgtgcgtaaggagtgggctgctaaaattccattgaagagaggcggtactccggaagatattgcaaaggtatgcgtattcttggcttctgatttgtctgcttacgtgacaggtcagacaatccacgtttgtgggggaatgaatatgtaatatccgcctaaaagtttggttataattgtcgtagatggagacggtaggggtattgaaattcaataccccattttttttaccggatgttgaattgtgaaacaggagccttctccaactttggaggttactgtgatcgtcccttttagatgctctatgattgtatggctgattgccaagcctagtcctgttccttgaacaaaattgtcacccttgtagaaacgttcgaaaatacggtttatcttatcttcgtcaattccgctacctgtgtctttcacgaaaatggaaacctgatcgttattctgcttgtaaccaagtgtgactgctcctttggaggtgaacttgatagcattgttgatcaagttgttaatgacttgttttaagcgtaggggatcggtcgtgatgatcgtgtcggttgcaggaaggtccaaaagtaattctacctcttgcgggacatttatttgttgggctcgtaggatattttgtaataaaggcgtaagcggttgttctgttatgttgaaaaccatcgtgttggattctatttttgagagatcgagtatgtcggatataagtgctagtagctgttcgcaattcaggtatatcaatgataaaaattctttgatctcctctttctggaaagacatatctccatcaaccagtaaattggaaaagccgacaatggcatttaacggtgtccgtatttcatggctcatgttggcaaggaatgcacttttaagtttatcgctttgttgtgctttgtcacgggctttggttaattcttcttcaattttcttgtgttcctgtgtactcatgcagacaccaacgagccggaaaggagtttgtgttccttgaccgagataagtggattgggcctcgaaccattcccattgtccgtcgcctcgccgaagacggtagctcacgggggtctcgattaaacttccatgaacagtgagcgtaagagccgtgattaccccttcaatatcattgggatgcaccatttgggcaaattgttcgtttgttagcgtgcaatccccggcaggaattccaaggtattcgaaataacggggatcaataatcatcagattacattttatatcgtatgaccaaggaaatattttcgtgcggtgtagggccatgttcaacacgtattcttgggtaagttcggtcacgacgtttcggaacgtgaatatgatataatttgaatcttcttctccggtaacatttttgaaatagcctttcactagaaaagagatggcattggttgccccgtggatgaacgtgtcaggtgggagtgtaacttcctgctcgtctttttgtaggagactcaaaagtttatccagaatattgaggttctcgtggaaaattgaaaatacttcccgaatgtttttatcccttatgtcttgtttttgtactccgagttcggtagcggcctgacgatttacctgtttgattgtcccattcggggttaatagaataaatcccgccggtacggaatcaagaagttctcgagcgaacttttgttgcgtgtctaattgcttctcctttaccagtctttcgtattttcgctttcgtgctatcaagtagaaaatgagggtaagaatgacgatagcggccaatagaataatgtttaatgttatactatattgaatagatgcgtcgccagtgaataaatttatctggtcaatcatgatattttgtgtgttgtgttgtttaattgattgttcctgtattcccgaggggacatcttcatgatacgtttgaagaatttcgtgaaggtggatggagaagggaaattcaggctataactgatttcctgtatggtcttggtacttgaaacaagtagggattttgccagcgtgatcacgtaatcgtcaatccattcccccgcaaattttccgctagcggcatgaatgactgatgataggtatttaggggttagacataatttgtttgcatagaaaataatgtctcgttctttgaggtgatattcttcgacgagcgtgatgaagcggttgaatatgctattggggtgtgataactcaaaatctttatcttgcatatgacgataaacgaaattgtaaagatcataaaataaagcatgtgctagtttatgtacggctagttcagaaaaatgaggattcagtttatctgttttcctagataatagtgaataatatgattccaatagtttaatttcaccctctttaagtccaacaaccggatggaattgcattttaaatcgcaagggaatcatttcttggcatttctctttgaagtagtctgacgagatgaaaataatctttgtctcgtaatccagtgttgtatgaatcggtttgatgacttgcttgggaagtacgacaatcaagtggttctttttgatatgatagttttgagtattgatcatgatttccgcttctccccgggtacaaagcgaaaaagaacaggtttctgtcacgatgaacccctgcctactgatttcttctccaatgaatgctttttcatgggtcacatggttataaatgattagactttccgaggtataatccgggggtacccgccgggcgagttccttgatattgatagtcgcatattctttcatttttccatctaaatagttaagcaaaggaatgaataatctactacatatccaacgacattccgacgtttagtttatttataccgtcctaaaggaaactaataatttattgacaattcgcacgctttatccgggaagttgttttttctcgatgaccgtttggttatttcccggaatatttctacttttaaaacatcgtatttgaatggttgccgaaaagtcaggccgtgattgtggctcactttttgtaaacttaaaataaaacaaacaagtaatttcatggaaaggcgtgtaaaatataagatgaaggccgggctaaagatagtcggggcatttttatttgtgggcttattagcctcatgtagtagttacaaagtgctgaatatagacgtgttgcatccgggagagctgaatatcggaaacaagaatgcacaaattttgtttatcgaccggaaattggtgcatgagtcggattctctctctgcgtaccagttgtttgctagtttgcggttacggcgggacgaggttgtcaatcatttctataatggggtgcgtgatgggttacgtaacggggtacaacctatcttactggttaaagggttgggattgaacacgggatatattccggacgggtatactcctgcaccgatttccccggcaggtattgccgcattggaaaagatttccggacaaacatacgttctctcggtggaatattgtaagttcgggttggatggtgcgagtcggttgatgcttgataccaatcttttcgtgcgtttatatgacccggatggtgttgtggtggattccgcaactactcataaattggatgatgtggacgagacgctgttcgagggaaataattatgatataatatgtaattttttctacaataacggggtgaagtacgcggaacgtttgacgccgacatggaaacccgaacaacgtaggatttacacgaataaccgtctgttgaatctcggttactatcattttgagaacgagaatgatgaagaggctcagcggatatggaatgcggccttgaacctgaagcccagagtagcggctcgtgctgcggtgaacttggcatggttctatgaaaaagatggtaacttctcgtcagcgaaagctttattggaggcggctttgaaaacattacaagcaaataacatcaatgacaatttgtccgtatatattacggattacataaagcgtttagagaaacgtatcaaggatgaaaccaaaattatggaacagttataaacgattttaaagcatgagaaatttcgattattacaatcccgtgaaaattcttttcgggaaaggaaaaattgccgagatcgcaaaatggattccgaaagggatgaaagttatgatgacctacggtggtggaagcatcaagaaaaacggtgtctacgaacaagtgatggatgcgttgcaagggtttgatattgtagagttcgggggtatcgaaccgaacccgaaatacgagactttgatgcgggccgtggaattggcaaaacaggaaaacgtgggatttcttctggctgtaggaggaggttccgtgattgacgggacgaaatttattgcagctgcaacttgtttcgaggggaatgaaccttgggacatcgtggcaaaaggcgcacgggtgaatgcggcactgccgttgggagctgtactgacccttccggctacaggatcggaaatgaatagtggcggtgtgatcactcgccagtccactttggaaaaactggcgttcaattctcgccacgtgttcccgaaattctctgtactggacccgatggtgacttattcattgcccatgaaacaagtggctaacggggtggttgacacttttgtgcatgtcatggaacaatattatactttcccggaacaagctgagattcaagatcgtttctctgaatcaatcttgaagactttgattgagttgggaccgaagttgattcatgccgagaaaccgaattatgaagatcgggccaacttcatgtgggcagccacgatggggttgaacggtttgattgcctgcggggtatcgcaagactggtcaactcaccatatcggtcatgaattgaccgctttcaacgggttggatcatgggatcacgctggcgatcgttttaccgggagtgatgaatgccacaaaaattaaacgtcgtgagaaattgttgcaatatgccgcacgtgtgtggaatattgacacagatcaacctgatgctgccgatcaagcgattgcccgtacggaacaatttttcaatgaattgggcgtgaagacccgcctgtctgattacggcgtgggtatcgacacgatcgaccgtattgaaaagcgtttccgtgaacggggggattttgccctaggtggtatcgatgatgtgaacgtggataatgtgagagcgatattaacttcaagactttaataattgaaaatggagaattgaaaattgaaaatggcaaaagtgtcttttttcaaattcaattctccattttattctgtttacagaaattgaaaatcgacttttagtttaggattaatccttctaattttcaattttcaattttcaattttcaattgcctatgttgcgtgtatatcgggcctcagccggtgcggggaaaacgtttgctttaacgatggaatatttcaagatcgttttcaatgtttcttctgagtataaaaatgtgcttgccgtgacctttaccaataaggccacggaagaaatgaaatcccgtatagtgcgggaattgaacaagctggcggaaggtcagaagagtgattaccgggaggaacttaaacggacgctgaaattgacagacgatcaggtaagggaacgggccggagtgttacgtactttgattctgcacgattacgggcggttatccgtgacgacaattgatcgtttttttcaacgggtaatcaaagcgtttacccgtgaactggggatatttcccggttataatgtcgagttggatagtgactacgtgttacagcgagccgtggatcaagtgatgcaacgcatgaataaggataaggagctaagggcgtggattaccgagttgatgagtgatagcgtggaggatgccaaatcgtggagcgtgaagagtaagatcgcggagctggggaaggagttgtttggagagagttatatgcttttcgacaaggatgtgagggacaagtttaacgatcgaggattcctgaaaggttataagatgttcttgcaaggtgtgatctcccgtttcgaggatcgcatggagatgttcggtcagtctgcttgccggaatatcgaggagaatggattgcacgcggaagattttaaaggagggaaacgaagttttataaattatttttacaaattgcgggataaaagtctggataagattcccgattctgcccgaaaagcaatagataatccggatgaatgggtgaccaaaaagcatgattcgtcgatccggacattgattgagcatatctacccggaactgaatacgaacttgcgggaaagtgttgagtattatgacgagaattttcgggattacgtgtctgcggttttgctctcgaagaatctttaccaattggggattctgaatgacttgtacggggaggtgagagattattgtgacgaaaaagggctcatgttactgagtgacaccacccggttacttaacatgctgattgccgggaatgatacttctttcctgttcgagaaaacagggaatttctacaagcatatcatgattgacgagtttcaagacacctcgaccatgcaatggggaaacttcctgccacttgtcgtgaacacgctttcagagggaggaagggctatgatcgtgggggacgtgaaacaaagcatctatcgatggcgtaacggggactggcgtttgttggcggaaggggtagagcgtgatttggctactttcggtacggataacgtgattctggagcataattggcggagttacaaggaggtggtggaattcaataaccagttctttatcctagctgcacggcaattaaaggagttgtatgacaatgaatgtggagaagagaatgtttattcccgttcgatcaccgaagcctattcccggccggagcaacttgtgagccgttcgggaagtgggtacgtggagatccgtttcagtggggaaaaacaagaagaggggagtgatgcggagatcatggactctgtcgtggatgttgtcaatgacacgatgcaccggggtggagaactgaaagactgtgtgattcttgtgcgtaacggtaaggaaggtgctttcgtggctgattacttgatagaatataacaagcgggagaatattccttttccgataccttttatatctaatgattcgctatacgtttcctcgtcgccttacgtggaattaattattaacgtgctacgttacatggtggaaccgtatgatgcggtgaatcgaacggtgttgctttataattaccgaacttttgtcaggggtgaagatacttcacgggaagatgttcttttcaaggccggtagtacggacgagagttttcttgacacgatcgacttgccgtttttacgggagccggagaaactgacatttagttccttgttcgagatcacggagacgattattgaggctttcggtttacgggctaggatggaagaattgccttacttgatcgctttccaagatattctctttgattacgagaaaaacaacacgaacagtattcctattttccttgaatggtgggagaaggaaaaggataaaaaagtgttatctacctcggaagaagtggatgccgtgcgaattctcacgatacataaatccaaagggttggaatttaaaacggttattattcctttctgtgcttgggagcttgatgatatccgtcacgggcgccggatatggtgtaagaaccgggaggaggggtttagggatttggagtatgcaccattgaactattcctctaaactggcagatagtcatttccgggaggattacctcagtgaacacgtgaaggcttatgttgacaacttgaatctgctttacgtggcgttcacgcgggcggaacgggagttgtatgttctgccttacgcacccaagataacgaaagaagggaaaccgtcagatattggtgcttttctctttcaagttttggaggcaagcgggatgccagaatggaattccgaggattcgagcttgatcattggggagaaacagttgatagccggtaaggaaaaaatagaagacgatgatacattaagtctggcggaatatccgatttatgaattgaacgagcgagtgagtgtccgctataaatatgaagattacacggacccggagacaacagagatttctgccgttgacgaggggaagatgttacatgagatattccgtcgtatcgagacggtggatgatgtcgatcgggcggtaaatgatatgtatcattcgggtttacttaccttggtggaaagggaggaataccgggagcaggtggtgtcttatttgaataacccagtccattcggcatggtttgatggtcgatataaggttattaatgaacgggatatacttttctgtaactcgggaaaagctcgtccggaccgggttatggttgatgggaaaaaagccattgttgtggattataaattcggtcagaaagaagaaaaatcgtatatccggcaggttggtttttattgtaaaacattacgacagatgggctataccgatgtggcaggttatatttggtacgttcccttggggaaagtagtgtccgtgtgagaacataaaaaatgggaagtttgcatttgaaacttcccattttttatatccggagatttattatctacgatagtctaatctctttttgccaagaggaacactaacacctaagtaggcatttacccggttggcgtcacctgctgatttggtcatcaaatagtcggaaccgatgaaaacagggcctaatttcaagcctattcccagcgtttcgaagtcactatgtaagaaagagtaacttaatgttgccccgaaccagtttctcggacgatagtttgctgaaagtgtcaattcggagtaagctttaggctgagtgaattgagtagaggacaacagaccgaatccgagcttgttattcaaaagggtatattctgctccaaggttcaaggttgaacgaagactggtactccggcttttggttttctcttccgtttggaattggatcaagtcgaagtcgaacacgtctccagcctcgtaattttcaggatgttcagggtctatattcacgaaatcaccgtaatcgtgttcactgtcagtcgtggcaatcgtggtggatgattttgaccagctaatgaatcccaagtcgagaatggcagctgatacattaatacaaccaagaaaattataacttgcccctaagtcgatgccgaatccataaccggatacaccgggcgaatcgaaatcaatatcatcaatatatccaccatctgaactatacccaaattctaatcctttcatggaagtttccaaacgtcctttggtttttactttccacgattgatagcttgaaatatcgctggtatttacatttgcgtagatttggtcaattttagcgtctagattacctagtccaaccaaaactttcacacgtcccccgatagtcaaatcctttgttaccggacgtgaatatcccaatcctatttcagtgaaaatatctgcgtggagttccatatcccgaatgtcgtattgtgtgttaagttcttcgaatgaatccggatcaatattagcgtaacgggcaaattcgaacatcttcttcgggatggaggcgctaatgatggaccgggcacccaaatttacagtccagaatcctttcccgctgtaaaaaccgaaagaaataatgtccaccgtcaagtcgatattcatcgtgttcttgttgtccagacgactgatgaacttatcgctattcaaaaagtcattctcgttttcgataatgtcgataaaatcatcgatactcaatttgttggaagaagcagataacccgatggcaccgatagccgggatattaaaatatcctctggcgggttgcaaggcagggttcattttaagtctggccggaacgttgtccatgaaataagaagttctaagtccttgtgcaagaccctcagaaattcccataatagacaaaagtatagccacacagataactttcaaaaaggtaaaactttttttcataaatagtgtcgtttataaatctgatttgatatttattacgacacaaaattgtcattttattttagaatagacaaggattattattaattatttgtttcattttaatgtagtgaaagcataatttatcatctgatatttggaaatgtaaaatagatactctatctttgcactcgcaaaacgaaagaagttctgcttatattgcgggatggagcagttggtagctcgttgggctcataacccaaaggtcgtctgttcgagtcaggctcccgctacaaaatgaggatcgatgaaagtcgatccttttttttattcaacatacaaagctaacacgtttgagacctaccctcctaatttttcacgtgagacaatatatagagaatagataattgttgtatttgctatatagttacattttggaatgtataaaatacgctattttctttgttgtgtggatgaatagtcatacctttgtaaaaataaataattctttgtgtatgaaaaaggtggtgtatattttgagttgtatttctctgtttttatcatgtagaggtaaagacgtgtataaagctccggaggcagatttgaatctgttgaaaccatatgaggatatggaggtcatcgttccggaggggtatgcctcgattgtcaagttatatgatgataccttggcaatttgtacttattcaacaacaatttcgatccctactttctgggcgtctaaattgggtcgggcatctgaaaatagtccgatcacaattgaaaatgtaaagaatgagaataattattatcagggtgtgttaaatacttggcaggtcgtggcctttgaggatagtcgggaaggagattatgactataatgatttgatcatacacgtgaactggagcattcgggaaaataattacacgatatccgttcagccaattgctttaggatcttccaagaaaattaagctgggattcgagaaaatggatggtaatatttcgagtgtgaacgaggtaatcgtggccgaagattgtcggaaagatttatttgaggggagagagggatttatcaatactttttccggcaaagaaaaggtgattattaataatggtaaatataaataccagaaagagttggcgaaacagagtaatgatcttagatgtgccgtgaattggttcattgaagtagatggcgggacaagattatatgctattacgaataacccgatatgtcttaatcaagagggaagaccttacggattgatattcactagaatctatgataagtatatttattgtaacgagaaaggggagcgttgtggagttgactggtttctatatccccaagagcttgtgaatatatctgatatttatgatttcgacggctatatgaaaacaggagatatttctattttccgaactcccaaagaaggtttttatgacgccatagggaaaggtgaaccgatgggaaaagaggggctgatatattgtccgaattcgttgtataacgtgaaactataatggtaggttaaaacggggagttttccccgtttttttattccttttctcgttatttttcagtgcattttgtttggtgggttgatatttatttgtacttttgcgcccgtgttataaaaacataatgtctaatttattaggagataagcatttattatttattatggcagaagaacaaaaagaaatgcaagtagaacttgcacaagaagaaaccaagaaagttgctcccgtagcaacaacaagcgctgaggctgacgagaattttgactgggaagcttatgcaaatgatgatgtaatccccgcatctgaaaaagaagaattggctaacagatacgccgagactctttcatctgtagtagagaaagaagttgttgaaggtactgttatctcaatgaacaagagagaagtcgttgtaaacatcggttacaagtcagacggtatcatttcattgaacgaattccgttacgatccggaattaaaagtgggagataaagtagaagtttacgttgagactcaagaagacaagaaaggtcaattgactctttctcacaaaaaagcaagagctttacgtagctgggatcgtgttaacgcggcgttggagaacgacgaaattatcaagggttacgttaaatgtcgcacgaagggcggtatgatcgttgatgtattcggtatcgaggcattcttaccgggttctcaaatcgatgttaagccgattcgtgattatgatatctatgttggcaagaccatggaattcaaagtggttaagatcaaccaagaattcaaaaacgttgttgtatctcacaaagctcttatcgaggctgaattggaacaacagaagaaagatatcatctctaaattggaaaaaggacaggtacttgaaggtactgttaaaaatatcacctcttacggagtattcattgacttgggtggcgtagatggattgattcacatcactgacctttcttggggtcgcgtaaatcacccgaacgaaatcgttgagttggatcagaagttgaacgttgttattcttgacttcgatgacgagaaaaaacgtatcgctcttggtttgaaacaattgactccgcacccgtgggatgctttgagcgcagacttgaaagtgggtgaccgcgtgaaaggtaaagtagtggttatggctgattacggtgctttcgttgagatcgctccgggtgtagaaggcttgatccacgtatctgaaatgtcatggtctcaacacttgcgttcagctcaggacttcatgaaagtgggagacgaagtagaggctgttgttctaactttggatcgtgacgaaagaaagatgtctttgggtatcaaacaattgaaaaacgacccgtggcaaaatatcgaagagaaatatgctgttggcacgaaacacaaagctatcgtgcgtaacttcacgaacttcggtgtattcgtagagatcgaagaaggagttgacggattgatccacatctctgatttgtcttggacgaagaaagtaaaacacccggcagaattcactcaaatcggtgctgagatcgatgttgtagttcttgaaatcgacaaggataacagaagattgagcttaggtcacaaacaattggaagagaatccgtgggatgtattcgaaacgatcttcaccgttgattctatccacgaaggaacgatcactgaaatcttcgacaagggtgctgttatcgcattaccttacggtgtagaaggatttgctactcctcgccacttggtaaaagaagacggaactcaggctaaggttgacgagaaattaccgttcaaggtgatcgagttcaacaagggtgccaagagaatcattctttctcactctcgtattttcgaagacgagcaaaaggcggttgataatgccaagaagaaagatgaggctagcgctactaaaaaagcagtgaagaaagtgaaagaaaaattggaaaaaacaacgttaggtgacatcaccgagttggctgctttgaaagaccaaatggaagctaaagaagaggaagaaaagaacaattaatttgtgaaattcgaattgactatattagggtgcggttctgccgtacccacgcttcaaagaaatgctgccgctcaggtactcaatgtacttgagcggtactttcttattgactgtggcgagggtactcaacaacagttgagacgctttaaagtgccatacaataagatcaatcatatttttatttcccatttacacggggatcattttttcggactaattggtctattatccagtttttcattacagaaccgtcgggctgaattacatatctattcagacaagcgtttggaagagatcatcgagttccaactgaaagtgatgaactctcggctgaattacccattgatatttcattacctagaccgtgaacccggtttaatatacgaggaccgtatgatgacggttcatgctttcccactgaaacaccgttacgaggctcccgtgacgggattcctatttgccgagaaagagaaggagagaaatattaagcgggagatgactgatgctttctgtgttcccgtggccttcatgcaccgtttgaagaagggggaggattttatcacgcccgagggggaagtgatcgcgaatagtcgtttaacaacggctccgccagctcctcgttcatatgcttatatgacagacacgcttttccgagaatcttttgctgaatacgtacaaggtgttgatttactctatcacgaatctacttacgggaacgagtttgaaggattggccaaagaaacttttcacagtactgcaggacaagcagcgcgaatggcaatgcttgccgaagcaaaacaccttctgctgggacatttttcgtcccgttatcccgatccgacccctttactggaacaagcacgggagatttttccaaatacggatttgtgttatgatggggcggtattcgaattacctgcggtgaaacgggggtaatgttgtcatgacttacctcgcttttgggctaaggcttgtctagtctttagtatgattccttttacatttaattgatagttcatttagatcacggagcattcatcctgtattcatgttgcatttatcctcgataaaatagatatttgagacgattttgtttggattcggggtaaggggtgaagtatatttgttatagggtgagatatgcttgagtgatgggagactagggcgtagggttagttcaatatggggggaagtaaagccgcgaggttattatttatgtttgatttttaatcttatttcgtatatttgctttctgggtgatgaaaatttagatgaaatgatagatgaggagttgattttatccggggtaaatcgcaagaacgaaaaggcttgggcaagtctttacgatcattattatgcggcattgtgtgcatacgtgaaccggatattgaaaggctccgagagtactgaggatttagtgcaggaggtttttattgccatctggaggtctgaaaaaagatttgcttccatgcaagatttgactcgttacttgtatcgggcttgctataataatgcgttggtgtttgtgcggaataaccagattcatgatacgatattgaactcaataggagcagaaagtgattttacggctgacgatgtgtatgctcaaacggttcgggaggaagtaacccggcagttgtacgtgtatattgaagcgttaccttcggaacagaaaaaggttatattaatgagtattgaagggtattcatgggatgaaattgcagaaaaattggggataagtgtaaatacggtcaagactcataaaagtcgtggattcaaatctttacgttcaaaactgcaagattccgtgtgtttatttttaatttaattgaaaaaaagagcctcttcgtgtcatctgaaatcaagagttgtgtattatgagtatacaatgtggaagataacagatgatgaaaaagaaaaacatatatgatgatgcgtctttgatcaaaaagtcgttgataaaagatttaagtgataaggagcaaaaggaattagatcaattgctggatgaccaatccttacaagatgtatacaaggagttgagtgatcgtggttatttgaaaaagcaatttatggaatacgagaagtattcttcccaaaaagcttatcgcgagtttaaggaaagaagaggacattccggacgaatcagaatcgtacgttgggttgctgtggttgccgccgtgtgggtgttggcattgggtgttacattatggatgacttttgggaagaaagaaaatgtcgctccacttccggtggcctcgaagattattccggctggggagaaaaaagctacattgacgttagcggatggaacggaggttcacgttgaggaaataaccgcacaaatattgcaggagaaggggatgaatattgaatataggaatggggagattgtttatcacaaaagtgaagaaaaaacgacagaggttgtttataataaacttgaggttccccgggggggtgaatgtatgattaaactagatgacgggacgaaggtatgggtaaatgcggagacgaagttgaaatatccggtaacctttgtcggtgaccgtcgggaagtggttttggagggtgaggcattttttgatgtggcaaaaaacgaaaaaccttttatcgtgaaaacttcttttggagatgtacgggtgttgggaacagcctttggaataagtgcttatgcgagtgaaccggaaagttatactactttggtaaggggtaaagtgagcgttgagagagaggggataaaacctgttgttattttaccgggagaacaggtagtgacttctaaagatgggaagatgatcaaacagcaggtggatgttgaagagttcgtgggatggaaagatggcatttacgtgttcaaggagaagagtttgggtgagattatgaaaactttggaaagatggtataacatatccgtggatttccaagagaagagtttggttgatttgccatttacgggtaatttgaaacgttatgatgatataaatgtatttttcgatgctttgactcgtaccggggatatgaagtatcgagtggaaggaaatcaagtgatcctatttaaataaaaacgagataacggactacaaatttctcaggttcgatgtccattatctcatttaacaagtaatttacaaatctatgaaaaaaaatccattcttgaggtggaaaaggcttgtaaaatgtagaagcttttttcacgtgatgagtttaacacttatcttgacattgagtagtttgtcgggatatggagcgaaagccgtgcgagacactatttctttgaatttgcaagaagtgaaattagagaggttcgtggaagtgatgaaacaaaagacaggattgaatttcctgtataattcattgctgtttaaagatgcgaaactaatttccgtgacagcaaacggggagaattgggaatccgtgttgaggaaagttctagagaaggaaggtttcacgtatgacgtgaaggatgagattgtagtgatcaaacggaaggttgagaatgatcatgacaagttggtcattgttaagggacaagttgttgattcaaagaaagaaccacttccgggagtaaccgtgttattgaagggaatgaccatcggaactgtgacggattccaaaggaaatttttcaattcgggttcctcaaggtgtggattctttgattgtcagttttatcggtatgcagaccgaatatctgaaacttgaaaaagataagttggaatacacggttgttatgaaggaagatgtgactcagttgggagaggttgttgtgactggttatcaggaatttgataagaccagaatggctggttctgtttcttctattaaagcagaagatttgcatttcagtggaactaatacgttggaacaggcattacaggggcgattaccgggtgttgttatcacaaatacaagtggactggtcggggtacggcaaaaaacaagagttcggggaacttcgacgttgttaggtagccaggagccgatttgggtcgtggatgggattattcaagaagatccacttccgtttgatgcgcaaacctttaatagtgtaggagaaattaattcagataactttgattatatccggaattttgtaggtagttcaatttcgtggttgaatcctagtgatatcgagagtattacagtcttgaaagatgcttcttctactgcaatttatggggtccgggcagctaatggtgtaattgtcattaagacaaaacgaggaaaaacgggagccgcttcaatttcttattctgcttctttgaatgtggcagaacaagttacttacgataaattggaactgatgaattctaaagaacgagttgcggtgtctcgtgaaatatttcaaagaggtttaacagcttcttggacaaataataatattggttatgccggggtattaaagcagtatttggataaagaaatttctggagatgagtttgagcggcgtgttgctaagttggaaacaacaaatacggattggtttgatattctttttcgtaatccattcagtcacaatcactcgatttctgtttccggtggtagtgaagatatacgttattatacatctttatcgtataattccaccaagggaactgctgtcggaaatgattctgagtcttatggagcgaatgtggggttggatatgacggtaacgaataaatttagggcttctttctcgttgtctggatctcatggaacgacaaaaggttttactatcgttaatccttatgaatatgccactaagacaaaccgagcaatagcggcttatgaagataatggagatttgtcttattaccaaaaagaaagtggttatttgtttaatattattaatgaaagagatgaatcgggaacttctaataaaactttttctcttaactcgaatttgaatttgaattatgattttacggaatctttgaagtttcagatgctaggaagtgtgaatgtagcttcagttataggagaagcttgggctacggaaagaacagaatatatagctaaaattcggtggtatgattatggcgtttacaaggctgttgatgctgaatataaaaattcacaacttcctgtgggaggtgagtatagtcaggatgagaacaaatcggtatcttggaattggagaaattctctttcttatgataaagtatttaatgggaaacacgctttaacaaccatgttgggagttgaattaagtagtacaaagaatacaggttattcttcaacaacatatggttatttaaaatataggggaaaatcatttgcccaagttccgatagttcggactaatccgtatggtaatactcaatctgcaaatgagttattggaaaaatttactcgtaagattacagataagaaaactaatcaatttggggcctatttaacaatgaattatgcttatgatggaaagtatgtggttaattttagtgtacgattagatgcatccaatcgttttggccgttatgccaatgaaaattttaacccagtatgggcaggaggacttcgttggaatgtttctagggagacttggtttaacaagcaaaatatcgtgtcagatttaagtttacgttttagttatggttatcaaagaaatatggcaactaattatagtccatctttgattgtaaaggttcctactgggtctgctagtgaaatcacagatcaaaatacaggagatgatttacttgaaattagttctctcccgtatgaagatttgcgttgggagaaaacttcttcgtacaattatggggtagatatgggcttgtttcagaataaaattcgtgttggttttgaatattacttgaagaaaggaaaagatatgattacttccttattagtacctcgggaatatggtatagagaatatgccagtgaatggtgggagcatgaataattctggttgggaattaagtgtaagttttacccctgtacgaacaaagaattttacttgggatatgggactgaatacatccaagaataataataagatcacggaagtcgggatacagaatctaacctggagaacggttgtaggtggagagtattacaaaaagggttatcctgtttcttcattttgggcttttgactgtgaggggatagatcaacaaactggttatccaattattaatttggacgtacacgatggaagtgacccattgaatgatcctactgcttatatgaggtatgccgggaaattggatccggattttacggggggattaactatgtcttttagatacaaacaattatctttatccaccaatttttatttacaagttggaggtaaaaagtttttaatgactgcttatgagtcacaaacacttccttctgaatatgagaatctatcttctgagttgaataatcgttggaaaccgggggatacgaatgcaaaattcccgggattgccagataaaaatgttgtaaattctttgcttccggatactaagacatacacaaatgtttacgagatgtataattacagtaatgtacgggtagtgaatgcttcgtcattaaaatgtaatagtattgcattgaattattctttcccggagcaattagcaaaacgttttggagtaaaatatattagtatgggtgcaagtatgtctaacccttttactattgctagtaaggatttcaagggacgggatcccgaggttgcaacgggagcacaaccggtgaccagttcgtattcgtttaatcttagtgtaactttttagttgatatgattatgaaaaataacttatatgtatggc

SEQ ID NO: 21 - DNA, 19991 bp, Butyricimonas faecihominis
atttatacattgatttttacaaatataagaattaaaaaaattctctctaaagatttatggaatttcttttcgtctgtcatcttaggataaaattaatttaaaaataacagcttatgaaaacaaatagcgttttaaagaaattagcatggggattagttatattcattggattatccaatgtcgttttagcccaaaagattcaagtaagtggtaaggtaatgcttgccgcggacagttcggcattacccggggcaaccgttctcattaaaaacacgaatattggcgtagccaccaattcgcaaggggattacacgatacaggcgaatgtaggagataccttacgattcagttttatcgggttagaaattttatatatcccggtaaaagagaagacattaaacgtttacctgaatacggatgacgaaacggcaatggtaagcgagtgcattgttaccggatacgaaaccatacaccacgaaagtgccgtgcttaaactccgttccggaatgcccgtaacattaacttccgagcaaaacacggaagagtataacgaattcgccgcaaattgcttcctgttggccttggacaagcctctttccacgttctcgatcgacgtggacaacgctgcttattctaatgtacgacgttttattaatcaaggaactcttcctcctgtcgatgccatacgcacggaagagttcctgaattatttcgcttatgattaccccgccccacgaggaaatgacccggtaagtatcaccaccgaggtttccaacgccccatggaacacgcagcacaaactggtacatatcgggatcaaggcaaaagaaattgccacggaaaaccttccggcctcgaatcttgtattcttgattgacgtatccggttccatggatttctccaacaaactcccgctgttgaaatcatctttgaaattactcgtgaaacaacttcgtccacaagatcgagtagcgattgttacttacgcgaaccaaacaaaagaagtacttacctctaccccgggaagtgataaagccaaaattctggctgccatcgatggattatatgccagtggcggtactgccggtggagatggaatccaaagagcctaccgggttgccgagaataattttattaaaggaggaaacaatcgcattatcctagccacagacggagattttaacatcggcatttcttcacccaaagaactagaaaagatgattgaaacaaaacgggctaccggtatatacctgacagtattaggtttcggaatgggaaattataaagacaaccggatgcaggttctcgcggagaaaggaaacgggaatcacgcttatattgacaacctgacggaagcgaaaaaagtattagtaaacgaattcggaggaacccttttcacggttgccaaagatgtaaagattcaggtggaattcaatccggctaaagttcaagcttatcgcctgatcggttacgaaagccgcctgctggaagcgaaagacttcaacgatgacacgaaagatgccggagaaatgggagccggacatagcgttactgccttgtacgaaatcatcccggtcggagttaaaagtaattttgcaccaaacatcgacccactgaaataccagaaaacaggaaaagatgaaaagaaagccttaacggatagtccggaattattaaccgtgaagcttcgctataaacaaccgaactcacataaaagttctaaaatggaagtagccgctatcgacaaagatacacctataaaaaagagttccgaaaatttccggttctctgccgctgttgcaggattcgggatgttattacaaaattcggattacaagaacgattttacattcgataacgttatcgacctcgccaaacaagctacaaattatgacccggaagggtatcgaaaagagtttatccggctggtcgaaagtgctgccttactaaaatgaataaaacaaaattggccggaaagctttccggccaatttttataaagcaatatcactttatttaatcaacaaatcgtttttcaatgccgtccggggaacagcgacttcagccaccccacaagcgtaagcacctagaacatattgaccataggtaaaacaaactgaggttttgttaaagttaacagccgtcacatctttcagcgttggatctgtcgtaaaacaaccttccggattcttgaaattcgctttcaactgggtattaatctgagtctcgttagtataattcagaatctcctgattcgtcaagaacttctgattctgcacgtcataattgaaggtgtagaaattcgttattccatgcgcaccgcccgtgaaagtgtaaacaatcaagcgtacactcacgtattggtcgtttgccataaacacgctatctcccacttgcaattcgtatatccatacaggacgctcttctccactttcctgccatgactggaaaaactcgttcgcgttactcttcaaactatcctgcaaatcattcacgaacttctcaatcttcttgttcaagacctcgcagctcttgttcacgttcgcatcagcagaggagaacatggaacgatttaccgtaatgtcccaattctcagaattcgccgtaaccttttcattcttcacgttcagctcctgaacctttggctggcatcccacaaaggcaaatgccattaaaactgccataattagtgtacttttcattgtgtgttttgttttttgtgtatatcacaaaattatgaaattaaaatatactgttatcacattgcatcacttttattttatcaaatctaaagctgccaatttctgcttgatcctcatttgaatcatcgcttttgtcatttcctgttccatttgcatggattccataaaagcctgattatagcacttctttgcctcgtcatattctttcaaaaccttattggtatcccctagcattgccaagaagttaattttatccatcaacgaaatatccgtgtactgcaacgctttcaccgtccattctttcgttttcaaaataacgctttcaggcacctttcccccggtagcggtgtaaacttgctgggctgccattccataatcaacggcacgggcatcctctcccaattctttaaaataagcatccattgacgtcacgtatccctccccatctttcttataaaaaagtaagtactcggcatcatacaaataagtgaaacgctgccgggcagacatcgttttctgtggaaccacgctatatgtcaatttcatatccccatcaatgcgttccaagtattttttatattcctccttgccggcacgagccatattctccatgattttattattgtactccatcacaaaataagcaggcccttccccaagtttcaaataagcctccatgtttttattcataaactccatcaacttgtcccccggcttatccgtatgatgaaaagtattgataatacgataatcatctacatttatcagttccggtcccattttcaaatcaatatagtccttaaaaaatttttcgattcgggcaatccattttgcctgttccatattttccaatgtactcacgtaagcgggggcccctagcaacaactgttgcattagtaccaaatcatttttagaagatttgaacttcgtgtaaatctcctcaaagctcatctcttccccccgtgacaaccttggccgattttataagagcggcaccatcaagagctccttccaagcgggaccgtaattttccatccgcatcaaaaaaagccagtgtaggatacgatcttactttattctgtttcacaacctgacgattagcgggattctccgcatcaatctgtatggaaacaaacttttcattaaaataatttccaacagcctcaagtgtgaaaacatctttagccagccgtttacaaggcccgcaccaatccgcatagaaatctacaaacagcatctttccctcttgcttggctttttctaaagccgcattataatctcctttaaagaattcaattccttgaccgaaagactgaattcctcctataaatatcaatacaataaccagaattgttttcatttttacttttgttttagataaagcccgattcatcgaatcagactttatccgaattaatttattttaccacaaacgtatagacatccgataataactcggagtaaccatcattcgaaactttcaaggtaacgacataacgccccacgggtagttccgtgtataacggtaactccataactcctccaccacggactgtaatttcttttttgaatacttccgcatctcctccctccgaagccttcacgcttacaaattcgaacgacaggggggaagtacccaatactccctgtattttctgggtcacccaaggagcctcattcgccatcctgacagcatcttccaccggatccagtgtttttttcacttccaattcattcggtaaataaccggcattctccgccttcaaatacccgaccttcatatcctgacatccccaacaggtgataatcagcacaagaaataaatatacttgtttcatcatagcatttcgtttttataattgtcccaaggtataagagtaattcaaagaatgaacgactccattatccgtttctatatcagttgaagcgacatcaatctgtgttctcgtgtcaaacgaagtgacatacaaatacacgggccccacgtccggaatatcatgataggtatcctgaaacgagtatacccagaattttgtcccgaaagcactggtgaaaacttttccacctttcccctgcgtctcgcccaaaatctgttcgccccggggaatatcatcccgccaatgaatcccggcaaccacatgccgtaatatcaactcccgacacgttgcttccggaatttcccgaatagcattatatccctgctcgatcatccatcgaagaatggataaatttgtcggaccgaaaaaagttattttctcgtacccgacctgcttcccttgaaacaaatcttccagaccggcacgttccaccaagagtaacgtgctatcccaatcgtaagaattggaatgcaggtaatcatacatcgtcccgtcaaaacggccgttcgctaaacccgaatcgatgtaattgtatttcgtctcgcaagaaaaaagcgagagcaaaaccaaaattattcctatatttctcattgtcttcattttaaatttactcgaatcttgaccaataaatattctgacgtatcaaatcatttagattaaatgcttcatccccaatcggtaaaaacaaagctccttcttttacatcttgctgatccagtgttttgtaattaccatccatataagtatgtatgtattccagtccattccgtataatgtcataataccgatgtccttcaagcagaagttccctctcccgttctttaaagatcgccagttgaatgtcattttctcccggagccggataaggcgtagcgtgagcccgattgcggattttattcaaatccgcttttgccagatcatcacccagttttgcgtagcattcggccctcaacaaataaatatccgccaagcgccagtagctataattcacgtcaatgtaagcgacctgaggggtaggactccacgacacattcctgtagactacatctcgccatttatacacgtatgcatatccttgattcactttatacatcgtatcatgcgacatggaatccagcttaaagaaatattcatccctccggtcatccgtatcctcgtaaagatttttaaccgtctcggccttgatcacgaagtctttcgtcaccacggatcccggagtttccgtaccttttaccggccaagtaatccataccctgcccgggaagtacgccatcgggtaagtctgaaaacggtccagctcaaactccagaatattctcctgactggcacctattcctttcatggctttcgtacacacctcttcactcgtgcgttccaactcgtaaaatcccgctttcttttcaatcaaaagcgtagaccattctatcgactcttcataacatttttttgcatctccttccagaccgcacaaatcaatcatgctccctttccatgcatacaaatgagccaagagtgccgcacaacttcccttgcaaccatattgctttgacacccaagtattcgcaccgagaagaggcatatcctcgtacttcggtaacaattcatatccttccgaggcattttttatcgcttcatccaacacatccagcattgaacttttgttatatacctccatactggtactatttctcgtgataacggcatctccccacttcctcgctaaatcgaaataaacaaaacccttcacgaaataggcctgccccgcatagaagtccaatttatcctgcggaatcccctctgcccgatataaattatccagaatcacgttcgccacgtaaatcaaatcatactgatttctccaaccattggaaaatgaatttattattgacgtttgattcaacattcgttgatccccataataggagctattcacctgatcggccaaaaacccccggaaagccatcacttcattttcaaattgtttgtaccggaaaaaaccctccaactgaaaaatcatggcattaaaatcctcctcggttttaaagaaattcgtgaatgttatggcattctccggttccacgtccaaaacgctatcacatccccataacaaagggaaaagtagtatatatataattttcctcatggctaaaattttacagttaatcctaacgttagcttccgggcaagaggataatacatgaaattatcatacccggtataggggtccaccacttccggatccacgccggaataatttgtcaacagaaacaagttctctgccgtaaaaaacaaacgacacccttcaagattaattttcttcatccactctttcgggagattatagccaagagtcaattgtttcaagcgcaaataatgcactttctctatattggaagagacatctccaccaaactgaccgatataaccatcagtactagaggttataataggataatctgccttatcgcccggtttctcccaaaatgtcgtgtttgcataatcaacaaaaatcgtacttgttcttaaattattctgcaaggaagaaatcttgtacaaattaataattttccgccccaaggaatacgtaaacaatacattcaaatcgaaaccgttccacatgatctcgtttgcccatcccccgtaagcaaccggcaaggtcgatcccgcataatatcgatcctcatcattgatttttccatcctgattcatatcctgaatcatccgggttcccgccgaatagggataactcttattcatcgagtgcaacagatttttattcccttgctgatcgtaataagccggaatatccttctcggactcgattattcccagatccttgtaaatatacaacccgtaaataggacgcccaagaaccaactggccagtaccgttcaccatatccatatccgtgtacgacttttcaaagcggttccagttcctcgaaatattaaattttccccgccattttacttccgtgttacgtaatatatcataattcaactctaactcgattccctcattagaaatctccattgcgttctgccacgcggttttatgataatagtaatctcccggtaaggaaacattgaataacagagatttcgaatatttataatagtaatccaacttgaacttcaaacgataatcaaagagatcgacatccaaaccaatatcatactggtctgattcctcccaagtcaaatttctattaacgatctgggaaggtaatacccctgcattccccaagaaagtatttgcaaattccaaagttccatgtgccagataggcatctcggaattgctgcccggaagttccccatgatgcccgtattttagcataactcaaccaccatttcttgaaaaacggttcctcggaaaaagcccaaccgacagcgaccgatgggaacgtggcccaacgcacatcctccccaaacacggacgaaccatcccttctcaacgtgaactcgaacaaatatttctttttataattataagcggcacgaccaaaatagcttaacatgattttctcctcaaaattggatcgataggcctgtaaggatttaacacttccatattcctcgaacgtggtaggaaatccattcagtacataatgaatcttatcacttggagatcccttcccgctcccgctaaactggtcttttgcctctctcaaataagacaaacccaacagaatttccatgttatgattatcccggatcgatttattataaacaagtagattctcattggagaatagcgttccactacttatgcttcccgttgatacactcaaattattcgccgcatccagataactgggtgtaaatgagttccgtttcccttcagagaaatccatggataaactcgaagacaatttcaatccttttacgaactcgtacgcaacggccagacttgcccggatccggtaagtaatatttttctcggaagattcgttcaactgtttcaaggtctccttctcaatctcgccggatcccggcaaaatggataaatttgatttcgggtcgactgtcaaccgctctatcttacttgcatttgtaaaagaagtatttgcagctccccggcttcgatccgtgtaggctaagtacaaacgggcatcaatattcaaatttgcacggggaacaacattcaagtttgtcaggatattagctctcttaaaattactccccaacatgattcctgtttcgtcataccatcctgcccctaccatatactttatggtttccgtccccccggaagcctgaagatttgcgtttaaaatctttcccgcatcgaaacaatatttccaccaattcgtcgaattgttgtaaaatggattcaaactatcttgtaaaggtttccctgtaccaatttgatattcagttaagggatacccgctattccagaaataatcatacgccccattctggtgataggcatcacgataagattccggcatcttatatattcctgtttgccagcttccgtaagccgtgcgataattccttaatttattgagattcgcaattcgttccaactgtcctcccgtctgtgtcggggtctccggcagaatagaatacgagtaagaaacattcgcggagaacttaccccgaccggttttcccttgtttcgtggtgattaggattactccattacttgcccttgagccatacaacgctgccgatgccgcatctttcagcacctcaacggattcaatagtagaaggatcaatctcggctaacgtgttcgtacccgtcaccggagaagtaaatgaatgaacgggaactccgtcaatcacgtacaaaggtgttccatccgtctgtgattctgacaacaaggaattataaccgcgaatattgatacgggttccacccccaccgggagaaccggaaatattcgacacttccacacctgccatgtgtccttgcaacaaattctcaagactggcagaaggaacctcttccagctccttagctttcacggatgaaacagccccaatcaattctctttttttccgttccccgtaagccaccacggtcacctcatccaaatcggaaatttcctcttccagcacgacattgatcgtcgtctgatccttcaattcaacctctttcgttttcatccccacgaaagagaataacaacgctttggctgttgccggaagctccaatttatacacgccattcacgtcggtcacgacaccgacagtagttcccttcacgtaaaccgacaccccgggaagctttcccttttgcttatccgtgatcgttcccgtgatcactctctttttcggagtcacagccgtagaaccttttacttcttccgcagctttcttcttgataaccacaacgttcttttcgagagtgtacgtgtaatccgtcttccgcaaacaaatattcatcacgctatcaatcaacacgtccttcacgtcaatcgtgatcttaccaattttgttcacggcatccatactatacacgaatgtcattttactttgtttctctacagcaaaaatgatgtccagcatcgaggcattttcccttttcagcgttaatttttccgtttgtgcatgcacacttcgaaatgctccactagctaaaaaaaacgctatacacaagcaaattttcatgcatatagaacttttctccttttttttatcgtgcaggagccacgtccaaaagttttttttcataactttgagaaattaaattgatattgaatttaatgaaatgggttgtcagaaataatcaccacaaaatctctggctcccatttttatttatagcaatacgtggtcaactaccacttttcaccgtcaacgattttccaagcatctcaaatttcacctcgcctgtcaactccaatattttcaataaagaatcaacatgttcatacttttccagcttaaacccaaatcgcttttccgccatctccggattctggtagaacacctcgaaatcataccaacgagccatctcctgtaaaatgtcatccaagcgttcttcctcgaacacgaacatctgttcctttctcaaacggtaattctctcccttaatcttacgataagagaaatctcccaattgctcatgataagttgcctgcatatcagggcgtaacacgttatcttttacactcacaataccctcaaccaacgaggtttccacaatacctgaatttttatatgcttttacattaaaactcgtccctaacacttttacatcgagagatttcgttttcacgtagaaaggatgagccggatcatggtgtacctcaaaataagcctctccttccaagtatacttctcgtttattgcctttaaaacgaattgggaatcgaatttccgactctgcaaaaacccaaacatttgtcccatctgccaatttcagattatattctcctcctctgggaacgataatccggtgatactcaacttttgaatctgctattgaatcaactcctgtgtaatccaacccgattccattctctaaaagcacaccatattgatttagtttttccgcaacattttttacggtatctaaagcaaccaactgtccccccggcaactctaacatcgtcttatgactttcaaaataagcgttcacaatataattcggacgctctcccaccttaaaatgactcacgtacaaaaaaaacgctgcaactgccaacggtaaaatcaatattgccgcataccagaacacacggtagatttgcttggaattctttgtacttgttgctttctgaattttattccaactccttgccgcatcaaaagattcgtaaatttcttttttaaccacaatcgctttaggatctcgaatacgttccaacaatttctctccctcggggattccctgaagatccttttccaactccaattcctccatatcagaaagattcccttccagataccgggtaattcgctccgccaactcgatcgattctctatatttttccatactattttatcaacttttacatacctaatatgcaaaaagagaattcaggggtgaccggaaaactaaaaattttcaatttttattattctgacagaataaaatcatgataatcaacaaggaatcacatattcatcaacaccaagaaaataataaacaaatgtttcaactcctcccggagaaaagcatacgctttccttttttgagtcttcaccgtgttcacggaaattgccattttctcagcaatctcttcttgggaaaaaccagccatactcaattccaccacacgccttctttcctttggcaacttacttatggcagctataatctcccggtggacttcttcttcaatcatcacgttcagaacagactccgtattgtcctccaatctaggatcgacctcttcattcacccgatgctggcgtaaataaaaaagagcgttattacgtaaagacttataaagatacgctttaaaatataccatatccgtgcaaattccccgtttctcccagagatttataaaggtctcttgcaccacatcttccacggcctcatgttccggtatgtaatgtttaacaaaagcacatgacgccccgaaaaagctatcaaacaactttttaaaggctcgctcgtcccctctgttaaattgatgcaacagtatatccaccctttatattttgcctgcaagatatgacttttttcaaaaatatcaatgcaaaaaaagagcgatcctttcggatcgccctcgtcttccctacaattctccctatctatttcaacaataaatcacctttcaataacatacggggtacggatatttccgcagctccacaataatgggctcctagaaccagcgggttataagtaaagcaaatatcacctcccgaaaaatttaccgtggttacatttgccagcgtgggaacttccgagaaacagttctccggattcttgaaattccgttgaatctgcttgtcaatctccgcactcttgtcataattcagaatactctccggactcaaaaacttcttgtccttcaagctgtaattgaccgcataatactcagtcaacccgttagcccctcctgtcaacatgtaaaccgcaaggcgaacactgatataatgacgatccgccatgaacacgctatccttaacatccaattcaaacgggatcatcggctcttctttcatctcccgtgccttttgcaggtactcgttcaattgtgcctttaaatcattttgcaagctgtcaatcaaccgggatatctccccgttcaccgccttacacccttgctccacctcggctttctgagaggtaaacaccggataggcgatcgtaatatcaaactcgttggtcttgtgggacaaaaaatccttccctatttttatcgttgcctcctcacatcccgtgaaaaacaacgccaacaatgccactacaaaagtacaattcctcatcatctccttttctgtttcaattctaagggttatacggaggctatatacaaaagttcgggtctatacttaaaaaaataaacttttagaaataaaaaacgccaactgtcaaatcagttagtgataatataaaccatattaatttatcccctctaaaagtatcaatcaaaatcagggaagatcaaagaagtatcaggaaaatctttaaaacaacactcagccttgattttttggaaatttaatactatattagccttgacaaaatggaaataatatcgatttaatgccttgacaaaatggaaaatgaatatttatatcgtaaaatagatgaccagctcttagcttggagcaaagaaagtaaacgaaaaccacttcttgtccgtggagcaagacaagtaggaaaatcatcggcaataaaaaatttggctcaacattttgaatattttgtagaagtaaactttgaccagcaaaaagaagtatgtacattatttgaaaaggggatttcgccacaagaaatctgtgagaacctttctctgatttacaatattcccattattccgggaaaaacgctcttattttttgatgaaattcaggcatgtatagcggctatttcctcattgcgatatttctatgaaaaatatccagaactacacctcgtggccgccgggtcattgttggaattcgcattggaagaactaccttcattcggagtgggtagagttcgctccctattcgtgtacccgttttcattcgaggaattccttattgccaacaaggaaacaatgttgtggggagcaatacaaaaagccactccacaaaaagctcttttagaaccgattcataaaaaagccttgctactgttgaaaaaatttctgatactaggagggatgccggaagttatcgcttcctatgttcaaggaaaatccatgttggattgtcttagaatcatggacgacttgattatatcatacaaagacgatttttctaaatacaaaaaaagagtaccagagtcccgcatcacagaagtttttgacagtgttatgcagaatgcaggcaaaccatttatctatgcgggtgcagcaaatgcgaactacaaacaaataaaggaagcccttgacctgttaatcaaagccggccttgttattcccgtaacacattcagcggcaaatggaataccgatcggagcggaaatcaatccaaagaaaagaaaaatgcttcctcttgacacaggtttattccagcgtatattagggttggatatgtcagagatatttctctcggatgattttgaagttgtaaacaaaggagccattgcagaaatttatgcggggctggaattgcaaaaatcaacctcttgctatcacaaggacgatttgtatttctggaaacgagaagaacggggaagcaatgccgaagtagattacctcattcaaaaaaatgaagatataattcccatcgaaatcaagtcagggaaaagaggttccatgcaaagcctacacctgttcctcaaagaaaaacaatcaccttacggcatccggagttcatcagaaaatttctgtgcttatgagaacatcaaggtaattccattatatgccattggtaacatttatcatataaacgaataaaacgggataatttctctcaacatctcattccaaagaaacaaaacaccggaaccttcagccaaatacatggtctgagttccggtgtaatcttccggaagatcccctccggtctcttgcacttcatgtacagactttcacaagagttaaaatccgcatttcaagtcacacactctccactatttttcccaatcggatagcgggttcacctcttccgactttattacccagtctcttactttcacgtttttcaaaaacttccgggctgcgttacgaacatcctcgatcgtcatgctttccagaatcttgtcgaaaaccttgtgattcgtggcgtccaccttgctctcggcgtaagtattcaacacgttcatccagtaatcaacacctatattctcattctgttgatcctgcatccgccggatagagatcagaattggcgacaattcgctctccgagaaaagctcatctttacttctctccaactcgttataaatgatctccttcatccgttccaccttatcccgttgcgtctcgaagcctaccattaaagtagctttacgatacgggaaagtcatgcagttggcatccacgttaacgccatatgtggcactctcctgttctcgaacgatagcgaacaaacggttccgcaacatctgtccccaaattgtcaaggccatttgctccttatcggaaaacttcccgtcattctctaacatcaaattcaccattcccttgtctcccggcattaccaccttgaattcacgggcaatcgtgtcggtatccacgtcgtaattacgaatgatatattcctccttcttccccttgcgagaaggcagcgagccgatatattcacacgtcagacgggcggcctcgtcccggtcaatatcacccacgatacagaacgtaaactctttcgcattcgagaaacgttcccggtaaagcgacttcatccgctcgaaattcatcttgtcgaaataagccgcaccccaatcccggttacgatcgtcgatacgagtcgtcaacttccgaatcgaatcctgaaccagatcctgtggagcctgacgacgattttcgtacatatatttagcacgttccacgtatttgtcaaactgcggtctaccgaaacggggttcctcgaacatcaaatagtacaactggaacaacaactcggcattatccgctttcgtgctaccgccaaaaccttccgtgtaatcacttaccatcatgttcagacgaatctgtttaccctgcacgagattcttcaacgtgttcaggtcgtacttgtatatcccggacttcattgccaaagcctgcatcgcagccagcgtcggcaaatcctcggcatccaccacggaacgcccgccatgactactacaagccatggaaaagaaaccattcccctcttccacgtacttgtagaacaccctagccccgttggacaacgtccactcttctgccttgaaccgatccaactttttcaccttcttgattgttcccccttggagtttcaaatcaaattcttccggaatcttgtgttcaatcacttccggctggatgtctttctcagcgacctccgccatgacatcaagcgcctgatccttggtcaaatatttgtaatccttgtcattaccggataccacgataatccggttcgaatctgtggcccacgaatgaatccaatcggccatatcttctggtgtgatctccaataacgcctctttcaagacgtctaactcctcgctctgctcccggaaaggtaaaccactcaggaaatgagactggaacacgctcacgtagtaagaattactctccttctctgcagcactctccattttctgcagttcttggaaaagtgcctcctgcacccgttccacttccacatccgtgaaaccgaaccgtcgaatctcttcccataccgtccacacctgttcaaacgcctcgacatccttgtccttataaggtacgatgtctaaagaaaatccattgtaattccgaacaaaggaaccgaactcggccgacgcgctcaaaaacttctcccggttgtcattcacgatacgtgccaaccgttgtccccagattgcgttgaaaatacgagccttgaacgagtaggatttccgtcccagttcatctaatccttccacccggtgagcccgctggtgaaaagaaatcattttcgagcggttctccgggtccaggatcaacatataatccaagtccgcccggtcgggaatctccacctcgtagcgttccagcgggttcacccgtgccgggatccgcccgaacatctcttttactttattctcgtactccacctcgtcaatatcccccacgataatcacacactgcaaatcgggacgataccatttgtggtagaattcacgtaacacgtcgtacgggaagcttttcaacaactccaccgtgccgatcacgttccgccgggcatacttcgtgtgattatacaccacgggagcgctcccctcttgcaaacgtcgtcccacgtcataatgacttctccactcctcgataatcacaccccgctcgtcatcaatatccttctcttttagtaaaatctcgttacaccagtccttcacgataaacatacacgtatcgaccaatcccccgtcagccgtgggcacatcctcgatattatacacggtttgattgatgccagtccgggcgttaaacgtgaaaacacctttccctctcaaataaggcatcaccccacccggaaaatgagtcgtcccgttaaaggccatatgttccagaaaatgcgccaacccattctcgtgatcctcttccaagatcgaacccacgttctgtaacaggtaaaaactcacccgccccggctctgccttggaatgtttcacgtaataagtcaacccattctccaacttcccgtaacgtaaaccctccattccttcctgcgctgccaagggggcgaaagccgtgaaaagaaatatcgtaattgtaaataataatcccctcatacctttcattttgctaattccagcgcctgcaacttccgcttgataatcatttggatctgggcaacccgcatcttgttctcgatctgcaatgcctccatgtatccttggttataagcctctttcgctttatcaaactctttcaacgccttgtaagtatcacccaacatcgtcacgaaattaatccggtcgattaaacccgttccctcgtattgcatcgctttcaccaaccaatcctttacctgtcccaactgctcattattcaattttcccttactcatgacgtacatattctgggcaatctctccgtaatcattcgcccctacctggtctcccaaagcggcaagatacttagtcatcaattccacgtaggatgtcacatctttcttgtaagacaacaaatacattccgtcatagtaatatttgaacttctcgtaaggggtcaaagttcccgtcggcatgatagcgtaagccgcctccagttccgtgttaattctctccaagtattttttatactcgtccttaccggctctcgccagttccccaataacattattattgtactccaccaacaaaattccgggagcctctcccagcttgttcatgtaggtttccaaattcttcaccatgaattccatcacggcatcatccttcacgcttttcttgttgaacttgcttacaatctgaaaatcctccttgttgataaaatccggtcccatcttggccttcgtgtactcattgtacaacttatcaatccgcactatccatttttgagcttccataccctgcaagcctcctacatattcaggagcttgttttaataccaactgcatatcggccagatctttcttggatttagcccgatcatacagtttctcaaaactcaactgctcaccagtagccacttttgccaaattcaagaaatcagctttttctctggctccggccaaacgagataccacactggcatcccccttgaaaaatatcaaagtcggtagtaccgtcacgttaaacttctccgccgtttccttctgccatcctgttttttccacgtcaatctgcatacagacaaaacgctcattcatgaattttcccacttcctcatccgtgaaaactttctctgccatctgcttacatggcccgcaccacgtggcatagaaatccacaaatactaatttcttttcctgtttagctttcgctaacgcttcatcaaaagttccctcgaagaacttaattccttggccttggccagacatactccaccccataaacagggagaagcatatcatcattacatattttctcatcacaatcatttaataataaatgtaaatacatcaggtaaaacagccgagtaaccttcgttacttactttgatagtcaccaggtaacgtcctttaggtgccgtcggtctcagcggaacttccatccgaccattacctctcacaacgatttctttcgagaacaaatccgcatttcccccgtcaaaagccttcacgctcacaaattcatagtgtaacggctctgtcccgagaactccactaatcgcattcgtcaaccacggagaattattatcaatccggatctggtcatttgtccaaggattctcttctgctgttaccaactttgcggggataacaatagaatccggaacatactcagcaccttctgctttcaaaaaaccaatcttgacatcatgacacccagtgaatgccagtatggctataaatataaatagaataacttgtttcatattttgtctctatcaataattaaaactgtcccaaagtaaacgcataagccaaagaatgtacaatcccgttcgtcggctctatatccgttgaggccacatcaattttagtgtccatatatttccctcctcttatatacagaacgaccggtcccgcctccggagtctcctcgtaaggctcctggaaagaataaatcctaaatttcgatccgttaaccgatatcattatcattccggactcggcattatcgtcggtacctctcggaatatctttaacctcgtatttacctttcacgatatgacttaatatcaactgacgacaatactcctctccctcaccctcgataaactctttcacgctatgatacaggtaaactttctgccaagtagcactccatgtatatttctcgtatatttttcgacggatagaatgattcgtcggtccgaaaaaagtaatttcttcatatcccgcttttttccccgtgaaataatcttccaatcccaggtaatcgataaacaccaaaagcgaatcccaattgtaagaatctgaatgcaaatattcgtacatgtttcccgggtacttcttctgggccaaaccggtatcaatttgattatatttcgtacaaccaataaatgacaataccagtaatcctaataatat

SEQ ID NO: 22 - DNA, 19960 bp, Butyricimonas faecihominis
tatataatcttagtttacaattcattataaacattcaattttctcacgccatttctaatcctacctttcaaataaacaaaaagatttcttccagtttacatgaaaactatcatcaaaagaaaaaccctctcaatcatcagaccaagagggttatctttcgattttttagtacccagggcgggaatcgaacccgcacgtctttaagggacactggattttgagtccagcgcgtctaccaattccgccacctgggcgtgaactcgggtgcaaaagtagatcttttttctcaaactccaaacaaaatgacattttttttacaagaaaaagtagaaaatatttacaacaacattctgtcatttccataacaccaagaaaatcaattgcacacccaaacaactcttcgggttataatctcatacaatccagcacacatcgttgacatcctcatgtaactctattggcaaagggctatgaaagggtaatgaaagggccataaaagggcgtgaccgtattattacccaactatatccccgaattaagcttggaattagtttaggttatccccctgttgacaaatcagctattttaattacttttgcaagagatacaaaaaacatgaaaactattatacgatttgcttttatcccgttattatttcttccactttgcctttccgcacaacaaacaggtgtagtgaagggacgggtttttgacagtaaaaacaatgaaccaataccttttgccaacgtggtgatctggaaaaccaccacaggcacagctgccgacgaaaacgggtactttcgcatagaaaacgtgccgttgggtttcaatcgcttggaagtgagtagcatcggctacacaacaaaattatcagaagaattcatggtaaacacggcctcagaacgcacggtaaacatcggactggaagaaagccaagtcaacttggaacaagtaacggtcaaggccaatccattccgcaaagcggtggaaagtcctgtttctttacaacgcatcgggatcgctgaaatagagaagaacccgggcgggaatcgagatatatcgaaagtattacaatccatgccgggagtcctttcctctccggctttcagaaatgactttattgttcgaggtggaggtcccagcgaaaaccgcttttatctggatgacgtagaattgcccaacttgaaccacttcgctacacaaggggcatcgggtggtgtggttagtatcgtgaacatcgatttcgtgaaggaggtaaatttctactcgggagcattccctgcctcccggggaaacctgatgagttccctgctcgacttccggcaaatagcggggaaccctgacaaaataaaagtgcgaggaactttaggggcgacggatttcgggttatcgctggacgggcctctaacacctaaaaccacgttcatcatgtccgcccgcaggagttacctgaaattcctattcgacatgatcggtctcccttttctgcccgtgtataatgatttccagttcaaaacggaaaccaagttcaaccagaaaaacgaattaaccatactgggcatcggggcttacgatgttaatcatctcaataaagggatgaaagatcccgatgatgaccaaagatatatgctcaactacctaccggagagcgtgcaatggagctacacaatcggaattacctacaaacattacggggaccgttggaaccaccttttcgtactcagccgcagtaccctgcaaaacgagatcgagaaatacaccaacaacgacaaaagccaaacgaaactggtggattataattccggtgaaacggagaataaattccgattcgaacacaatcatttgttacgacacgacatcaagttgaatgccggggccgggatcgaatacgctacttacaaaaacaagacaacaagagaattatataccctcggagagttgaatcgggtacactacgacaagaattttgatttcttcaaatggtctctcttcgggcaaatcagcaaaaatttctttctggaacgtctcgccgtttcagcaggagtccgggttgacgggaatagttacacgtcgggaatgaacaatcctttcaaacaggcatcaccccggttatccctctcctactcgctctcccccgaatggtttatcaatgcaaatgccggacgctattatcaacttccctcgtacaccacgatgggatatgccgacgagcaaggagacctagtaaataaacaaaacgggttgaaatatatcgggacaaaccactacgtggtcggtttggaatatcgccccggtagccggacaaaaatcacgctggaaggattctacaaaacgtacgaccattacccggtttccctactggatagcatcgtgcttgccaacaaaggtaccgactacgtggcggtaggtgacgaacccgtgaaatctctcggcgaggggcgagcgtacggggtagaactgatggttcgcactcaggaatttttcgggatcgtggcatcgctcgcctacacgtattactattccgaattcaagaaaatggatcatgacctgcaaccgatctcggaatatattcccagcagttgggacaaccgccatattctttccctcacggcaacccgcaagttaggcctctgggatataggtatgaaatggcgaatcacgaacggggctcccttcactccttatgacgcggaaaccagttcacgaatagcagcttgggatgccaagcggcaaccttatcttgactactcccgtttcaatagcgaacgggcctcctcgttccaccagctggacattcgggttgaccggagtttttatttcaaaaaatggtcattaatcctgtatgccgatatacagaatatctatgaccacaagacgaaaagccccgatctgctcgtaccgcaggagaacccggacggaagttacaaaatcaaccctgaacacccggatcactacctgatgagatacatcaaaaatgacacgggaacattactaccgtccgtgggtattattattgatttttaaacagataaccgattaacactgaaaatatgaagaatattatttttgacctcggaggagttgttgtcgaatggaatgccaaacgagtaattgaaacctttaaagggaatcctattctcgtgaattttgtcagagagaaccgtcttttcctgaacgattggcgggattacgaccggggagacgtcactcgccaagaactgatcaacaaagtcgccatcctatccggttgcccacccgaagactgtaacgaattcgtggaacacgtgaaacattcattggtctccattcccgaaactgaaactttgattaaagaactttccgcacggggattcaaactctattgtctttccaacatgtctgtcgatttctacgattatctgaaaacacgggaagttttcaagtactttgacgggcaaatcatatctgccctcgaacacatggtgaaacccgaccgggaaatttacgacttgattctaaatcgctatcatttaaaacccaaagagtgtctgtttattgatgatttggaacccaacgtgaaggccgcacaagcagtaggaattaacacggtacatttcaccgacaggcacaagggctacgaggaaatccgggaaagactaaaagagaagaaacaacgggcaaccctataactctcgaacgtaaaagcataaaggagcaactagcgacctacctgaaagaaaaagtttttggtaaaatcctaaaaacggacaaaatgaagattaatgaccgcaaaccgattctatttgaaaaatccgaccacaacatttggaccgatccctacatccaacagcagatgttaaaaaagcatcttgatcttcactccgacgaagcaagcagaaggcaagaatacatcgtgaagatcgtgaattttatactccaacacgcaaaaccgaaaagccgttcgcttgatctggggtgtggaccgggattgtacacgtcgcaccttgcggatgaaatgcacactgtaacgggtattgacttcaataaagcctcgatagaatatgccacccacaaacgaaaggacattgaatacatattaggagattatatcatgaattaccccacgggacaatacgatctgatcaccatgatctattgcgacatgggaacccattcggatagtgaccgggacaaattactgaaaaatatatatcactcgctgacggataacgggattttcatttttgatattttctctgaaggaattatcaatgacagacaggaaggtaaaagttgggaatacgaaccttccggaggtttctggaatgaaagcgagtacttacttttaagccagacattccattacccgcgggataaagcattcgcgtatcaatataatttgattgtcgaagatactatcaaacaatttatcgtttgggaaagatattattccgaaaaagagattacagacctattgaaaaaaataggattccgggaaatatccattcataaaaatttacttggcaagaacaacttcacgtcaagcagtgaaatgttcattgtcgctgaaaagtaaatgccctatccttttttccgcaagaaatgatagaatcgccaacacatcattcccccggtaagcgttaagcccacggggtaaccgacccatattccctcgattccccaatccaacacgaaaccacagacataagaaactggcaacgcaatcacaaaataaccgataaaagagatcaccgccatagaggtcacgtctgccacgccacgcaaggcattagcaaaaatgatctgtaaactgtcaccaaactggtagaataccagaataaccatcaacacggcaaccaagtttaccacatcttctgacgaagtatataaccacccgatatgctcccgcaccaacaaaaagaacacggaaaccgagattgccaataatcccagcaaatgagttcctgccaaagttgcccgtcggactcctgcaatatctccccgcccaaagaaattactcacccggatcgaaacagccgacccaaccccataatagaccataaaccctaacgtggagatagaggccaccacctgatgggctgccaagggaaccgttcccaaccaaccgatcataaccccactgatactgaataatgctgtctccattcccatttgtaaaccgaccatcatccccattctattcagcactttcaaatctcccgtgttataagtcgttcggtgatagccgacaaggtaacgccgataagattgtttccggaaaaagagaatcgcaaaagccacgaacatgaaaattcgcgaggccagagtagaaatccccgctcccgtcaatcccaatgccggaagtccccccacaccataaatcaagagagaattcccgataatattcagcaggttagccgacaacataatccacatggaagtctttgtatccgtgatgccatcagcaaattgcttgaaactattaaacatcatgacaaacacgagagaggtcaactgcaacagaaaataaggccgaatcaagggtaacaattcttccggttgtcccatcctatgtacattcaagtacataattcccatcgccacagaaaggaataacccgatcataaaatttgccaacaggctgttacgtaacaacccgccaaccctgaacttatcacctcgaccaaagaattgcccgaccaaaggtgtcaagccataagaaaatcccatcccgaacaggatcggaatattaaacacgctattcacgaaagaagcggctgccaagtcggacgtactgaaatgtcccaccataatattatccaccaatccgacaaccacaatccctaattgtcccaacacaatcggcaccccgatcttgatcgtcgccgaataatcctctctatatttttgcagccaattcatttcaacaaaataaacaagtttgaaagttcataaggtttataaagccatgtactaccccctccaactcccccttacacagagggagagctgatcaccaaacggccttacaaactttatcaactcctataaataccctttcgccttcaacgactcctgtactttcgtcgcgatcttcataccccattgctgtccgacagccatactttcagtagcgattgccggttgcgcggcagccatttttttaccgacaggagattcgtaaaatttcgtaatttcctgtaaatcggacaaagttagacgcttatgataaatcggggctaacatttcaaccaagtcatccaccaatgtcttcatcatctctttttctgcctcactccaaaattcagcaggaacattcgggagttgttgtttcatcatggcaaacatttgcgggataacaagcttgaatgtcgcatcgcttccggaaaccacgatcatttttttcaatgcggcaacgtattctttagaaggttgagtttgtgctgtctgagcgacacttacacctcctatacccaaaacaagaacaaggataaataaaatttttctcataacatcatattttaatttgtgttacaaagataccttttttacacaaaagtgcggacgagacaagaaaaaacagaaataatttataccttgcagcacgataacgcaaagaactgaactatgagatatgtattttcactttttgtaactctattattagcttgcggatcagtacttgcaaacggtccgttattacagaaattacaacaaatcaaagaaatatccggtattcgggaactaaaagttcaaccttacacggaatactacgaattctggtacgaacaaccgatagaccataataatccctcgaaaggaactttcaaacaaagggtattgctgggtcatcgggatttcaacgctcccatggtagccatcctcgaaggatacgggatttattccccggcagaaagcgagttgtcaaaactattcaagacgaaccagcttaccatcgaacaccgctttttcaataacagtaagcccgaaggcgaaaccccatggaccgacttgaccttgaaacaggctgccacggaccagcacgaaattattcaaaccctacgacaaaagatatacccaaacacgaaatggatctccacgggtatcagcaagggggggcagacaaccgtctatcaccgttatttctacccggaagacgtggagataagcgtaccttacgtggctcccattaacttggaaaaaattgatccccggttagaaaaattcctttccaaactgggcggaaccccggaaaacagaaaattactcgaaggtggtggaaaagatattaaatggcaaatcttcgattttcaaaagagatgtcttgaaaatatggataagcttatgccgctcatgcaggaattaacgcaagcaaaaggctattcattcaacaaagtcggcgggacagaacgggctttcaaactcacgatcctagaattcccatttgcattctggcaatggggaaacaacatcaatgatatgccccaaccggaagaagacgattataacgagatattcaactacttggtgaaagtgtcttccccggatttctttgacgacaaagccattgaaaatttacaggcgttctattatgccgctctaacagaaacaggcatgtacgcttataataccaagccgttcaagaaattcttcaaggatgaaccggaaccgatcatcacgttcgacttcgccatgcctaagggatatgaaaatgccccgttcaacacacaacaattgcaggatattaatcattggttacagaccaatgcagaaaacattcttttcatttacgggggaagtgatccttggagcgccacggctgtcgatttgaagaaaaacaacaaatgccgcaagtacatcaaagccaacatggaccacaaatgtcgcattgcaagtttcgaaaaccttacccgttctgccattgtcaaagtattgaaatcatggctcacgggtacggaagtcgaagaagaaattgaagaagttttaatctactaactgacgaataattgcgtctgtcgcaccaagttgttgattgacgaactttaaagcactttgcccggccgcatcagcgattgccgggctatttattaatgaatccatcaaggaagtaaattgctccttatccgagattgaaaacgccccgccgcaagcgatcaaatcaaccgcctctttaaacttgtgatatttcggcccgaacaaaacaggaataccgtagattgcagcctcaagcgtgttgtgaatccctttcccgaaaccacccccgacataggagatagaaccgtaacgatagattgaagacaataccccgatcgtatcgaccacgagaacctgacatttcgtcacatcggctgtctcatctgtatagcgagctaccaacttgcgacacttgcccaaaatatctttgatatgcccctccccgatctcgtgaggcacgataatccatttgtaatttccttcctgcgcattaatataatccagaataatatcttcatctccgggccaagtacttccacaaaccacggccctcctgtcattacagaaagcctccaccttttcgattctttttgccgcatccgcaatctgttttacccggtcaaaacgagtatctcccgtctgttgcacgtgagtaataccaatcgttgacaacaactttacggattcctcatcctgcacgaaaagacgagtaaagaacccgagcatacgacgatgcagatttccccatttcttgaagaacggttgctccggacggaaaattgcagagatcaaatatgtcggtacctgatgtttattcagctcactcagataattataccagtactcgtatttcacgaacacggcagcatccggtttccatttttccacgaaacggcgggcatttgaaggagtatcaatcggtaaataatagatataatcagctccttgataattcttgcgaatctcgtacccggaaggagagaaaaaggtcaataatattttcgtgtgaggctcgatctctttcaatttctcaatcaccggacgtccttgctcgaattctcccaacgatgctgcgtgaacccacaccaatcgcccttttccacgctcaacggcctccatccgtttccatattccttttcgcccttttacccataatgccgctttctcgttaaaaagagaggccacgccgatagcacaacgatatgcaataattccaaaattatacagcataattctatgatttaatgattttagattcagtgattattcgaaattcataatcatgcacctaaaatcacataatcataaatcacctaatcacctaatcatttttcggcttcaaaggtataaaatttatcgcccaatggtataacttttgtaaataacgttaagcaggggagaatgaacgagttattacattacatttactctccgaatagaagtacgtgtcagtaaaacattaaaatagtcaagttatgaagatcaaaagtctattaacatgcatgatggtaagccttgtcacgatcctacccttacaggctcaggtcggcaaggaaatgaaagcattccgcaacaaggatggtataaccgtaacgatgttaaacccgtcgctttacagcctttacaaacaaggtgacctgtccctacccgcggaagaggctttgaaagacataaaagaaatcaacgtgatacaagttgacatcaaacgggccacccccaaggttgtggaagaaatttctcaacgcatcaccccgatcgtggaaaacgaggccaaatacacgctcgtgcgtagccaccggggagcttacagccaagaatacctctacgtgacacaacacgaagaacgtatcacgtctctcgttctatggagcgaagatgcagaaacactttctatcgtggaactcaagggtaacatccaactggataacgtggatgaaatcgccaatgcgctaaaagtgaaaggactcgatcgcttggcttacatcaacacgccgacagatcaggttgcatccggttccgattttatcaaaaaactggaagaacgctttggtataaaaagagattccattttcgggaaagatccttttggttcattccgggaaagtttcggcagcatggacgatatgcttaaaaaagcggaagaaatgttccgtgacatggggcccatgtttagcggagaatcggatatggaagggatgggagaatccatttccaatggtctggaagttattcaggaaaacggaaaaacccgtataaaagtaaacgccaaaaactcggaagtatcttacgtgatcgacggtatcgaatacgcggccgattcccttaaaaacggtatccccgacgaaatcgccaccgtgaacatgattacctccccgacgaatgccaaaaaatcatacataataatcaacacgaaacagaaaaaaggacaattcatcagttatgccaacggcgtactgaaatacaagtacaacaaacaggaatacacgttgaatcccgagaaattggaagaaccggccttgattatcaacaaccgtctgacaagaagtttcaatattgatccggtacaaattatacagattcgcccggtatccgaactggaacgacaattattaggcgccccatcagcccaagtcattatcgtaaccgataaaatgggtttcttcttctaacatttttcttttaaaaaacgtatagcagcaatacacgaggggaatgtgtcaaaaggcatttttcaaactccctcccccccttcagggtactccctctataaacagagggagagttgaaatactccctgtcttcgggaagagtctccagctcctcctctgtttatagaggaggtggcacgaagtgacggaggagttttttgaggaataaaataccttttgacacaccctcctcgctataaactaacaatcaacgcatacgttatgaaattggctgctatcacgagaacaggaagttatttcctaacattattcctattcacctttatcccttcggccggaaatgccgggcaatatctacccgaccaaccggaaaagatcaaaccatataaaaaggtaagtgaacattcgaacctgcaacaaaccttaccctccaacgatgaatggtggcaactgttcaaagatccgattctcgacacgctgatcaataaagccgtcatcaaaaactacgatgtgcgaaatgctattcgcaaaatagagatggcaaaagcaaaactgcgggtggatcgcagtccctattacccgaccatctatttttcagccaattatgccccggaaaagagcagccttagcgcggataaaaaaaatattatcgaacggaacggaaccgccaccgtcaacctaaactgggaactcgacgtgttcggacgaatccggaaagagagttcttctcagaaagaattctatcttgctgcacaagaagattaccggggagtaatggtatctctcgccgcacaattatccacagcatacatcaacttgcggagcgcccagaaacaactggaagtaacccgtgaaaacatcgagtcacaaaagaaggttatggaactcaccgaatcaaggttcaaactcggattagcctcccaacttgacgcggcacaagccaagagcctctacctgcaaaccaaagcgtcattaccgggaatcgaatcgaccatcgcccagcagatcaacctaatcggggtacttatcggagaacattcggttgccattcgggactcgttattaaaaatccggcccatcccgatcaatcctcggcaagcagcgaatggtattcccgccaacctgattcgccaacgtcctgatgtacgttcagcagagagaacgattgacgggttggctgaggccgtgggggcaagccgtgccgactggtggcccaagttcctcgtgaccggattcttcggctactcgtccgaaaacttcgaacagtttacgaataaagaaaacatgatctggcaaatcgcaccctctattaaatggacgatcttcagcggtagaaacttggtggaatccaagaaatctgcccaattacaacttgacgaagagatcaactcgtacaatcaaacattactgaccgccttgcaagaggtggataacgcgctggtaacttacaacaaatcactcctgcaaatatccgccttgaatgacgcattccaacagtcacaattaacgttggacctcgcgatagaacaatacaaaaacggattggccagttaccagaccgtgttaagttcccaaatcagtcttttgaactacgagaattcccttgtggaagccagaactgcctcccttcgctacctgatagaactttatcaagccctaggagggggatggccagtaagtgaattttaagaactttataaactaaccatatgaaagcattttccattatttgcgttatttctattcttcttttggccggatgtggcaaatcgaagaaacaacaggaaacagctccaacaccctcggttgccgttgatcatccgcagttgcgcacggtggtctatacatttgagtacccggggtatctacaagcggaacaaacggtcaatctcgtggcacgggtttcgggctacttggaatcttatcaattcactcccggacaacgggttcgcgaagggcaaactcttttcgtgattgaaccgcaaccttataaagataaagtgacacaagccgaggcaaacgtggaaagtagtaaatcgaaacttgcctacacgaaagcatcttacgaacggatgcaggaggccgtgaagaccaaagcgatcagtgagatagactaccttcaagcccaatccgactatggagaagcccttgcagcttacgaagaggctcggagccagttaagcctggccaatatagacctttcatactgtatcgtgaaagcaccttttaccgggcgaatctcccggaacatggtcgatccgggcaacatggtcggaacagatgccagtaattcggctctagccaccatatacaaggacaaccaaatgtatctctatttcaacatggcttacccggactttgcccggttacccaagaataccccgtctgccctcccggtcaccatacaagacgtgaataatccggaaaagacttggatcgccgctctggattacagttccccgaacattgacctcaacacgggaaccctcaacctgcgagccattgcccgtaacccgaacggggaacttcttagcgggatgtacgtgaaagtcattgtcccctacaaaagtgtcccgaaagcgattgtcattccggaagcatccctcggtaccaatcaaggcggacgctatgtttatctcgtgggaccggatgacacaatcgtcttccgtcaagtggaagtcggagtactcactcccgatgggatgcgggaaatcaccagtggtctcactttggaagaccgctacgtgaccaaagccctcatcaacgtacgtccgggaatgaaaatcaatcccattctgtgatttaatgattttagattttagattccagccacacaaaaacaacgctttgagaattacaaaatctaaaactaaaaatcatccatctaaaagcaaccaactcgcgttgttgaaatttaaaatctgaaatctaaaatttaaaatcaacaagatgttatctcgctttttcatcaatcgaccgatatttgccaccgtcctatctatattaatcgtggttgcaggtgtgatcacgttgagatcattacccgtggaacaataccccacgataaccccgcccacggtagtcgtggaggctcaatatccaggagcaaatgccacgaccatcgcacagatggtagccaccccgatcgagcaacaagttaatggggtcgaaggaatgctttatatgtcatccacttcttccagtgccggggtctatcggcttactgtaaccttcgagatcggtaccgacctggacatggctaccgttctcgtacagaaccgggtaaacatgaccctaagttcacttccgcaagaagtgacaaaaataggggtcaccaccaccaaagaatccaccaacgtggtcatgtttctctcgttgacctccgataacccgagttatgacgctctttacctatccaactatgcagaattgaacctcgtgaacgaattatcacgggtaaagggagtaggcagcgtcggggaattcggggcaggaaattacagtatgcgtctctggctgaatcccgacttactgaccatccggggcatcagtccgcaagagattatctctgccatcgaaagccaaaacatacaggtagcacccggagcagtcggggctcccccgcttgccagcccggtagccttccagtacacgttggaaacccaaggattactagtcagtgaagaagaattcggaaacatcattgtaaaaacactttccgacggaagatacctacgcctgaaagacgtggccacaatcgagctgggaagtcagacgtactcgacaaacgccctgttaaaaggtcaggcggtggccgccatagccatctatcaacttccgggagcaaacgccctggatgtggcacaacgtatcaaagcccgggtaaacacgttatcctcgtatttacccgaaggcgtacacctgaatatcacgctcgacacgaccgaatttattcacgcatctgtcaaagagatatataaaacgctgggaacggcttttttactcgtgttgattgtcattctgatcttcttacaaaactggagagccatgctgattcctctgatcgccattccggtatcacttgtcggaaccttcacgttcatgggtcttatgggcttttccatcaatacactaacccttttcgggttggtgctggccatcgggttggtcgtggacgacgcaatcattattgtcgagaacagttaccgcctgatcgagaccggaaaatatgtggacatgaaatctgccgtcacccaagccatgaaagaggtgtcgggggccatcgtgggcattatccttgtcctcctggccgtgttcatcccgaccgcatttattggcgggatcacgggaatgctttacaagcaattcgccttaaccatcgcggcagcaaccgtcatcagcgggttcaatgccctgacgctaagtcccgcattatgcgcccttttcctaaaacccgctaaaccatccaaattcttcctattcaagggattcaacaagtttttcgagaaaaccacgaacgggtacacgtgggtagtacaaagctttatccgaaaatcggcattggcaattctggcattcttggttctcgccatactggcattcatcggtttcttacgactaccgacaactttcgtcccgaacgaggatcaaggatatttcgtggtctccatgcaactaccggacggttcatccctctcccggacagaatccgcatcagccaaagcgggtgagatattaaagcaaatcgacggggtaaaaacctatattgcgatcaatggattctccatgatggacaacgcccaaaactctaacgcagcttccatcttcgtcatgctcgaaaactgggacaagcgaaaaagcaaagccttgggagtagatgccatcacgactcgattcaatgaactggcctatctcgaaatcccggaggcacaaagttacgccgtttcccctcccccgatccccggcctaggagaaagtagcgggttcgaactcatggtggaagacatcaataactacggttctacatccctgcaacaagccgtcgatcatctggttgatgcaggaaacggaactcccggtttgtccatgctccggtccacgttcagcgccagcgttccgcaatattacctgaacatcgaccgagacaaggttgaattaatgcaaatcccgataggagacgtgtttaacgctctctcggcatacatcggctccatttacgtgaataacttcgtgaaatacggcaggacctttcaagttaaacttcaaggcattcccgacagccggagagtgattgacgacgttttatttttgaatgtcaagaacacgcagggcgaaatggttcccttctctgccttcacgaccgtggaacaacgcctagggacagaacttctccccaagtacaacacctattcggcagcctctctatccggaagtgcagccccgggttatagctccggtcaggcgttgaccatcatgcaacaggtattcgagcaggaactaggcaacacattcggttacgaatggaccggactggcctaccaggaagagagtgcgggatcgaccacgacaatgattttcatactcgccattctcgtggctttcctcattctcgctgctcaatatgaaagctggacctcgccgtttgccgtgatcatgggactacccattgccctattgggggttgtcatcgggtatctcgtgatgaatcttccgatcagcgtctacacccaaatcggtatcatcctgttaatcgctctaaccgccaagaatgccatcttgatcgtggaatttgcccgagactatcgagccgccgggaaaccgatctccgaggcagccattgaggccggaaaggttcggctacgtccaatcttaatgacctcattcgctttcatcctcggtgttttccctctggtcatctccaccggagccggggctgcaagtcgaatctcgttagggatagccgttttcgccgggatgttgatgacctcgttggtgggtacacttttcatgcccaatttttactatgtcatgcagtctttacaagaacgactaacccgaaagaaacagaaatcctaaggaaataatatccattattcgaacctccttcagagatcattcagtgcttccccataccgtgatatttaagccacgaataaactctgagtgatctctgaatgagtgagattatttgggttagattacttctttatttgggtcggtttcgggtagaaatacaaaaaagagtgtactccacagttacatatgtaaagtacactcttttaaaaacttaaattcaccctcttaacgaggctttcaaacaattagaatacaatcgtcatctcgttgatcaagttctgggcattcgcgatcttgtccacgatgaacagcatgtaacgagcatccaagttgatacatctttgcaagttttcctcgaaatcaatatcaccggacatagcctctgagtttccatcaaatgcggttccgatcaactcaccgttaccattgatcaccggagaaccggaattaccacctgtaatatcattgttcgtgatgaagttcacggaaatgttgtcagcaccgtaacgtccgaaattcttcgcgtaatacaaatctttcaaattttgtggtacttcgaactcgccacctttcgggccttctttttccataacaccggttaacgtggtgtaataatcatagaacacggcatctctcggtttgtagctcttcacgtttccataagtcaaacggatagtagaattagcgttcggagcccatactttgttcggttccattgccatcaatccattcacgaacaaacgatctcctttggcaatattgctacgcatagaactcatttccccgcttaatttctggtaaacctcgaacaagctctttcccgtgatataacccaaatctttattcaatttcttcatatccggtttttcaaggaacgcgttcaaacgagcctcatccgtgaaaatagatttgtcggacagttctttagcgaatttctcgtagttacctttgtattttttgttgatcaaattgatcacttcaggatgccattcggcagccacgttatcactataaatcttgaataaaacagccatcaagtttttatcaacatctttgttgaaatccttaaagaaacctgctgcatttttctttattgcctcgatgtacatatccttcatttcagccggagtatttgcatccaaagctctttccaaggtattagccacttggaacgcgaacaacggaacttcaggaccttgtaatgcagcctcctgcatgtaagacatggccacgttatacgggtgcatagcctcgtaaccctctttgatcaaagtcaaagcgttaccatatttagctttgcgagccggatcagcgttcacccaagcggtaaattcacgctcgattctctctttctcacccatcgtgttcaaattctccaacgcgatattctgctcgtgagaatatttccagtagttagcacatgatgcatatttagatgcatactgaatacgagtggcagcggcagcgtccattccttctttcatgatacgcaacttctcggtacgtactttgtaacgaatatcattggttacatccatcgtctctttcaaaccgaagctagtcaagaaacgatcggttgttccggggaatcccatgatcatggcgaaatcaccatcctgtactcctttggcagaaacaggcaaatgatgtttcggtttcaacggaacattactcgtgttgtaaggagccggttcaccgtcaggacccgtgtagatacgcatcatacagaagtctgccgtgtgacggggccaagaccagttgtccgtgtcaccaccgaatttacccatgctttgagccggtgcgcctactaaacgaacatcgcggtaaatcttgtaaaccaacaggaagaactgattcccctcgaacatctcctgtacctgagcgtgaaggttagttccttgtactgccttggcagaaatttgtttagaaatagcatcaatagctgctgcacgttcttcttctgacatattatcattcaaaacagcgttcacttgatcggtcacgtcttccatacgttgcaggatagatgcggtaataccaggattcggtaactcttcgctatatttgtaagcccagaaaccgtttgacaagtagtcatgttccacggttgagtgcttttgaatcacgctgaatccgcagtggtggttcgtcaataccaatcctttgtccgaaatgatctctccagaacagaaatgccagaaaggacgtccgtcgtttcctaatccaacgattgcatctttcaacgatgcctgattcacggaataaatatcttccgccgtcaatttacagccttgtgcctgcatctgctcgatgttcttcccgagcaatgacaaaagccacataccttcatccgcccgcacgattgacgttgaaagcaaagcaaatacaataataaaaactctcttcatctgtttaaatttcacgtttaatatataatctgatctaatttaattcctgtcaaattatgccctcgcctcccacaaacgatcgcgaatatacaatttaattcaaagaaaccttatgtaacttaccgtgatttaatattattataacattttacaacacgctgtcagagtaaattaatcctcaagcgaaacccataaatatgtattgtgaaatttaaaatatcaacaaaacaagaacggaagctatttgaatctcccgttccctactttacattatttccttacttttttcccccacatcaaaaattttctccatactcgtcctccaccatctttttcaatttagttggatgacaggtcccaaatttattataaaggaaccagttccatttcatgataataaattcgacctcaaaaacgcatccttctttatctacataagctaaaagaatgaacccttcctcagacgagggcacgcatttctttaataatgcctttatttcagtcggaataacttctgtccagatatgctctttccaatcagccagcatttccaccatttcatgggtaagtgactcaccaatatagcctggatatttactctcgaatttttgaaaactcttatcaaaatcaggaacatgtaacttccaatgaattgtttctaattctttacagcaaccaacctttgttcttatcggaactatttccaagccattaatcactcttttcgacaaagtgtcttcttttctaatattaattgcagtagatgcatttaccataaccacatatgataagtacaccaataatgttaagattacatttttcattttatcatcatttttagagattctactatcc

SEQ ID NO: 23 - DNA, 19954 bp, Butyricimonas faecihominis
gtcttaatgataaatcaaacattaccagcatgaaaaaaagaattcttctttttcctttactgtttttgatgatcacgatcttttcgtgcaaagataaaaccaaggaacaaagcaagctagagtatagcaaatacatttccgactttacacagggaatgataaaatcctccgacccgatctatgttcggttggaaaataatgttttgcaagtaggggacagtcttcccacgcaggtcgaaaaactattaaagatctctccgaaagcagagggaaccgtatctctacgggacggtaacattatcgagtttacccccaccaagccgctaaaaaacgggcaaacatacgacatcagtctctacttggacaaactctgcaaagtcccttccgacttgtcaaccttccgtttcagcgtgaaagtcctccctctcgtgtttgcgttccaagagggcagcttgaatatcgaccccacggataacaacagattttcttaccgagcctccatcacgaattccgatgccgtggcccccgccgaaatagaactactcgtgaaagcgatgataaatggcttgtcccacaaattagaatgggaacacacaccctacatccactacttcacggttccggacatcaaccggacagacgcaacacaatcactggagttaagtttcaacaaaaaggtgaaaaacgggaacgatttgatcgtggagatccccggttcaaaaatattttccgtactggaagtcaaagcaagcgatgaaaactcccagaccatagacatcatcctctcggacaacgtggatgcctctcaggatttacaaggattaatcaccgtagacggagtgaatcgcctaaacttcaacgtgcagggtaacattatccgagtatattccaacgaacgggacaagatgcaaggggtcgttcaaataaatatctataaaggtatcaaaaactcattcggtgaaaaattgaaatcggatgccacctacaacgtcagtttcgcctccgccaaacccgctgttgcctttattggtgagggaacatttaccccggccgagggaaacgtgctgatccccttctccgcggtagccctgaaagccgtgcaattgcgtgtggtaaaggtattcaaccaaaacatgaacttctacctgcaagacggtaattacaattatagtagcgattaccagttacgccgggtgggacgcatcatcttggataaaaaaatcccgcttgaaaaagaaggtcacccaataaatgccaacaaatggcaggactacacgataaatctggcagaccatatacaattggaaaaaggagttatctaccgggttcaactgaaattccaaaaatcctacacgaccctagcctgtgctaacgagggattggatggaatcacggaagaccattgggattcccagtctgattatgacgattatgatgacgacgattactactataattacccgtccgactactcatgggaagaacgggacgatccctgttccaactcttattactacgtgtctgatcgtttccccagaagaaacttgattgtcacctctctcggccttaccgccaaaaccggaagtgacggtaaatacgtggtagccgtgaacgacctgctcacggccgctcccgtggaaagttgcaagatactcttcttcaattaccagaaccagaagattgattctgccgtaactaacaattcgggaatcgcaaccgcacgagtacaagggaaaccgttcatcgtgcttgccgtcaagggaaacgacaaggcctatttaaaagtaagcgatgcaaattctctatcatacagcaactttgacatcagtggcgaagtcgtgcaacaaggaataaaaggttttatttatggagaacggggcgtatggcgtccgggaaatgaaatacatctctctttcatgctggaagacaaagagcaggtgattcccgtgggacaccccatcattgccgaactctacgacccgaatggtaacgtggtgcaaacgaaacgggaaggacgtaacgaacacggcctctattgtttcaccttcaaaacagacgagcaagccgtcacgggttactggcgggcagttgtacgtatcgggggagtctccttctggaaaaccgtccggatcgaaagtatcaaaccgaatcgcctcagtatcgtgaccaacctgccgaatgacattctgggaaatggtatcccggataactccattcccgtgcagacccgttggttgcatggagctaaaaccagctcgctgaaggtcaacaccgaattaaaattatcccagagtaacaccacgttcccgggatacaaagaatatagttttgatgaccgatctcgttattttaacgcgaccacaacaaccttctttgaagggaccaccgatgcggagggtaattttaccctatcggctgatgaaatcagcacggagaacgccccgggaatgttgaatgcactactcacgctgcgggtattcgaacccggcggggacttcagcatcacgacagcaggattcaaatattcaccttataaagaatatgtcggcgtgaaacttcccgactccgaggataactggtactccgccggcaaaccgatccccatcgcgggagccgtgcttacggccgacgggaagccggtatctgacagggaaatcgaagttgaagtctataccttggaatggcgctggtggtgggattccgaaagggacaatatcggatcatacgtgaaccgctcctaccggaaaccgatcttcaataaaaccgtgaaaagccaaaatggtaaattcaatattgacgttacctgcaaccaatggggacgctattacgtgatcgcaagagataaatcctccggccactcctgtggaacgaccttctacgtaagttcttggcggaatgacatgaatatcccgggtatggccaccctactcaccttgaccagcgataagaaagcctaccgtgccggggaaaaaataaaaatcaccttcccttcttccgagggtagcgtggcactcgtgagcgttgaaaacgggaaaaccgtgaaagacatattccgtgtacccacatcttccggttccacctctttcgagatcgaggcgaccagtgaaatgtgtcccaatatctacgtcaatgtctccctcattcaacctcacaaaaaccggaacaatgacaagccgattcgtctgtatggagtactgaacatcaatattgacgatcctaacttacgcctgaccccaaagatcgatatggcacaggaacttcgcccgtcacaggatttcacggtttccgtgagcgaaaaggacggaaaaccgatgacttattccattgccatcgtcgatgaaggattgttatccctgacctccttcaaaaccccgaaccccttccccgcattctatgccagagaggccctcggcgtaaagacgtgggacttctacgatgatgtcatcggagcattcgggggacgtttggaaaaagcatttgccgtgggaggtgacgaatccttggaaccggaagagaaccgaaaaagcaatcgttttactcccgtggtaatcttcaaaggcccgttcaccatcaagaacggggaaaagaaaatgcacaccttccggatgccggaatacatcggggaagtacgcacaatggtcgttgccgaggacaacggacgttatggttccgcctcgcaaagcacgaaagtcaacaaaccgttgatgctcaacgtcacgatgcctcgcttgttcaccccgggagacatgatcgaaattccggtaaccctatttgccatgaaagagaacatcaaaaatgttaccgtaaacatcaaaaccgacgataagatcgaaatcattgaacccgcaagcaaagaagcccacttctccggcacgggagaacagatcatattcttcaaggtaaaaatcaaagaaaacattggtaaatccacgttgaccttcacggcacaaagcggctcggagaaagcccatttcagttgtgatgtcgacatccgcataccgaatcccaaagtaacccgggtagacgcgcgggaagtggcaagtggagaatccatcaccttcaacaacacgatggaaggtttggaacccgcctcgttcctcgaaatcacctccatcccggcgcttaatctggaacaacgtctcggctacttgattcgttacccgcacggatgcggagagcaaatcacctctgccgtgttcccgcagctcatgctcgaccgaattatggacctcagcgaggctcaaaaagttaccgcagaattgcacgtgaaagacgttatcacccgcttgcgcaactaccaagtaagcaatggtgggttcagctattggtcgaactccagctacgtttccgactgggtttccacctacatcacggatttcttaattcaagcagagaaagtcggttatcgaatcccgacttccatgaaaaactccgctcttgattacctagcaaaacaaacaaatgcttggcgacggggagattattactcggaaatcgaacaatcctaccgcctctacgtgcttgcacttgccggcaaacccaatatggcagccatgaaccggatgaaggaagatacctacaaaaacccgattgcccgctggcaactggcgggagcctacgccttaggcaaacacgaaaagattgccaaagcgctgatcgccaatcttccggcagaagctgaactatatcgtcagcttggcagatgttacggttccgacctccgtgacaacgcgatcatcatgcaaagcatgatcaacatggatatgaaaaacgaggcatacaagctcatgcagaaaatggcccgcaaatttgcatccaacgaatggttaagtacacaagaaagtgcctttggcctgtgtgccatcggtaactacgtggaacgatacttcaaggatggtaacggtattgatgtccagatcgggaaagacaactacaagacggcaaaaaccgtgttgcaaaaagagttggctgtgaagaacaacaaatcggaagtgaccgtgaaaaacaactcttcgggaacgctccacgtgcgcaccatcaacagctccacgccattgggagtgatcacgcaaagcgaaatgtccgggttgaaaatgacggtcaactactatcgcaacggcactcggaacaacgaacccaattataaacaaggagaagacatcgtggccgaaatcacgatccagaataccggaaatatcggtttatacgaggaattggcattaactttcatgttcccctccggtttcgagttcctcaatgaacgtctcacgacaggcgtgaacccgttccaaggaaccgacaacgtggacatccgggatgaccgggcatacctctatttctcgttaacacaaggccaatcgaaaactttcaaacttcgctttaacgcagcgtactccggaacttacctacttccggccatcacctgctcggcgatgtacgataactcgattaccgccactcttccggggaacacgatcacgataaacagagagtaattaattttaaattttagattgaatgatttctgaataaacaaaggccttgtgtaccagttttcagtttcttcaatctaaaatctaaattaataacctgcaacttgtaaccaaccaatctgtaacttgccttcggcaacatttaatacatttttaagaaaaaattcatgcttattatttagaaataatctacatttgtcaagcaaacgatttagatatgcgtcgagaaaatgtaaataaactgatacacttgttcctgctagctctgtttttgagctattacggaagtatcacctttttctcgcattatcacgtggttaacggggtcacgattgtccattcccatttcttttgcggtcacgccgataccgacgggaaagccgatcacacgcactcccccaaggagctgacattaattgcctacttaaccactttcatcaccttgatcagtgccgcattgctcatactgatctctttctctataacccagagacattaccatatccgaaatcaggcagatgaaccggacaaacatattttcaccttaagccaactccgggctcctcccattctcgcgtaattatttcatccagactaaaaagcatttctcaaagaaatgcaagggactataattgtctccaagcgggtacgtctcatgccaagccatactttttccaagaagggagaattatggcccaatattaggacatccctcttgttatcagtctagtatgcacaaaattatgtgctttcattcttagaaaaaaacacccctctttcccagacaggaatgaggtataaaataattacgtacaaatgaaaaacttacttacactcgttatattacttttcccagccctttacggttgggctgatgaagaaaacaccgtgaagaaaaccacggacgcccatatcaccggacacattatcctgaaagaaaccggtgaacatctccccttcatgaccatattgttgaagggaaccaacatcggcacggccacggacgaaaccgggcattttttcttgaaaaacctgccggaaggaaaatacacactccgcgtacaaggggttggttataaaagtgcagagaaagaaatcgtgatcgtgagagggaaaacccaagaagttaacttcgaaatcagcgaggatgccgttatgcttgatggagctgtggtcaccgctaaccggaatgaaacggatagaagggaagcccccgttatcgtcaacgtactatcgcccaaagtattcgagaatacgaactccgtatgtttgtcccaaggattaaacttccagccgggtctacgggttgaaaacaactgccaaaactgcggtttccagcaagtgcgcatcaacgggctggatggcccctattcccaaatattgattgacagtcgtcccatgtgcagctcgcttgccggagtgtacggcttagaacaaattcccgccaatatggtcgaacgagtagaagtactacggggtggaggctccgccctcttcgggtcaaacgccatcgccggaacaatcaacatcatcacgaaagaacccttgtacaatttttttcaggttggacacactctttccgccattgacggggaaagttttgacaacgtgacctccttcaacggggccatcgtcaacgatcaacgggatgccggaatctacctgttcggaatggtgcgtgaccgccaagcttacgaccacgacgatgatggtttttccgagctgggaaaaataaacagcacgacactcggtttcaagacttactacaaaccgacccatttcagtaaattcaccctagaataccatcatatcaaggaattccgtcgaggaggaaacaatttaattcgttataacccgatccccgatttaagcctgcgggcaagctattccgagggattccgggctccacagacctacgatgaagacctccacgtggcagccgtcggcggggaagtgaccctaatacaagtggcaaaggacttgaagaccgaacgttcccgcagttacagtgcatccgtggattactacaccgcttggggccccgtacagatcaacctcctactggaaggattctacaccagcctccacaaccccttcgtgctggaagagatcgaatcggatgacgagaacaaaatactggaacgtcgtaacgggtcggacgccgtggtgaaaggattcaaccttgaaggcaagatcgccccgcacaaatccgtacaactacaattcggggccaccctgcaaaacagtaaatacgatgaacccgttgcatggagtaaagaccccgacgtggaagcctgtcgcaaactgttgcgctcacccgatcaatacggttacgcaacgttaaacctgctcccgttcaaaaacttctcggcagccctctccgggacttacacgggttccatgtacgtgggtcactcggccgggtacatcgagaaagacgtgttggaaaaacggactccttcttcgacgccacgattaaactggcatacgacatcaaggttggcaggggttacacaattcagttcaatatcgggatgcaaaacgtgttcgacagttaccagaacgatttcgacaagggggaattccgggattccggttacatttacggtccgggcttgccaagaacttattttgcaggcctgaaattcggaatattctaaaaatacagtatcaagatttcactttatcgacaaagggccgaactcgcaaggttcggctcttcctctttagtattaaagcgtacttgcctcggtatctcactggtgactcgttaatatatccttcacgtttcaagataaaatcaaataaaaatacaccaccgccatccatccacttcccgttaacttcccgttgactttccattgacttactaacgagacacacctacaacacctattcaaccacggcaagataccaacgaaagtacatgaaaaaagccataccttttcggcatggcttttattgaatataaaatgttggttatctgatctttcccgttattcaatcacacattcactaacttcttctgtcgccaccatcttactcttatcctggttcaaacccttgttttcacccgtttcaccggtatttttcagggtataggtaccactatcttcccggttaaccgtttctgaagtgtttttcccgtattcagtccagagtagttttaccggtacagacgtctgtccctcaggcacgatagaggtcaagtcgaaagaaacccgtccccgaccccatgaataatttccttgatcgttacccgtgtcaggcctttcaccgtaagcgttatggcgcaaggtcacgtaaaccgtgtcattatgagccaccacgtcaccctgtaccaaattaatgaagtgtttctctttagacccgtcttttactggaatccggaactcgacattcaagtatcttccaccgaaccacgcttcccgcacgttgatcggatcattaccgatactatcttgccgtacttccttatcttcattaatgaaagactgttttaccggcaccttcgtcaacacgtcatcaaacccgtaaagacgaatgtaataattcatattaccttccaacccggtctcgtcacgttcgctacccacgatagagtaattcacgtacacccgaagatcttcctccgccccgtcaaaattaataggcatcccttccgtcacgatcagccggttaccatcgtcccgacgaatggcaaacttggaacggctcccattatcaattttttcgaggttaccataactaagccatgagctacctccgcccacgtagtaatattcgtcatcatcgtcacaagccgtaaaacccatcacgatcaacgaacaaataagtgcaaatttccatgttttatttttcatagctgttttttttaatacatccaatagatgcttatatttttaaaaagttgcgtcaacaggctatattattgctttttttaaaattcatttcaaaatattcagaccctcaaaagcaacaagttactaaatattaaaacaccccggaacaaggccaaaacctacaacttgtaacttgcaacctacaactaaatctatatctttgtaacaaaataatgcctatgaaatactctctcgttatattttctttcttatttctgattattttcacgttttcctccacggcacaggaaacggccaaggcaaacaagggagaaggagttctgcaatttttaaaacgtttcaatcgcacgaaatcatttcatttcgaccgtttcgtcgaactgaaccgggataagctggacaaaaataacgggctaaaactcggtgtcacgtacacccttccccctttgaaaaacgagggcaacgaacctctattcggagagaaactggcaaaatacaccattgattccgacgagttaaacggggcctgcttttatctcgtgagcggacacgggggaccggaccccggggccatcggagaattacggggccacccgttacacgaagacgagtacgcttatgacatcatgctccgtctggcccgtaacctcatgtcaaaaggagccaaagtacacatcattatccaagacgcgaaagacggtattcgcaacgataaattccttgacgtcagcgaccgggaaacctgtatgggacaagccattcccttgaaccaagtcaaacgtctgcaacaacgttgcgacaaaatcaatgaactattcaagaaagacaaggaacactatcgccgggctctttttattcacctcgacagccggagcgagagtaagcaaatagacgtgtttttctatcattacgacggaagtgccaagggcaaacatctggcaaacacgctacaaaatgttttcaaccgaaaatacgacaagcaccaacctctccggggtttttccggcaccgtgtccccacgtgacttgtttgtaatcaaacaatccctgcccgttgctgtcttcgtcgagcttggcaatatccagaacagccgggaccagcaacgtttcctactggacgataaccgacaggctctagcaaactggatgtgcgagggacttatcgaagattataaaaactacaagaataaataatttatcaaatctgtatgcatcacaattgttctatctcctcacgagaaagacccgttatttgaattatcgtctctaaagctatccccgaggatttcatttttccggctatctcctgttgtttcctcttttctccctccacgaatccttctgccctaccttctgccttaccttcttccctgccttcttcccttccttccgctcttccttccgctcttccttctatccgaccagtttcaatgacgcttttttgataacgtaaagcttccatatcccggtaataagcacgtttttcatgctccggcaaggcatccacccgcaaacgttcacgcgcttcaggcaatcccttcgccgtggcagttcggtcaatctctccggtcttgagaaatttgacccattcatccaaaggcgtccgagccactgtatcgaaatcattcactcgcaacacgtaatactccgggaacacgtctccagcatctttacccacgaataattcccgttgccggacagacaatttcaactcgtcgttcgggtcatgcaatccccggaacaaagttttcccatgatacacgtaatccttaccctgtcccaaatcgaaataaacaatatttattgagtagacttttcgcacttcactgtaagcatcacctaaccctatatattccgagatcgttttagacaccccgtatagcatccgatggaagtaatccaattcacggttattttggatctcaataatcattaattctcctttagtatcctccaccagaatatctgcccgattgaacttgttgctcgcatccgattgattggattcgctttccaagaaccggcaaatatgtatatcttcctgcaacaacgttgacaaaaatccttccagaacgacataattactcttgtccctaagcaagcgtttcatcgcccaatcgaaatgtattaaattagatctcatggctattctttttatacctattacaaagataggcattatttcgataaatccatcatttagagtcgcttttgctattgcagagaagtctttttcttaaccatcaacccgaaccctttcccccacgacgtggcaatctcaaccggatcacctttcgggaagaacttcctcaaacgagcgatcactctatccaagtaacgataggactctttaaaatcattcccccatccctctttgaccagttcatccttactcacgtattgatttttcttcaaacacaaggttttcaacactcttgtttccatgggagtcagctggttcgtctccccttttataatcaagtaacgacgaatcgggttaaacgaaacatcacctgaaatcttcatgaaatcggtctcgactttcaacattcccatgttcctcaaccaccgattcacccgagcaaccacttcatccagaagtacctctttacgtatgtagtcattcgctccgaggtcaaaaccatcaatagcgtgttgagaatgtgtcaaggaactgataaacaggattggtgtcgaaaaatcctcttcccgaatctttttggccacctcgaacccgctcatcttgggcataatcacatccagcaagatcaaatcaggagtttccctacggtacaaccacaaggcctgttctccatcggcagcatgaaccaccttatacccggctcttttcaaataatcaatacacgttttcgcctgcatggcgtcatcttcggcatacaaaatcttaatcattttcccgtttgtcaactgttaatcgttctcatctttcaccaaagggatcatcacggtgaaagtcgtgccaacaccgacctcgctttccacccgaatcacgccttcatgcgcctcgattacctgtttcacgtagcttaacccgatcccgaaaccatgcacatcagtcgaacgcccgcggtgaatcctgtaataccgttcgaatatcttctctttcaacttttccggaattccaatcccgttgtctttaatggcaatcacgaccatcccgtccacctctttacactcgatctctacttttgccggatcacccgaatacttgatagcattctctatcaaattacttatggcattcgggaaatgaatatcatccgcttcaattacatcaacgctcaactgatagtcaaccttgatagagacattctttcccattaacatcggatcaaacaatgcaaccagtgaatcaatagtttctcgcaaatttaatctattccacgatattttaaacccttgtttccaaacaattaataatttatacacgaaattattcaattgatccacccgtttatgtgccgcatttaacaatattctctgtgcatccttcaaattttcagttccgtacgaaataatcccggaaaaagcattttgcacggcagataacggaagcttcaactcgtgaaccatactactcataaattcttcccgaatcttggatatttggtactgaacgaggatcgttttgatctggtaaataaaacacacaatcaataacacgaacaagacgaaagaactaatcaacactcccgtcatttgtgtaaaaaacgttttatagggcatatcaaaataaacaatcacaccatgatgactttttaaacctaattctaccatattagacacaagccgccttctaatttttgaaaaccccgtatcggtagaagcaataatatcaccagttttagtatttacaagctctaaaacatattcatcctcaatcccattactttcaaagatagacttacatacactatctaacatactaatattttcccctgactgttccttcaccaaatcataacagactttcctaaacacacctaaatatccggcatctttatcatagttaatgattgtagtatctcccttccaaacaaatttcacgattttatcatcaggattcacactaacacttggaggttcttgcacaataacccgattaccaaccaaatattcttcgaacccagattcaactgctccagacaaaatattatttacggtatttaaatattcaacctgcttgaattgaatcaatcgattcaaccaaaaaccttgaaaaatcaacaaacacagtatcgcaaatatcgaaacaccccaaaccacatgaatttttctattcataaacatagtgttataaatctattcaaagatatagaaattattttctatcgtgtcatccaaaaacatttagataaattaacaaaaaatcgatacaaattagatacaatttaagtcattccgatcacttatttttgccttgatttaaataccaagacaaatgaaaaagataatattaataactattttcatatctattgttctagtatttacattactaaatgtaaatataagaaaagattcgacgaatatagatataaaaatccaaaatatcgaagcatttggagacaaggaagacggagatgataatccatgcaaagctcccggaggagtatgtatgacatatggcagtgacgggtatcctattttccaccccggtttatctatcccataaacaattcactatgaaaaagacagcatttataattatagctttattgcttgccttcggttgttccgacgagaaacatgaagtgccaaaagaagataatccattattcagtacaagtcgtgctatctccttgaatcaactgggtgaaacgattaacttggaaaaaattggaatttacaacccgacaaaagttatcaaaaaagactccttacttatcgtattggatctaaacggacttaataaaatctccatataccaagaaaacgggaagttactaggcagttatctgccaacgggaatgggtgcggatcggggactctatattctcacgatgaccctcgacgacaaaggaatcctttccgcctatgactttggaaatgacagattagttgaattcgatttaaatcacttcggacaacctgaattcggacctaaatttattgatatgcccaaggataaaaaacacctttgcgtggcaaaatcaggctcgacaattatctctaccggaatgtttgacgaaggtagatacggtttaatgaacaacaatagcgaagaatactttttaagttacccggaaataccgagttatcgcaccataaacgatactttaagaagtgctttatttgccagtaatatcatcaagataaaacccgacggaacaaaatttgtctgtgcgaatatgcagagtggcatcatcgatttctgctctctcataccttgcaccaatatcactcgcgttgccgagctgaatctttattctccgaaagccacagttaaaaatatgcggagaacgcccgttgcctattccacagacaatctcttcgggttctgtgatattgaagttactgacgagtacatatacgccttgtattccggtagaagttaccgcaaatataaagaccagatagtatacggtgaacggattgttgtgttcgactgggagggcaatcacgtccacacttatttattaagaaatccgttcacctctatttctttcaacaaagaagagaatgcaatttacggtttgacaaacaacccgaattcagtgttaatcaaatatacattggattaatttccgcgtgagaccgctccttggaaggatgtctcgataggtttccttccaaggacctttacccggaaacggcaaataataccacggagaaataaatcgttagattaaaccatggcaagagaaatacgagacatagcatacccgatcgctttcgccggattcatattactggttatgaccatactggtaattgatcctaccagaatgaacgggctaacgcttgccaaatatttctggttctactccacgttattactcacgggagttataacattcggtcttgctttttactctatgtcggtcgcgagtatcgacataaccaagtcaataatgatagggattttgactgtagtgattattgacatatcccgctactctaacatggaaatgatgaacgcgaaaatatttttgctagtaatcatttcctttttcttcttcgacatctttttccaccactataaaaaagccactaaggtattccaattcgtgctgatcgctttcgcactactggaggtaatctggggatattgccagttgtacgcctatatccccgatatgcaaaaagacttcacgctcacaggttcgctaccccacacgaactcctatgccatgtttctggccatcactctacccatagccctctactggaccatcacgttattccaaaaattaaaatacggttactctcgtctccttaccggaaccgatgaagaacatgtgagactggaaattgttgacgacattcttttattccttctttctgccctcgggctaatcgggattctatccatactaccgcttacgggaatcccatccgcatggtttattgcaggatgtagcgggctatttgttctgtactttaaattggaccttcacacctttataaaaacctctatactccgaagtcacaaaagaactaccatatccgggatcacgctcttactcgtgataggcttgcttaccaccggtttttatcgattacggaaggatgaaataaacaaacatctgttaacttggaaaatatccctgcaagtgctgaaggaaaaaccgatcactggtgtcgggatcggaaatttccggaaagcattcggggatgcccaaacaacctattttgaacaaggagaaccaaccgaacaggaagtagcccttgccggaaatcccaactgcccggagaacgacttcattcaactggcaaccggcacgggaatcatcggaatattattgtttatcggcctcatcgtttccgtcctgttctccggattcaggaacatggataaacacccggagaaactggctatcacgggagccttaattgcttttatcctcgcgggattcatcaattcccctattcaatcattatccctctcgatcttgttggtactgttaatcgctctcgggacctcagacattcagcccgcaagaaaaagaatacccaaagttataccgatcatgacctcgctacttttgatcgggatcacgaccaccatcgtttacccccagttcacgatgttcaaagcatacaaacaatgggcccatggacgcctttattataaaatgaaaatatatgccacggcagctaagatatacaccccgctaacaaacacgctacgtcacccctattttttcatggaatacgggtacgccttgtcacaaaccgggcaacatgaagagagtatcgccatccttcaacgagtggcacaaattctccctgacccgcagatttataatcgtatcggcaagagctaccaagcactgggagaatatcaactggcagaacagtattttcaaaaagcacatcacatggtccccaaccttgtgtatcccaatttcctactggcccaattgtaccttgaaatgggcctgcgggacaaaacactggaatgtgcccgtcagatactcacgttgaaacctaaaaaagaatcagaagaaacactatatataaaagcacaaatggaacaattaatccaacgactggattaatcccgccgagggatcgaccggatcccattcacaccatagtacatctaaatccatcactttggggagacatcatagtctccctttcttttattctgacaaataactatattcgcgacatcataaatcaacacgcatgaaacatacccggttactcattctatttttgatcttaggtataaccaccttatcggcacaaaagtcccctaagcgagaatttcgcggggcatggattcaaaccgttttccagagtgaatacgctaaaatgacaccggacgaaatgaaagccgattttattcgtaaactcaaccaattgcaagaatgtgggatcaacgccatcattttccaagtccgcccggaagccgatgcatggtacttatcggaaatagaaccttggagccgtttttgcacgggcaaacaaggcgttgcccccgatcccctgttcgatcccatggctttcctgatcaaggaatgtcaccgccgtaacatggaatttcatgcttggcttaatccttttcgcgccgggacttccggcacctccacgctggctgaaacccacgtgtaccacgaacatcccgaatggttcgttacctacaacaaacagttacttttcgatccgggcatacccgcttgccggaagtacatttgccggatcgtggaagacatcgtgagccgctatgacgtggacgccattcacatggacgattacttctatccctatcccgtgaacgggataccctttccggacgacaacagtttccgcacctacgggaaaggctacaaacccgaagaacgggacgagtggcgccgggagaatgtcaataaactcatccgcgagctgaaacacaccatcgtggcaaccaaagaatgggtacgctttgggatcagtcctttcggtatctaccgaaacaaaaaaagtactcccgatggtagcggcagcaacaccaacgggttgcagaactatgacaacctgtatgccgacgtaaccttatgggtcaaaaagaaatggatcgattacaacataccccaaatatactgggaaatcggccacccggccgcagactatatcacgctgactgaatggtgggacaaaaatgctcatgatattcacctatacatcgggcaggacgttgcccgcacgatgaaagccaatgatctcaccccaaagatggaactcgctcgttccttacgtcacgtgaaaggcaattgtttctggcccgcaaacgagattctttggaataacggtgggattgccgatagtctccgggaacattaccaccgtaaccccgcattaatccccgcctatacccacatgtacaacggccgtcccaagaaaatagcctctccccgagccgaacgcacggaaaaaggctacacggtgaaatggttcgcccgcggtgaccgggaagatccccgtaatccccagtatttcgtcatctaccgtttcttccccggccagaaaatcaacctgaacgacccggctcacatcgtcgctgtcacccgctacacggaatgttacatcccgaagaaaaaattcaaatgccgttacgtgatcacggctgttgaccgctttcacaacgaatcgaaaggaaagaagataaaaggtatacggtaaatttcaccgtggtgaaatttaccgctgtttattttgcactcacctttatttcagcatttccttcaacaacctccctgagaagctccttacaatttagctatatgcatacctgcgatattattaacctgttgttactttcccaagaccttctccactactgtcaacagctcctttttttccatgtgggcccgcaccacgatctttccctctttgtccacgaccacaaacatcggcacagccaacacgtgatacaaacctcccacacgagacctccccttctcgatttcatctatcacctgcggccacggcaatctctcctcatccaatgctttctcccatgaggccttattctcatcaatactcaccccaataatctcgacccctttctcgcgatactcttcataaaattcccgcacccaaggaaaagacgcccgacacggactacaccaacttgcccaaaaatcaagcaccaccactttaccccggtaatcagcaaggctcaccaatgaaccatcacgccgggttagtgtaaactccggagccgggcgtcccggttcaatccgttgccgcaactcgatactttccctgatcgcttttccccactcgctctgctgcacttccacgtcgaactgtccgaaaacctgctccagttgctccaatgtcatatcatccttcatataacccaattcataagctaccatttccacggacggattggccgccattattttcaactgctccttctttacacgtgcaaaccatacatcaaactcttttctatactcccaataaaaagtagtatcttccaatatttccggaacttccagcaccttttttaccatctctgcaaattttttaaactccggcaatccctctacctctttatactgcccctccacttgttcgtacacgtcttgattcttcgaaccgataatttgcatcccaaggacagccaactccttgttttcatccattcctaaattcttccaatcgccccgcatctcgatccggctattttccaatgccaacatcattcgcaccgtctcctccccctccggttccaccaccacggttgcccacacggcttccggtacttccccctcgaacacgaacgtcccctccttcatttccactgtatcgctgatcatttgttggttcactccattcaccgacaacacagcacgaccgttgcccgcacctttaaacactcctttcaacacgtatcccgcttgactactacaag

SEQ ID NO: 24 - DNA, 19577 bp, Butyricimonas faecihominis
  modified_base (5120)..(5218): a, c, t, g, unknown or other
  misc_feature (5120)..(5218): n is a, c, g, or t
gtttagaggtcataatttgtctaataacagaaatatatggaacaaactaaaacaatcaaaagatggcagatagtatctaaggcacagaattatcttgccaaaactaaactttcctatgatacaaggaaaaaacatggcatcaattggcaacggcttcatgacttctgtatccaagagaatgtagagtgtgattttggtgatgctttatcattggaaatcgcgtttaaccagttcttaatgaaaacctccattcaagaggttgccatgctaagaagcattgagtattcggtcaaacttctgaaagagtttattctgaaaggtacaatgcgtgaaccgcggcaatcttttgactttacaagtcctatcgggcaaaaagcacttgaatacattagtgagaaagaggtcgaacatatacgaccatcatcgctaaatgcctataggatgcaactatcccgatttgttgattttttaacagcccaaaagataacacgggtagaagagctttgcaaagaacacgtgtttatgtatatccgccagttgaaaagcggcttcaaggcagatacttatcttgccatttcgttcacaaagcgattcttaaaatggctacacgaaaacaaatatctaaaaaccaacatcagcattaagattccaagtggcaaatttgttcaacagcctaatttaccatcagtatattccagcgaagaaatccttcgccttctcaagagtgtggacaggagtaatcctgtcgggaagcgtgactatcttattctattgttggcatcacgtttaggtatgagggcttccgacattacaaatttacaattttcaaatttatgctgggaagaaaatctaatcaagttcattcaagtgaaaaccggagttcccgtggagttgcccttacttcctgaaattggcaatgccataattgattatctcaaatacgggagagcagaatcgacacaatcgtatgtattgcttaaaaccttcgccccttacgagccttttcatgtaacttcagtttataatgtagtaacacaatactttaagaaggcagggattgatacggccggaaggcgtcatggttcacattccttgcgacactcccttgcctcaaggatgcttgaaggacaggcggtgatgccagttatatcggaagtgttaggtcacacggacacggattcgaccatgttctatctccgtgtagatgtatcttcactaagcgtttgtcctcttgaggttccgacagtcaacgaaatgttttacaatcaattcaattggtaatcatggcagttatacgtttaacaggtatcttcaaggaagatatagagtgttttgtcgagttgaaaagaaaatgtgggtacaagtatatcgcggaagaaaaaattctttatctctttgacaagtttacagtcgatcgaaacgaacatgaaaatgttatcagcaaggaacttgcacgtgaatggagtaaacagcgtccgaacgagagtgatgcctaccgttataaacgctgcattactctcaaccagtttgcgggttatctaagtctgcatgatagagaatctgcgacatgttatgctcccaaacccaagaaaacattcgtgccacatatctacacggaagatgagatgaaactcatttttgcgacctgtgacaatatggagtgtaccccagtaaggtctgattccatacgttttgtaatgccggcacttcttcgtttcctattttctacaggcgtaagaataggcgaggctttgagccttcgcaaagaggatgtaaagttagatctccgcatagcagtattacgcgatactaaaaacggaaaggaaagactactcccgttttcagaatctatggaaaatgttttgcgtcaatatatccggcatcgtgacaggttgaaccctaatcctctttgcgataaatttttcctttctgcaaggggaagagagtgttcttcagaacaaatttacaaggtgttccgtaaaatcctatcaaaaaccggaataccgtttaagggtaatcattacggacctcgcgttcatgacttccggcatacttttgctgtaaaatccctgctcaagatggcggatagcggtatggacatctattgctccctaccaattttgtcaacctatttgggacatcaatcaatcgaggctaccaataattatgtcagattgaccgtggaaatgtatcctcatttagttcagaatgtggatgctatatttacaaacgtttatccatcattacgcaatgaagacaactgatttcgcaaagtacctttcggactttatgacaatatatttaatcaacgagcgaggatttagcaataatacgattaaagcttaccgggatgcttttgtccaattgatatcctatatggaaacttacaaaaaattgtcaatcaataaacttactttggctgacataacaaaggaaaacgtggtcgctttcctggattggatagagattgaacgtcattgtagtgtttcaacccgtaacggaaggctcgctgccatccactcgttcatcaagtatgtacagcgtgtacatccggataatctttacgagttccagcgtgtacttgccatcaaaagcaagaaacataacatggctaaaatcaattatttgacaatagaaggaatcaaacttttacttgaaatgccggacaagagttctcggcatggccgtagagaccttgccttgctatcattgatgtatgatactgggtgtcgtgtacaagaaattgcagaccttgtggtagaaaatgttcatttgagcaatccttcttttatcatgataaaaggaaaaggcaagaagatacgaaatgtccctatgttacaggaacaaacaactatcttgcgtcaatatatgcaagagaatgggcttatggataacatgtttcgtccatatccattgtttatgaacagccaccgagaaaaacttaccagaggaggaattacccatattctgaagaaatacgtggaaaaagcacgaaaggtaaatcctgatgtcattcccgaagtggttagctgccattctctgcgccactcaaaagccatgcatttgcttcaaggaggcttgaatcttgtttatatccgcgatattctcggccatgtatcaattcaaaccacagaaatatatgcgagagccgactctaagcagaaaagagaagctttggaaaaagcctatattgaggtgtctccgaaagttacccctttgtgggaaaaagacaaagagcttttggaatggcttaaatcattttaagtattatgtgtagtagtttgactataatcgcattaagtattaatggattaatcaaattactacacataacgatttactatccataaaagggaggaacatcactgagtaaagggtggaaagcaattgaaaggtttagcgaggatattgatttagcaatagaaagaacctatttaggatttaccgacgagcaattaacaaataatacgcagataaaaaaattaaaaaaagcgtgttggcatgatatacatgaaaggatcgttccagaattaaaagaaaatttagagaaaatggggattgttgattttgaaatacaattccccgattcacaaaattcgacggtggaaccggttactttttgggtgaattataaatcgttatttccaagtatcgattacatccctagtagggttaaagttgaaatgaccgctcgttctctttatgaaccttacgaggaaatccttatgaattctatattatctgaggtgtttccaaaagcaagttttgcagaggtgccatttcctgtgagaactgcaatcattaaacgtacttttctggagaaaatatttttgctacacgaaaaatgcaagcaagatcacccagagcaagagcgaataacaagacatttgtatgatctttcaaaattaatggatttcccagaaggaattgaagcattacaggatccagatctgtacacgataatcgtgaaacatcgatacgagcttaataatattccaggactgaattatcgacttcatcatccgagatcgattaattttttgccagaggatccggctgcattagaaagttggaaagcagattaccagaagatgttggagagctttatttacgaagaaaatcccctttcttttgaagatttacttgaaaaaatgaatagattacttgaaaacataaggcggatccagataaatgatgaatttttcaatgatgatcaagtaaaatgagtactttacattaatgcttgaaacatggaaataagagtagtcaaacaagaagcccgtgaaaatctcgtgtctgtggtcctgaagggagaacaggaagaagtattctgcctcgaaggatacgaagaacttaatgttccttgttttttcgatgatgaagatgaagaatttcttcccggagatcccctgaccgagattttgtatgaccaagttgtgtgttaaatgaatccgggaagaaagtagaggaattgggatatcgtgaaatgatatattttttattaggaatgctcaaaatattaagagttaagcgagaattcccctgtctttaggcaggggatgatagcgcagtattggagcggagcctgacgaagcggtcttgcggtaaaacggcagggaaaagattggagaatgaaaataattagatttatttagctgattatcagctgaatatttgtgtattcagctaaattttcgtatctttgagtattgaataccagcggaatacaccattttgagagcctacaaatatagaatctatccgacagacgagcagaaggtcttgttcgcaaagactttcggcagctgccgttttgtctataactgggtactcgacctgaagattgaagcctacaaacaagagaagaggtccgtagcttacaaggaagtgcaggaacggatggtgaacgagctgaagaaggagaatcgatggttggtggaagtaaattcccaatcccttctaaattccatacgcgaccttggcactgcctacaagaacttttttcgtgatacccatgctgtcggctttccacgcttcaagagccgcaaggacagacagagtttccagtgtccgcagcattgcagcgtggacttcggcaaggaaaccatctccattcccannnnnnnnnnnnnnnnnnnnnnnnnnnnnnnnnnnnnnnnnnnnnnnnnnnnnnnnnnnnnnnnnnnnnnnnnnnnnnnnnnnnnnnnnnnnnnnnnnntacaaatgccggtggtatggtgtgaaccttgtcaagatagaccgctttgccacaagctcgaagacttgcggccaatgcggctatgtgtataaaggactgaaactgagtgagcgcagttggacttgcccggagtgtggcacacaccatgaccgggacttcaacgcagcctgtaacatcaaagaatttggcttgaaagccccacccacggagcgtgggaaagtcaagcctgtggactgcccaacggtggataaccgaccccgtgtcctaaaaagccgtggcaggaagaagcaggaaaagagaggaaacatcagcctccgaagctcatgcctttaggcgtgggtagctcacgagttctgaaaaaagttatataagataggttagacccgttaggtgtatggagttgcttatataaggaaataattaaaaagatcggcaaatgaaaatgaacaaaacaattggcacaattattttagcgtgcagtcttatcgttagctgcatggcgtgtggcggtaatgatccagaggtagaaccggatccgattcctactccaccagaaaaagaggatccagataaaccattgggtgatattatcctaactattggggagcttccggattccattaaggtagaaactagcgaagaatttaaattctcgatcagtcgggaaaactacaaaggcaaatttagggttagcttagacacgatatgtcccaagtttgaagttattgtaatggaagctggcagtgcgaagcaaataatccggaaaggatgcgagttgaacgtggacgggaaaaaactaaatgaaatagatagtcttacatcaggcgagcatactattaaattttcgaacccggcagtcgttggtgaatatgaactagtccttggcttaaccggtagtgatggggtgaaaaaaagcgagacaatcaagctaaaagcatattccccggaggtaatattcaaaatctatgaggtagatccgtacttagaactgaaaatctttgataagaattattacgaggtacttaatcgagattacacatatgatccgctttcagaggtatttaaagggaaaagagtagacactatatacacgaaagagaaacaaaatgttggttatccgaattctggagaatataatgaacatggtgaacaatacaatattcctgggcgaggaacaactatttatcttggtcaagaaggaggaaaagacttctggtttaattcaggcataacatttaatgatcaaaatgcaacattatcccctatgtggaataattctgcccatagtttgactttccaaaaacaaggatttcattgtcttgatttttggcattttaatattcctgagaataatacataccgtcaccgccttggtaagactatgtacacaatagaatgttttgatttttggggaaaaagagtgacgacagacttgactatcgttgcccttgatcgcaacgcaatactcccgccaacgggacaccggttgccagattgacctaattttaaacagtcctaaaaaaacgaatttaaaaacatcttatcatgaacaaatattttcctcctaattccatagttaaggttacaagatcgtccgaattgctcgaaacaaagcacgggatcgggaaaagttagatatccattttttcaaattatgactatatttgctgaggtaaaaataaacttcattaaataataaggtatgaaagaacttgtagaagaaattcaaacgatgatggaagaattcatgaagaatgctaacgcacaggtagaaaacgggaataaagctgccggaacacgtgctcgtaaaggttcccttgatctagagaaaaaattgaaagaatttaggaaaatatctctggaacatactagaaaataagacaaccttgaacatgtttttttattagattttcgcaatgacgatccggtattccggatcgtttttattaatagttaatttctcgtgatcacttaccaatgtggtcacgagaaattaaaaatgtcgcgataattcctagtattaatttgatctaatttacacttcgaataatgataccatgatcatgaccgaaagatcctgcattatccccggcggttccgcttatttcgtactgtattagtcccccattacttatatttaaagtttctccacttgtcaacttcacggttcctgaggtaacgggcgacgagccgttagtactaatatagaaattgtatcttatcgtgtactttgttcccttgggaatatctgtagaaagcaacatcgacgagtttatccaacttgtttgatcttttttactagcgacattcccgtttattataacttcaatagtccccttgcaataacgagaacctgtggctccataattcggagatacactcgctaccacgtgtactttattttcctcgaataccgctaccacgttcatttcccctgtcactgtcacttgtaagggattcatgtttccggaaacagatccctgccagcgcacgaatttccaaccttcagcgggttctgccgtgatggtgacgttcgtccctgactcgtaatcagatactgaaggagagatacttactgtaccactgccaattgtcgaggttgaaatggtataacgtggcatctccgttacgctaatacttgtggtaacagcagctttgctaccccagcgattttgtgctgtggttgttgcggcgaaattgcctttatctcttgatgccatttcaaaagtgtttactttgccagagttcgtgattactgtagttccagctactctactccgagtgtttggtgtgacttcagaaccattgaatcgtaatgtcccattaaagcttgaattttctagtgcgaaactaacatttagatcctctcctttttcatctgtggcggtcagtttgaatggaataaaatcacccatgtatccgctagcactcgttcggtcagtggcaatctttacttctggcacttttacatcgaaggtcaattccttcattacttcaactgagttttcgtcgtagacaaaaagtttcaacggtacggtaccgacttttgccggagtataccgaatataggaatgatccttgtgaggcagatcgtatttaccaccgttatatgtagtgtacttcgatccgtccgcacttgtttcaattttatccccgtcattccaacctgtcaattgatacgtgaatttacctgaatatcctgccttgtcgaccataaaatagaacacgtatggttcttcaaccgggattgatgtcttacggttcatgttcacgttaatagctgaggttttgatgttaaacgtactcgacgtatttttcttgttgccccatttatctcgaacttcaacgttgatcgtgacgttttgattgagataagttgagtttgaaggggtaaaacgaatttctccagtagaaactccgaaactacctttctgaagggttccggttacaacccctacagatcgaggtgttatatcacttgtcgctattgttccggcatcagatggcgataatgttattatatatgcaaaatcatcggaataattcgctttatccacgttgaatgtatacttaaacgtttctcccaatgttacttcgtttgcttgtcccgtgtttactccagccaagaataaacttaattcgggatttgcaacattaaagtcaatggtttttgtcgtggtcgttccataagtatctttaaccataaaagtcaaactactaactccttcccgtgtaggcgtaaagacaactggcaaaccagctttaatttttccgtagctaacacttacctccgttccattgtacgctttcccatccaccgtgagtgtccccatcgatgtcgcgggagtaatggaataagttaccgtttcagagtcggaataatttgctttcgtcgctttaaaattaaagtttgtcgggttgttcaataccacattgctttcgttgttcacaaatgcaagggtaatcggtgaattcgaaacgttaaagtctatctgtttttcaacgcttttactccactcatccgtgattttaatgtttaacacgatcgctcctaaccgagtcggcttgaatgtaatattggctgggttagctgttaatttcccgcttagacttgtacttccggcaacagtcatatcgcccgcggcgtaggggtactgggtaacctcgtaagtgtaggctcctgtatatccttgcttgcttgcagagatactaaaactatgcgagctgcctaatgtcaagtcggttcctgaattgtttatggttaaatttacagccggattcgtaacgttaaaatctaaagttttttccgttttatttccagtctcatcttcgatttcgagcagaagagatacatatccctcgatgacgggtgtaaatccaatctgtaatcctgccggggcggatacctcggtataatttccagtatgtgctttcccgcccactgttattgctccggctgccgctggagaagttgagatcctgtaattgaatttgccactataattcgccttcgagatagaagcgttaaaggttgttgtagacttgtagagaacactactttctttgtttgttatagtaacctcgatagctggattctccactgtaaatggaattgcaatttctttttctccacctaaattgtcactaacaagtatttttaaaacaatagctcctgcggtagtcggagtaaacacaaccgtgttattagcttgaagggcaactgccgttcccgtgtgagctgaattatttaatttgatcgtcccggtattcgtgggatctgtcacaatctttgctgtgaacccgccactataatttggctttgaaactgcaaaattgaatgttgttgccttgtttagcagtagcttgtactcggcatttgttacatctatggaaatgtctgtgttcgaaatactataacttaatggaacttcggtagattttccccactcgtctgttatcgttaattttaaagtaactgcacctatttttgtcggtgtaaattctaccgaattactactaatattcgtgatatctattttccctcctgaatatgccgtaccgtttacttttatagttccaacattcacgggatcttgtacaatttgatactggaatttaccactgtaatttgccttgctaactgcaaaattgaatgttgtcggaatattaacgtttgcatctgacttgtgtcctgtgacatttaccgcgatagccggattcgttacgttaaagtcataggtttcagctacttctccaccgactttatctttaattgtaatttttaaagaaactctaccttctactgtcggtgtaaatccaatacgcaagttggcaggattcgttacggcagctgttccaccactatacgcgacaccatctattgttactctcccagaacccgcgggaatctgttctacaatgtaatcgtaagctccagagtaataatcttttttcattgccacattaaagttagtcgcggtcttaaagattatattctcttgcttgttggttacggttagatttattccgggattcgtcacgttaaacgtgatggggacttccttttctccgcccagatcatcagatatgatgattttcatcatgatcgctccggttcgtgaaggaataaattccaccgtatttgttgcttgaatggctactgtcgttcccgtgtgagctgaattattcaacttaatcgttccagtatttgtagggtccgtgacgatttttgccgtaaatccaccgctataattcggtttacttacagaaaacttgaaggttgtcgctttatttaataataattcgtactcgttattagtaacatttgcgacaatattagtgttggaaacactgtaatttatcggaatttccgtcatcattccccaggtatctgttacctgcaattttaagacgacagcacctaatttactcggtgtaaattctactgaattactattgatattcgtgatatctatttttcctccggaatatgccgtaccgtttacttttatagttccgacatctgcgggatcttgcacaatttgatattggaatttgcccgtgtagttcggttttgccacggagaagttaaatgaagttgtggcattggcttggatatcctttgtctgtccagtaacatttaccgcaatagctggatttgttacatggaaatttaagttttcgattacttccgcgccaaccttgtcttttatagttaatttcaaggaaacacgtccgtcagaagtcggtgtaaatccaatacgcagattggcaggattcgttacggcagccgttccaccattatatgccacgccatctactgtaattgttccggatcccgccgggatctgttctataatgtaatcgtaagcaccagaataataatctttagacattgcaacatttaggcttgttgccgtgttaaaaataatattttcttgcttgttggttacggttaagttgataccgggattggtaacattgaaattaagggcaacatctttctctccatcatgttcgtcgaatatttttaatgtaagaagaacggctcctgttgttgatggagtaaatgttatcgtgttattttcttgcaggtttaccttcccgttcgagtaagccgagctatttaattttatcgtgccacaattctctggatcttgaactatctccgctttaaacgatcctgaataattgggtttgttcacggtaaaattcagcgtggtagctttgtttagcaaaagatcaaattccttgtccttaatgtctaccaagatatcggtattggaaacactgtaatttattaacttctcggtcgaaattccccattcgtcggtaacggttagtttaagcgtcactgccccggttttgttcgcggtgaatgaaatcgggttgctattcacgttcgtgatgtctatttttccgccagtgtagtctgttccatttatcttaattacacctgataccggggattcttccaactgatattggaatttgcccgtgtaatttggtttgctaaccgtaaaattaaacgttgtcggggtattaacttttatatccggagtttgtcctgtaacatttactgcaatggcaggatttgtcacgttaaagtctaacgtttggacggcttccgccccggtcttatccgtgaatctaaatcgcaaggataccctgcctgcgcgagtcggggtaaacgccacgcgaatgttcgagtgattggttgcagttacagatcctcccggatacgccacgtcatccacggtgacgatccctgagtttgccggaacttgctcaatttcatagtcgaatgttccaacatagaaatctttcgttaaagcaatgttgaagttagtacgagtattatatatcagttcgtcttccttgtttgttatccgcacttgaatctccggattcgttacattgaacgataaaggaacttctttctccccgcctaattcatctgttacctgtaattttaataagatcgcacctagctttttaggggtgtactcgatgctattattggcttgtacctctatttcttcaccgctgtacgagttattattaaattttatcgtaccagtattttccgcatctattacacgggctttgaatgttcccccgtagttcggtttacttacagagaaatttagcgttgttgctttgcttaatagcagatcttgttccttattcgttatatttatcgaaatatcggtattaaccacgctaaaaggaatatcttttacagtggatttgccccattcatcggtaacggttagtttaaggacgatcgcgcaatttttgttcgctgtaaatttgactgtattatttagaggtgttgtaagttctaatttacctcctgtatatgttgtaccattaatttttagtgacgctattcccgcgggggattgctcgatctggtacattaattttccggggtaattcgcttttgctgccgtgaaattgaatgtggaggtcgcgtttaccatcacgtccggggtatggtttgttacattcacttcaatttcaggatttgcaacagagaaattgtatatttcctcgataacgccctcgacatcatccatgatttttaacttcaaggaaacggctccttctcgtgtcggggtaaacccgatccggagattgtccggatttgtcacggtagtaataccaccgtcatacacggctccatccacggtcacgactcctgaatttgctggaatctgtgaaatttgatatttgaatgtaccggtataaaatttcttggctaatgccacgttgaatgaggtcggagtattatagataatactttcctctttatttgttgtgtttatagaaatttccgggttcacgcagttaaagacgatgttttctaccgcttcaccgccaaattcatcatacacttttaattgtaacgtgttttgcccggctttgttagaaacgaattcgataatcgtgtttacggggttcgttacaggtactttgccactattataggctgtgccattaatttttatttcacccgcattttcgggagtaataattatttcctgtttatatgatccggaatagttttccttaaccgtcgaataattgaaagttgttggcttgcctagttggatcgttttctccacgttacttgttacgatactaaacttagaattcgctacaatataacttagacgctcttctgtttcccctccaaattcatcccatatttttacatttaggaatgttgccccaattttttccggaataaaggatactttcgtgtttgttgggtttattacatcagttcgcccgccctcgtaaggggtgccatttacttttattttccctgccgttacaggttccgatgttatctcgtaagtaaactttcccgtataatttgctttgcttaccgcgaagttgaaggaagtttctttatcgagagatatagcggtttcttgatttgaaacgactaacttagtctggttgtttacgatgttgtattcgaatgctttttcccagcgtccgccagttgcgtccgttacaatcaggtttaacgttattttcccggaagtagtaggtttaatatttactttcgtgtttgctggatttgtgagttcacttaatcctccattataaatttcatcattgaccttaatctgtgctgcgtttgatggaacggttgtgatgatgtagttatatttccctgtataatactctttagaaacagagaagttaaatccattttcaacatttaaactcccttccggaacgaaaccagttatttcagttttgatagctgggtttgtaatcgattgagatatggtttcgactgtttccccgccaaactgatccgatgtagtaagcttgaaacttacgttaccttctttcgtaggagtaaatttcaccgggacttctttacctgactggatctcgacttgtccggaaacgtattgtttcccattaacgacaagtgttcccattccttcaggggttggagtgatctcgaatttcagattaccggtgtaattgggtttagacgcgataaagctgtattctgaaatttcacccacgtgtaatttgggagaaacatttttcagttgaaggctgatatttgaattaacgacgttaaacacgaggtcttgcgtcgctgtttttccccaatcgtcagtgacagaaatttgtaatttagtggaagccgatccgacaacggtagggataaaagatactcgggttcctgttgaagaaacttctattggggtattttgggaataagctatatcgttaatttttatatctcgacagttttcaccagtgatgatagcattaaatttcccggtataatttgctttattaacagcaaaattgaacgcggatgtcttatcaatagttatatctgattccacgtttgctaacacgaggcttaaatccgggttcgtgacattgtaagtgaaaattctctcggtctttccacccacgttatcggttacattcagtgttaccgtgatttcgccagcgacagaaggaacgaaagaaactttcgtgtttgccggattctctagcggtactacccccccggcgtaaattttgtcatttatttttattacaccagccccactcggagttgtcgtgatggagtaattgaacgccccagtatattgatctttcgtggtggtgaaattgaacactttttcggtgttaatggtggcttcagtcgtgtaattaacgacctctagcttgattgccggattcgtgattacctggttgatcgtttgggatttctcacccccgaattcatcggtaaccttcaacaagaaagaaacttcaccttctttgccgggagtaaaggttaccgaaacatctttgccagcactaaattctattttccccgacgagtatgcctttccatcaacgacaagggaacccatcccttcaggagttggggtgatttcataagataaattgcccgtgtaatttaattttgttgatgagaaattgaaagttgaaggttttccaacataaacttgattctccacgtttgtaaccttcaaatcaatatcagaattggttacagtaaaactgagttgttgtgttgcacttctcccccattcgtcaaaaattttcaatgtcaaattaatgggtttcgtactactaggaatcaatgatactttcatcccttcaggtttactcacttcagcggtagaacctaacgtgtacgcgatatcgtttacttttacatctttacaattatccgcatcaatagtaaacgtgaatttcccgttataatttggttttaaaactgaaaaattgaaagatgtagttttattaaatgtcagatcagtctcgatatttggtaaaaggatcgttagatccgggttcgtgacattgtaagtaaaaattctctcaatcttcccacccacgttatcggttacattcagtgttaccgtgatttcgccagcgacagaaggaacgaaagaaactttcgtgtttgccggattctctaacggaaccatgcctccggtgtaaattttgtcatttatctttattgctccagccccactcggagttgtcgtgatggagtaattgaacgccccggtatattgatctttcgtggtcgtgaaattgaacactttttctgtgttgatgatggcttcagtcgtgtaattaatgacctctagcttgatagctgggttcgtgattacctggttgatcgtttgggatttctctcccccgaattcgtcagtaactttcaacaagaaagaaacttcaccttctttagcgggcgtaaaggttaccggaacatctttaccagctgtaaattctattttccccgacgagtatgttttcccatcaacgacaagtgttcccatcccttcaggggttggagtgatttcgtatgataagttgccagtataatttggtttcgtggatgaaaaattgaaggttgaaggtttccccacgtaaacttgattctccacgtttgtaaccttcaaatcaatatcagaattggttacagtgaattcaaggtttttgactaccgttttcccccattcatcgaagatatgtagttgtaatcggaccttcccgacctttgatggaataaatgtgatacttgtaccagttatgactggaacgtctaatcgggagtcagctggatatggagtgttatttacttttatgtcgctacatccctctacatttgcaatttgatattggaatttccccgtgtactgttccttcgatacagcgaataagatagatgcttgtttatttatggttaattcttccgtggggtttgtgaccagaacgtttaattccggatttgatactttataagtgaatgtccgttcaagtttaccacctatttcgtcttcaatatttaatgtaaggcgggtttcagcttcttttgtgggcgtaaaacttaatgtcacattatccggtttgtcaagaagatttttaccacccttgtattcttcgccgtttactttaatagtgccggttccgataggatctgtagagatcgtgtagttgaatgtcccggtatagttttctttggaaagtgatagacttaaaagattttccgtgtttaaaacggaagccggattgtagttataaacttccattttcacagggggattgctaaccttgtacgttacagggtaacttgtttctccaccaaattcatcaaaaacttttatcaagaggtttgcttccccttcttttgttggggtaaatgaaatgatagacttctctcctgttttaatggttgtgtaagctccgacgaaattgctataagctttcccgtctactttcaattttccggcatcttccggagacatatcaatctcaaatcgtagatcgcccgaatagaaatcttttgttgctgaaaagtcgaaagtagtttctttacctaagattatatttcctttttctaaatttgtaacagctaactttataccagtattagttactgtatattttagtgtttccgtgaatgatccgccaaatacatcgtagacggttaatgtcatcgttacctctcccaccttgttcggggtaaagctaacttgtgtattcaagggattggctatatcttgtcttcccccgtaatagtttgctccatcaacttgaagagttccggaaagtgggaacatggagatttcaaattggtatttatcattgtaatttggttttgaaaccgcaaaattgaatttgtttgtttcaagtaagtttaaagtttgctgttgattggagattgttatctttccttgagtattctctaccgtgtaattgagttcagaggttgattctgaattataatcatcgtagacttttaaagttagtttcaaatcacccggtcgggaaggaatgaaagatacaagtgtattttgtggagatacaatggaaatttgaccgcccttgtaatcttcaccatttacttttatcgcgacagaatttaatggattctgaatgatctcgaatctataatttcctttgtagttctttttattaacagcaaaattgaaattttgcgtgttatatacagtaatgtttctttcgtggtcggaaatattgatatttgtctctgacttttgaaccttgaagtaggctgtgtcttttttgacagaattatatttatctttaacaataaattcgagggcagcctctccgagttccatcggaataaattcacagatgttttctcctttctgtagttgaagggtgcttccaacttgcaattcgttgttatttatccgaagttttcctgaattctgaagattccggtaggctacttggtatatgttttgtccgtgattgtccgtgtcagtgacttttagcaggaaattgttggttgcacctgcatcagcaacggtatccgtgattgtttccacggagaaatccggtacatatacatcgattggaacgtctattgattgagaaaagccaagagaattggttacctgaaattgtaagacgttttttccggctttccgagaaatgtatgaaagttggttttctccttcaataagataattttgatcttttgaattagatcgtgcgaaaagatttttttgagtagaatctgtttggatcgtatcaatttgttgaaatacaatctctcctgccccatccaagactgtaacgctagtggcaaatgattttgccgttgttgcatctgcagctttctttagctttaaattgaacgtgaattgtttgtcaacgagaggttttgctggaagttttataacttctgtctggaagtacagtttcgatgcttgtccttcgaaacgttctgtcacgttgatagcttcatttgatagcttgaatagtaatttatgatctccggagcttgccggtatatatctgaattttaatctgtcttctttgcatgaaacactaattccaggttcgataattgtatcgtggtattttaatacgccctccccttcttcctgggtatagcttaatttgtaactgccaatatcgcttgttttttgtatgtcaatcgcgaaatctgtttcggtatgcatgtatagatccttgaaatcttgaccgttaagatttactatttcagttttgaaacggtagtcttttaagagatcatcgatctgatcatcatagcacgcgtatatcgctccaataatagttaatattattgatagataaagtgacttctttttcattttgcttctgttggaattgatggatattgaaataaattgaaagattttatccgcgcatgaaggctagagtattgagaaaaaagcttacctttgcgagataagaatgttgttggcattatgcccacttcgtttgttaggactgggttcccccgtttagaacgggggaacttttatttttcaatttcataatg

SEQ ID NO: 25 - DNA, 19444 bp, Butyricimonas faecihominis
aattcacactaatcaataaaaatgggtttattgcaaaaaaaacggatgctcaaagtagttccaattttagggttagtagtaaatagtgaaaaagctgtctctcgtcaagacagctttttttgatgatatctgcaccactcggcaatcccacactcttcacacttcggttttcttgccacgcaaacatatcttccgtgcaatatcaaccaatggtgagccgtggacagccactcggcaggaatatgcgccacgagttgtttctccgtctctaacggggtcttggcacccgttaccagcccgatacgatcggcaacccggaaaacgtgcgtgtcgacaggcatggccggacgcttgaaagccaccgcttccatgacattggccgttttccgtcccaccccgggcaacgtctgcaataactcgaaatcatccgggacaattccattgaaatcttctatcaactttttcgccatcgctgacaaatgcttggatttattattcgggtaagagatagatttgatcaactcgaaaatctcctccacgctcgctttggacatagactccgcatccggaaattgctcgaacaaagcgggagtcaccatattcacccgtttgtcggtacattgagccgataaaatcaccgctaccagcaactggaagggatcattatattgtaactccgtgtcagctaacggcatacgttcccgaaaccatgccaacaccttatcgtatctttcctctaatcgcataatattaatttctttgcctacaaagataagaaagctgaaaattaaaaacttctatttcaccctaattttctcccttttttaatcttgagccgaccagtccggccacgaattgctcagtctgaagccacaaattctgacaagcctcaacatcaagagccgcttccggtagtcccacctgatgtttattcctaaaaaagcctcccgatatattcacatactgatcggaagttgccaaaagtatagccgtcatcgcccctcgttccggagatttaataaacggacggaaaaatatatccgccaaagggtcataccatttgtgcatggtgatcatccccgtgttcaccacgcccggatcaaccgcattcacggtaatcgcacgcccctgtacccgccttgccagttccgtcgtaaacatcagtatcgccaatttcgaattgggataagccttaaagcgacggtaatgctccggatccaatttaaagaaacgatctccaacctctcccatcttacaagtaaccgacgacgtgttaataatccgggccttcccggttctccccatatttggaagtaaccaattcgtcaacaaccaagtccccacgtaattcacccccacggtcatctccaacccgtcctcggttgtcgtgaaatctctacacatgattcccgcattattcaccaacacgctcacctcccgtccgttcaacccgtcaacaaaagaacggatggaagcaaccgacgccaaatccaactgatgcaactccacccgaccgtttcccgtctctcgcacaatctcatccctcactcctgccgcccgttcaacattccgacaagccataaccacgggaactcccataccggcaatcgctctcgtgatcgcctttcccatgcccccattagccccggtgatgataaacaaacccttgttcattttagatcctacgaattatatgattctgtgattttcgattagatgattatagaatcacttaatcattaaatcgacaatcactcaatttttttcattttcaattgctcttttcactttccttatcatccacctcaccaccccgtaaggcaaaaagaataagaaaccgataaagaaataattaatcaccccgggaatcatttgggctcggtgacagaacataccgttgattgcccggcgagcaagcgtggcaggtttcatcatcacaccgattcgcacggccaaccgctgcaaatgaagaggtaaattatataaatcggtagcaatcgcccccggacaaaccgtggtaacgttcaccccgtaatcaagcatctccaaacgaaaagcccgggaaaaactcttcaaaaaacacttcgtggatgcatacaacgaaattcccggataagggaaccaagctgacattgaagacatattgaggatataccctttcccccgttttctcatatcctccccgaaataacgacaaagcaaaaccaccgtgttcatgtgcaacatcaacatggtctgcacaacacccactgaaagattcacgatatgctcgaaccggaacattccggcattattcaccagcacctccacttgtaaccctaatgccacgcaaaaaccatgcaaatgttccgctgcatcgggtagtgataaatccatataaagaggccacgtctgcacctcgtacatttgtgataactccccggcacaccgcgtaaggcgctcctcctcattactgaccatcacgacatcatacccccgggaacacaactcccgggcatactccaaaccgattcccgaactggctcccgtgacgatggccactggatgaacactaggctgatcaattacttccataaatccgatttcaatttttcttggaagccgattccaactccttcaataacttcttgggcaaatccggaatatgcttatgacaggccatctccctagaatacatacgggcaatacaataattcgcgtgttcgcaagcattccgggcattctcctccctccccatccggttcacgaaatccggttcattcaacaaggcacgagccattgacaccccatcaaatccggcatccaacaccatatctatcttttcccgggaaaccaatcctcccacgtacacgagaggtaacttcaccgcttcccggaatttcaacgcatcttcgaaaaaataagcctctttaaacggtaccgtcggaatcatcatatgtccggcaattcgaacgcctatcggtaaccagaattgttgcatataatacgtcaggctacggataggcatggcccccctcatcacgtacatcggggcccgactgacaaaaccaccactcagaatcaaggcatgaacccctgccgcttccagtgccttggccacttcaatacattccggcacctccatcccaccccggaatccatcccgggtattcatcttcaccagcacggccatgtcatcccccgccgctttcatcacttccgccattaccatacgcataaaccgcatccggttctccagcgatcccccgaactcgtccttccggtgattcgtgtaaggagaaaggaactgactgatcagatacccgtgtccggcatgaacctccacggcatcaaatcccgcctctctagccatattcactgcctgtccaaacgcctttgccatctccacgatctcctctttcttcataccccgcaccaacgtcggcgagtagatattaaaaccacttgaagcggaaatgggcgtgcagccacaaatccccttgtgcgacatattcccgcaatgcccgatttgtatggatgcagccgcacccgtggcatgtatatcgtccgtaagctgtcgtaacgcaggaaggatctccggcctcaaccacaattgatggggaaacgataaaccgctacgaacaacagccgcataagcgattgtcgtcatcccgattccaccccgggccaccgaaagatgataatcatgtaacatttccgaaggagcattccccggacacataccctcgaatgctgcggcccgaatcgttcggttacgtaaggtcagcggtccgatcgttaatggcgtgaataacttggattctcgtgtcatattattcttcttaatatataaaaggaatcacccgtttcagacgacgtttcttcacctcgtccccgaacatccctaaatatttgtgataaattgtattagctctcggcactaaattagcgaacgtccaaatggcaaaaaccgccccggaaagtgaccacgtgagaatggcaaaaccgatccattctacaatctcgcccaaataatttgcagaagtcacgtaacggaacatcccgcccttgggcaaataatgccccgtgtcaccgggacgccgcaaatgacgaataatatggtccgattgtatattcgtgaacatcccggcaaagaacaatatcgtcccgataataaactgcggggacatcaaccactccggggtataaagatccgacggggcaaaatagaaaatccaccctccctgcatacacgcattcaacacattaaacgtgatccccatcaacatgattcccatcggcattctccccttacctttcagtaataacgggaaaataaacgcacgctgaaaataatgtatctcgaaaaaaataaagaaaatcaacggcaccaactcatatcccctatccgagaaataccagaaaagtgccatcgctataaaaacaggagcctccatcaaaacccagccgatccggttatctattggtcgcccccacttggcatcgaaaaacataccataacccgctttcacaaagtacagggctacaaaaacaataactgcaattccggtcatcacggccagaaaaatatgaaacacatccatcctacaattttattgattacacaagtaaccaacaaatatcatgccaataaacaataaatgttaagaacgatagaaaaactcaaacgccaatccaaccactctccattcttttatctttcagttttcactttaccccgccatgtggccccggtaacccgtcccggaaacgaatactcacgtgtgttccgtcacagaaaggtttgttcgatgacgccccgcaacggcatagtgtaacccggttacgaagttcgtacctcacgccctccgtatcgtcaatcggaatcccgccccgtacgaacaaaggaccactgcaacgctcctgcgggtcttccaacagcaccagcgatggttccagtttattttcaataaattcccctttatccttatcccaagccttcaaacgacccgccgggcaataattagcctcccggatcgtcaactccctagcctccggatcatcggactcctccacgagattccaaaccttcccgtaagcatcacaaaaacgggcaaaagcacaatatttctcattatccgtcagttcaagcgtaggcccgtcaaccacatcggcatctttcaataaaggaatattatcggctgtcagcgtgggatcccaattcgtgttcaagtgagccccatcgcaatacggcttattggcagaagtcccgcaacgacataaagccgtggggttatcattcatatcgtactcaaccccatcccggtacgaccacgaacttccctctacattctgcacgataaactgttgttttaaaagcggatgaccatacactaggtaaggtccttttctatcgactacaatggaatactgtttattgatttcaggtgttcccggttctatctctcgttctttcataactctatcagattaattattacgatagatatacccgcgaaagaccttttttgtttctttccggaccaaatattttagaaaaagttgcagactgggaggcaacatgaaatatgtacctgcaactctttccgttttacttctttatgcgggtaaagaaataacgttcctcgtccgagaggtcagcattaaacgtgtacccgtcctcgttgaaagcctttaactcctcaggttcctcgacacgattcatcacgatatatctcgtcatcgtcccccgtgcaatcttggcataagtacgaactgtttcgtatttaccatcccgccattcctgaaattccggtgtaatcaccctcacctctttcctcaactcgtccatcttcaacgctccctgaatatccatactggccagattcaccataatccctccaaccttacgcacatcttccaataatggagtcgtcagcttcggaacccaataatcatacaggttcgccccatccaacttcacggaaaatgcgatccggtaggcttgaatcaaatccaacggacgcaccaaaccataaagcgtagagataatccggacacgatcttgagcatacttcaagtcctctaaagaaaaagaattcggatcaatagctttgaatacactcccgttataagcaaacaaagcctgtttgcgagaattcgaaagtgaaccaaacctctgataacgttcgtaattctccgctgccagcttaggactgatcttcaacattttctctaactccgatgcagaaaaatgacgcatatgttccgccagatattccgcctctgccgtgtattccggagtggtacccggaagttcctgttccaccacggacatatccatggtcttggccggtgataaaataactaacatcgtttatctgaactcttcaactttataccccgcgttctcgaacgccttcttcaccgagtgcgtgtctccggtcttcaacataaccgtcagcaccttgtccggatgttgcaaatccacgctccattccgtcacgtctctcaaactattcaaaaacggagtgactttcgatacgcagccactgcatttcaacgttgtcttaaatctgaactttttttccatgttgctttcttttattggtttatataatagctacaatttcttccatttaattctcaaactattagtcaccacggacaccgaactgaaagccatcgcggcagccgcaatcatcgggttgagtaaaaaaccgttgatcccgtacaacacccctgccgctaaaggaataccaattatattataaataaacgcccagaacaaattttgtcgaatcgcccgcaccgtttgatgcgaaagtgcgatagcacggggaatcacgttcagatcggaagtaatcaaagtcacctttgccacgtccatggcaatatccgacccttttcccatggcaatactcacgtcagcctgtgccaatgcctgcgaatcgttgattccgtcacccaccatggccaccactttcccctcatgctgcaaggcctccacgaaattagccttttcacccggcatcacctcggccttaaaatgacgaatgcccacctgatctgccacggcacgagccgtcaaggcattatccccggtcagcatataaacatcaattcctttttcatgcagcgtcgcaattgcctgacgagaactctccttgatcttatcggcaatggcaaccaatgccagcacccgtccctctccggcaaaaaagacaaccgttttaccgtctccttcccaccggacagcaagtttctcgttatcatcgtctaaaaccacatgattcacgtccatcaaagcccggttcccaacaagatataccttatccccgacttttgccgtcacccctttgccggtctgattctcgaaatccgaaaccgatatttcattcacgaccttctctttaaacttctgcaccacggcatctgccagcggatgttccgaacgccgttcgatctccaagaggatggattgataacgctcgtcttccgcccccggagtccagtgaatatccgtcacaacaggttttccctccgtgatcgtccccgttttatccagcacgatcgcattcacccggtacatcagctccaagctctcagcatccttgatcagtatattatgttccgcccctttaccgatcccgaccataatcgctgtcggcgtcgccaatcccagcgcacacgggcaggctataaccagcaccgtgatagacgtcagcaaagcatgagtgaaagcaaggtccccacctatcagcatccacacgataaacgtgattaccgcaatccccatcactaccggaacaaaaattccggcaatacggtccaccagtttctgcacgggagctttacttccctgtgcctcctgcaccatccggataatattggccaaaacggtttctccccccaccttatcggcacggaaacggaaacttcccttctcgtttattgtcccggcatacacgggttgtcctttcaccttctccacgggtatcgactccccggtaatcatactctcgtcgacaaaagaagccccttccgtcacttccccatccaccggaatcttttcccccggtttcacgaccagaacatcccctaccgccacctcacggataggtacctcctcttcgctaccgtcggcaagaattttagtcaccgttttgggttgtaaccccatcaatttctttattgcagtcgaagtactgaacttggcctttgcctccagcaaacgccccaacaaaatcagagcaataatcaccgcagcagcctcgtagtacacgtgagcctccaatccccgactcgtccagtattccggccagatcgtgttgaacagactgaacaaaaatgccactcccgtactgacggccaccaacgtgtccatattcgcacgcccgtgtttcaactgcatataggcatggacaaaaaagtctcgcccgaaaaacgccatcaccggaatggtaaaagccagcataatccaattaccatagggcatatgcataaaaaacataccaatcacgaacacgggtatcgccaaaacaatagccccgatcgtctttcgttttaatgcgagaaactcttcccgctgcaaacgatccgcttgatccgtatcctccgtgttttccaccaccaattcgtaaccggcagcctccaccgccttttgaagttccacgggtgtaatcacctgcggattataatccactaaaacagttgaaccggcaaaatttacctttgcctcgtaaactccctcttgagcgccgagtgttgtttccacattcaaagcgcagacagcacaactcatgcccaaaacttggaaagtctctttcgtatgaatttcttttcctgacatttcacattgtttgaatatatgtttacggaatatcgtaacgtttagttacaatcttaccacgaacaacccttaacttgcatcaaatcttataccagcgaactgttttattttaacattttcacaagaaatgatcacgcacattgacgaattacgagtatttgacctcctcacttacaaaaatagcattaaaattacctgtgccataataaccctcacgaacatcgtcagcgggtaaaccgttgcgtaagccaccgaaggcgtgtcactatccaccgtgctattcacgtaattcaacgccatcgggttcgacatactcccgcacaacatcccggccaccgaaccgaaatcaatcttcatccatttaatggacacggccgcaacaagaatcaccggaatcaccgtaatggtaaatcccaatccaacccacaacgccccttccggacggaacacggtttcgaagaaatgagttcccgcatccaatcccagacaagccagatacatggaaagccccagcgcccgtaacatcagattggcactgattgtcgtgtaagtcaccatgtgaatccgaggaccgaaagcccccacgagaatccccattacaattggtcccccggccaatcccaactttaccggaaaactgatgcccggaatcgtcaaaggaattgatcccagcaacaaccccaataccatcccgataaaaacggccaccagattcggctcgtccaaatccttcacggcattccctaccacgttctccaccttcgcgatggccgattcctccccgaccaccgtcaaccggtcacccaactgcaacgtcaagtccggcgtgggcaacaacacgattcccgcccggtaaatgcgggttatatttatcccgtattgatttctcaaccgcaacgctcctaaccgcttcccgttaatctccggccgggtaatcacgatccggtgggacaccaattgactatcaatagcatcccagtcaatatcttccttattccaatccctcgtatcccgcttcccgatcaacatcgtcagcgcctccacgtccccttccgtcgtgatcatcagcaaacaatccccctccctcaccacggtatcggatgccggaataatcaccttctcatcccgccacaaccgggaaaccacaaactttttggacgattgccgggcaatctcctgaatggtcttaccggacacaccgggattgctcacgagaaatcccataaccaccgtcttcttgtggctatcttcatcgctttttttgaaaaatatactggatgcaaaaagtttacgtacaaaaataacagccagaatcacacccaccacccctaacggataagccacggcacaccccagtgccagatccgactgttgaatagcgggatcattcaattgtttcaacgtctgttgagccgcacccaaggcaggcgtatttgtcaccgcaccactcagaattcccaccatatccggcaacgacacacccgtgaaccaatgaaatcccaaggtcatcacgattcccaacaaaaccaccaacatggccagcatattcaatttcaatcccccctttcccaaggaagagaaaaaaccgggtcccacctgtacccccaaggcatacacgaaaataatcaacccgaaactctccgcataattcaacatctgcggatcgatcgacaacccgaaatgtcctgccataatacccacgaaaaacacgaaagttactcccaacgacacgccccacatgctgatttttcctaaagccagccccaccgcagacaccagtgaaaccacgattactgcctgaatcactgaatgttctgttaataaactactcaaccattccataatcttatctttgaacgccaaaattaattaaaaaaacaggaatacgtatcggtggctattttgtttttaatttcacttttcctaactttgcgaacaaccaaagttggattatggaacgtgtgcaagacaataaacagagtagcctgatgtttgaacaattattcaagcaacactatcgtaccttgtgttttcatgccatgagcttggtaaacgacttggacacctctaaagatattgcacacgacgtgtttctcagcttgtggtatcaccgggccaccattgatttcacccgtccgattctcccctacttgtttagcctcacccgtaaccgggcattgaactacttggaacataaaaaaatccagaataatcacgtgcgtcaacaccttgccgacgacccgacttacacgctatcggacgattccacccgggaagaattgttggaacgcattctagcccgcatcgaactcctccccgaacgttgctcgcaagtgatgaaactcagttttatcgaatgtaaaaagtataaagaaattgccgaagaattaaacatttcggtgaataccgtgaaaactcacatcacgacaggcctaaaaaccttacgggacgaatttcccgcttctctcctgttgctcctattctcacatccgcaccgacatttcgactgatccggcatcagtcatttccccctttattaaacactctaaacctttcttttgccttatccaactctccctcatcgacctcaatacccggtataaagaaagaagattctaccccgaattgtttctgcttggctgacttattccaattcccgacaatcttcccgttatgcaaaatcaccgggtagaaaattccaaaagtattaaaagccttcctataatattccggcgccaatgccatcgaacgatctttataactaataagatattcatcatacgagggcaacaaatgtataacccgtttcgcccgtacattccttgcacatgaatgatggattaaccaatccgtctccccgattctctccttaatcagctccgcatcaatcaatccaacggcctgttttgcctccgttatagataaccccgaccaccagataaaatcctgcaagctggcaggggaatgacttctgaaatatttgattgccaatttcgccaaagcctcttccttgtgcaactccttcatcgggggaacccgctcatccagcaaagcatacgtccttttatttcccttatccacgccattacagatgatactgtcaacttccgcccttcccagaaaatacccgaccagatcatcccccacgataacacccgcccggctcaactcctcaccaatctcctgtcgggtcaagtaccgattcccctccaaagccctcacgatcacatcaagactcttgatatgcaactcttccgatattccatgatttttccaatacgaatcgtacgccaacttcacccgtctgaccgacaacttcaacatccatcgaatatcctccgccaccaccagatgccaagtcgggcgtaacacgtgagtccgcaagatctcccctttctccaaagccgcctccaccttccggatgtccggtttcttcaaccgtaaccccacggcccacttcgccatgctatactcctgcccctgcaaagcccccatccatgccacaagctccttgggatcattaaaagccggattcaccaattgctgacttctcaaacgaatatctgtaatcatatatctgtatttttagtacattctcattcatttctttttcaaatatataaagaacacactaaaaaacagcagggttgggtaaaataaagtaaatatatctttcaattataatattatcacccgtctatcattttgataaaacgtgcaggaacaccacctacaatcgtattcgccgccacatctttcgtaacgaccgcacccgcaccgataacagcattgtcaccaatggttactccttgaagaattgtagcgttggaacctacccacacatttttacccaacacaataggagccggataagtcgttttacgatcttccggggctaatccgtggttgagcgtggcaaaaacaacattatgcccgatttggcatccgtcgccaatggtcaccccgccatgatcttgaaaatgacaacaggcattgataaatacgttctccccaacagtaatattcttgccataatccgcataaaacggaggaaatactcgaagagacgacggcacttgataaccaaacaattcggaaagcaacccacgtacttcgtccggtgtacgatatgccgtattcaacaagaacgtgatccgtctcgcctcgttactcatggcatccataaaacgatgtatttcccctgtattaagcgccttacgcgtctttacatattcattaaattccttcgttgtcatcatttaatttgttcgagcttgttgtactcttcatccgtaaccggttcgagccattcgttggaggttttctctccgggaacctcgaaggccaaatgagcaaaccaactatcagcggcagccccgtgccaatgtttcacgttcgcgggaatatggatgaccgtaccgggcagaatctccacgggagccttaccctcttcttgataccaaccccgtccggcaacaccgataagcatttgcccgccacctttcgttgcacgatggatatgccagttattgcgacaccgcggttcaaacgtaacattggaaatcgcaacttgctcacgagaaaccggggcgaggtagctattaccaataaaatacttcgcatatgccgtattcggctcgccgataggaaaaatcatttcacgttggaaagcagccttagcatcattgcctgtcgaatcttctgcccacacgtccttggccaaattaaatgcagcccacgccttcggccaaccggcataaaatcctatatgagtgataatctcggcaatttcagtacgggtgattccgttcttctttgccgtctgaagatgataagtaagcgaactatccgtaataccttgactaatgagggaggtgatggttactaaactacggtcacgcagacccagtttatccgtgcggctccaaacttcaccaaaaagtacatcatcattgagttccgcaaatttaggggcaaactctccgagttgattacgcccagccgtctgtacgatcttttcttgtgccataacattgaatgttaaaatactgaatactgaaaataagagaaatttattcatagtcgttttgatttattgaatgaaattattgatttgattcgcaggattaagcggcgtctgatcggtaagtgtcaatctcttgaccatgtgcaacgttccctgtttgtacttttgaaaatgttccgatgcgatatgtaactcgtaagccttttgattggcatagatttcgagaatcgttaccatacagggattctccttttcgctgacagcatacatggtcaacacccccggttctgtgcgcagggaaacttcgcccacttccgtcgcgtatttcatatactcgtcaagatactccggataaacctctattttcgacaggcgcacaataccatcgaccgccatcggttgtttcgcacacataccgggttcctcatccagattcagacacttcccgatcacctctcctgtggcaaggtaagagtaagtcggaaactcaaacaacacaggctttaaccgggcatagtcgagtttaccgttatgatcaagcacatcaggagtcgcataagtattaaccacggtgcaaatgaaattatcaaacccctcggtttcgtaaatatccaccacattacactccattgtcaaaggcgacacgtcaatcacaggcgtaccattctccccgatatgataagcgaacacgctcgatttattaaccgtctccccgctcacactacccacataatccgctttaggcagcatctcccggctaacgagattaatggagagttttttcgattgcttgattccctgattggaataatgttgtttactcatactgacgagtacgcgatcatgaccgataacacccgtatgtccgacaacaagccaattcacctttccttccactttcgtaccaacaacagtcatcggcttcggatagagagccaacagtttgccgagatttttcttttccacttccattatattgggctgatcagtattctctttcactgtcgggctgcatgacaacatggtaagcagcgcaaaactcgatactgttttcaaaaggtttctcccgtccataatttgctatcttttattgttaaacttctgatggcaaatttacagcaatggaacaagcgggtttgtatatgaattacggatattcatacccaaattcccgattttataatcggaccctatttatataagtaatcatgaatgatgcccttaaagtaagtaaatctacccttaatcatgcaaatctccagttcgttgctagactgttaccagacagttaggcgctctcgccgcattgtcgccgccttatcgcccgattatagccgccattttaacagatcataagtaaagataacatttgccttctttctatttcaacctctaacaaacaatctacaaagtagcaaaaagattcatacacccatatactaccccaaagtatccctagaattaggtatatctatcggaagtaacaacatttgtaatttttctttgaaaatatttcatttttcactcacccatttttcaacctcacctgtgtatatagtgtaaaagatcaaaccagagacaaatgaaagaaaaactggataaaatagaattcatacaggaacaccttcgagaaccggaacggctactagaagaagaattcatgaattggttgcaggaagaagagaataaacacttgctcgaggaagtgactacgaaccggatggcatttttgcaaaaagaatacggtcaacaaatagaaccggaactggaatggcaaaaattatggcaacaaatgcaaaaggatttccatacctccataccggaaaagaaaaaaatcaaccgaagggtatggtattccgtggcagcaggagtatgcgtactgatggctttagcgggaggtttgttgttacaacaagggaaagagaaaaagtcagtttcccccatggcacaaattgaacacgtgggaaaacggagtgcgcaactaatcgtttccacgggggaagttcttgacctgtcccaagaagagatttaccaaaaagccgtggacgggacgttgatcacaaatgacacattaaaactactctcctatcaaagcaatgcaggggaaacatacacgaccggaaccaatgccccggaaaaggtaaacaaagaaaccgtgtatcacacattacgtgttccggcaggtgccgactaccaagtaacattagcagacggcacgaaagtatggttgaattgtgaatcgacgctacggtatcccgtggaattcggggatgaaaaacgggaagtatatttggatggagaaggatattttgaagtaaacaaagccgcggagtggccctttatcgtcaacgcagaacaaatgcaagtaaaagtcaccgggacaaaattcaacgtgaaatcttactccaccgaacccatcgtgcataccactctcgtcgaaggttctgtatgggcttacaccgatcagacacaagtgcaattaaccccatccgagcaattccgatacgataaggagaccggaaagacatctgtacaaaaggttgacacggaactctacacgggatggattgaaggtatgttcgtgttccggaaccaacgtctggaagacgtgatgaatgacctcgcacgctggtacaacatgaccatattctattccacggcagaaaccaaggaaatccgaatctccacgaatctgaacaggtacaagaatattgacgatctattggaaattattaatgaaagtggtaaagtggttgtcgcccgcaaggacaataccataaccatccacgcccgataataaagaaaggatcggggcctgcgccaacatttcccgatcctctgtattaattagttataattaaaacatttcaaatgtatgaaaaaaagatggaagagtgattttccgttagagagaaaattgcaaaaaatttttagatgtatgaaattaacctttctactactcacgtgttttgtcgttcagacttttgctagcctgaatgcacagactgtcacgatcaaaaaacaaaacgcatcactggaagaagtgatttgggagttaaaacagcagacccagttcacgttcatgtacaacaacgaagacatcgcccggataaaggggatcgatttgaatgaaaaagaagtggacgtggagaaaattctacaaaagtgcctgaaaaacacgaatttggagtatgtcgtgttaaacaatgccattgtcataaaacttaaaatggacacgttggacgagaaaaagtccgtcacgttaaaaggttgggtttatgacaagaagaaagaacccattccgggcgtgacagtcaaactgaccaatattaacctcggaacagccaccaacaacaagggatggttttcactttcactcccgttaaccaaagggacattggaattttctttcgtgggctttaaaacccaaaaagtaaatttcacggaaaaaacagataccctccggatatatctcgaagaagatgtacaagccttagacgaagctgttgttgttgcttatggaacgaccaccaaaagaaaagctacaggttccgtatcagtaattaaagccgatgaattaaaaggaattccttcatcaaacatagccaatttgttacaagggagggtagcaggaatggacattacaaacatatcgggagcaccaggcggaggagatattgcaatcactatacgtggttataattctttagatgttgaacaaggaagacgattctctaatcctctttgggttgttgatggagttcctctaaattcatttacatcgcctattactggcaacaatttattagctgacttgaatccggacatgattgaatccatacaaattttgaaagatgcttcttctgctgcaatatacggatctagagccgcaaatggagttattattgttaccactaaaaaaggaaggaaagatcaagatgcaacgttttctgtaaatgtttcacaaacttggagtgtactaccaaaactttccacaattacaaccggacgagctgaaagacttttaagattagctgttactaaacaaacttattctgcctatctggatccggaaacaaaccgatataaatatccgacctcattaaaagaatgctatgatcataaagatgaatttgccagtattgatggaaattggattcctgatccccaaggtaacgtagataacggaaccatgtttcaagatagtcttaatcctttttataataactcaaccaatttcttcccaatctattatgaaaaagggaaaataacaaatgccaacattcaagtttatggtggttccgaaaaaataagttatggtatcggtttaggatactacaacgaaaatggagtattgaaaggaacaggttatagtcgggtagatttaaattctaatctaaacatagttcctataaaacgtttaaatgttgatctacgtttaaatgcttctattggtaataaaaaaagaggtactgcagatggatattttagtactacacctagtatcgaaactgtccctggtgagccattgaaattatcatccttattaccaggaaaaaattccattgtttggaatgatgtattaacaagctacaaaggaaccaaagagaaaaacagatccgttcgtttaagaactaatttcaaaataggatatgatgtagttgaaaatttaaacttatcaacctctcttgctgccgattattctattaacagaagaaattattttcaaccttccaatctaagtgaaagtgggtactccatgagtatgggagaaaccggtatcaacttaatggtattaaacgaaaatttattgacatacaacaaaacgatcaatgaaaaccacaatctcaattttatcgctggtttttcctatcaatacgatcaagtagaatacaatggcggaagtgcacaaaattcccctagtgataaaatttactatgctcctgatggtatgccagaaatcggacaacaaatatatgattatggagatggaaactcatacacagaaaccgtcgcttttcaacattatcgttctgacatgcaagaaaaaaaattattttcttattttgctcgcctagaatacaatttccaaaagaaatatttactttctgcaagtttacgccgagatggtagttctgtttttgggacaaacaatcgctggggaacattcccatctgtagctgtgggatggacgttctctgaagaaaattttataaaacaattttcaagttggttcaatttcggaaaaattcgagcaagttggggacgttcgggtatgatttttgatcaaaattaccttgccttaggaatcatgagagtaagtgaacctcataaaggagaagcaacaatcagtcctaattacaccgatggattattaaacccgaatttatcctgggaagaaacagatcaatatgatttcggtcttgacttggatttttttcattatcgtttgggtatcacattcgattactattaccgttacacggacaaaatgttatccctagtccttcttcctggtctatttaacggatacgataaacaatggagaaatgctgcggcagtttccaatgaaggtcttgaattattaa

SEQ ID NO: 26 - DNA, 19300 bp, Butyricimonas faecihominis
actttgcatcactaaattttagagagaaattattttaaaaactaatttaatttattcatgaaaagactattaattcttacggcaatattaaccttaatggttggggctgcaaattcacaggtattaaaaccagtgaaatggcaaatttctttcaaaaaagtaagcgaaggtgtttatgacattatctgcaaagctactattgaaagcggatggcatctgtacgataccaaattaccggaaaacggacctcttcccacaacattcaacttagatgaagacgagacgaaagacattgaattagtaggagaatttaaagcaactacagaagctaaaactgaaaagagcgaagccttcaacatggaattgaaatatttcgaaggaaccgtgactttcgtacaacgggtgaaactgaaaaaagacaaagctaaattggtaggctacgtagaatacatgtcttgctctggcggacaatgtatccctcctgccgaagaagaatttgaattcgaattaacgaaataatcaaaaggccgtcttcggacggctttttttatcccccttccccattgatcaactcgaaagaattaaaaatacatgtatctcgaccgaattctcttgttctgtatcatcttcttgttgttcacgtcttgcaaagagaagaaaccacccgttcaaaccgattactcgctggaaattcctcacacgtcacaaacattgaccctcttgttttgcggggacatcatccaacaccttccgcaaatatacagcgctcacgaaccatcggaaaaagactacaagtaccagaaatgtttcaagtacatcgctccttattgggcggatgccgatttcgtcattgccaacctggaaacaacccttggaaataaagacttttccggttacccccgattctgttcaccttggcaaatcgcccgggaccttcatcaactgggagtaacaacctttgttaccgccaacaaccatagctgtgaccaactcgggaaagggatcaccaataccatctattatttggactcattaggaatcccacacacgggaacattcacagataccctcaattacaaaaagagacacccgctctatcttcagaaagacggtttcaaaatagcattactcaactacacgtacgggacaaatggcctccccgttccgaaaggttttgtcgtcccgcacattgacacgaccaccataaaacaagacatccaactagctcgccgggacacggccaccaacatcattgccttcatgcactgggggtatgaataccataactttccgaacaaggaacagcgggcattaagtaaatggttgcatgaacaaggagctgatatggtcatcggttcacacccccacgtggtccagccgatagaatattatacctcggacaaagatacactaggcgttaccgttttctctctgggtaactttatttccaaccaatcccaacaaggaacagaaggaggaatatgtattcgcgtgactttaacgaaaccccggaaccatcctgtacgttatcaaatggagccgattaaattttacatgtaccgtccctacgaggaagggcggcgacgttattacgtggtaccggaaaatttggcagacagtgttataaaagattttcacctgacgaaaagcaagagtttcttcaagaaaacagatacaatactgaaatcaaccaaaacttttagtttttagctttccggttttcacttacatatttatatatttgtatgaccttaaaataacatgaagatgaaactagcagtaatcgcacatgacgggaaaaaagcagatatggttgctttcctgaacagacattatgaattcatgcattcggcaaacatcgagatcattgctaccgggactaccggaaaacatgcacaggatgccgggttaaaagttgaacgccttctttccggtccactcgggggagatgcccagattgcagcacaagtggcagaacataaagtacaaatggtcctgttcttccgtgacccgcttgggaaacaccctcacgaaccggacgtgcaaatgttaatgcgcgtatgtgacgttcacaatgttccattggcaacgaacccggcatctgcggaattgatgctgaaaggtttcgagaaacagatgcagaaatagttaatgttttattaaactttgtgtgaagatttgcaaatccgcacacaaaaaactatgtttgtatcgattaaaggtttgtaaaccatgaggaaacgacagatagctattatcccgcttatttttgctagcatgattatgctactgtcgtctattatgcctcatcatcaccacggtaaattaatctgtttcacgcctacacatgaacacagttcgttcatcgaaaaagcatgtaaccacgaacatgactcaactcctaccgagggtgaatgtgaggtcagattattattccagacaagcattgtaaaacaacatcatgacgagtgcaattgttgtccgaatatcattccggatcaaccattccaatccatactgacccttgccgggttagatcactcgttattacttctcggagtaccaaaagaagttccacccatattttaccgggaacgtctccacccgatcacgtggagcgtcacctctgccggcagggctcctcctaccgtaatagcttaaatatagaattactcgcccggcgtgaaccggacaattattatttattgttttattctcaacattaaatcacttattcatgagaacaattatttatgctattacaatattagcgatctccttatgggggtgcaaaaaccaaacatcacaagataaacacactcactccgcaacggagactcacgcaggacacgaccatgaaggacatgaccatagccacgaaggacatgatcatgaacacgagggacatgatcacgaacatgagggacacgatcatgaacatgaaaccggggaggaacatgccggtcacagtcacgaaagtgaagaaacaaaacacagtgacgagatcattttcccgaaagcacaagcagcaaaaaccactttcgaagtacgggaaattcaacccgcctcttttaaccaagtagttaaaacaacgggacaagtgcttgccgctcccggtgatgaggctgttatcgtcgctaccagcaatggcgtcgtttctttctcttccaacaaattaacggaagggacaaaggttcaaaaaggacaatccctattccagatttcttcaaaagacattgcggaaggagattactacacgaaagtaaaagcaacttacgaggcagctaaagccagctatgaccgtgccgaggctcttgtaaaggacaaaatcatatctcaaaaagaatttgaaagtatcaaactggaattcgagaacgcgaaaacagcttatgacgccgtatccaataacaaaacggcaaaaggagtcagtgtaaacgccccgatcaacggacacatgaaaaacattcttgtaaaagaaggagaatacatcacggtaggtcaaccgatagcaacggtttctcaaaatcagcgtttagtactccgggccgaagtatcccaaagatactacaatgccatgcaatccgtaaagagtgctaatttcaagactccgtacgataataaagtttactccttggaagacttgaacggacgcttactttctttcggaaaaacttccaacgagaattcattctttatccccgtatctttcgaatttgacaataaaggcgaagtgatcccgggatccttcgtagaagtatatcttatttcagccccgattgaaaacacgttatccatccccgtatccgcgttaaccaacgagatgggaatccactacgtgtacgtgcaaattgacgaggaaggctaccgcaaacaagaagtggcattgggtgccaacaatggtaaagaggtacagatcatcaaaggcctgcaccccggagaccgtgtcgtaaccaaaggagcctaccaagtcaaaatggcctccgcatccggagcaattcctcacggacatagccatgaacactaaaaaattgaaaatggagaattgaaaattgaaaatgaaagtattcaatcacttcattcctcaatctaaaaactaaaagttgaaatctaaaattaatcgcggatgctgaataagattatacaatattcattacataaccggctggtggtaatgatcgcgtcgatagctttgctcctatgggggtcctacacggcgcataaaatggaagtggatgtattcccggatttgaacgcgcccacggtggtagttatgaccgaggcgcaaggaatggctcccgaagaggtggagcgtatggtaaccttcccgatcgaaacggctgtcaatggagccacggacgtgaaaagtgtacgttcatcctctacaaccggattttcggtagtctgggtacaatttgattggggtaccaatatttacacggcccgtcagatcgtgtctgaaaaactatccacgttgggagatgttttaccgagtaacgtggggcaacccacccttggaccgcaatcttccatcttgggagaaatgatgattttcgggttaactgccgacagtacttctttacaggatttacggacgattgccgactggacaatccggccccgtttgttatccacgggtggagttgcacaggtagccgtgatcggtggtgacatcaaggaataccagattcttcttgatcccgcacggatgaaacattacgggatcagcatggatgaagtattgaccgtcgtggataacatgaatcagaactccacgggaggtattctatacgaatatggtaacgagtacatcgtgcaaggtcttttggcaacaaatgacgtggaagaaatcggtaaaggtgtggtaaaaaccgtgaacaacgttccggttctattatcagacatcgcaaccgtacaaatcggaccgaaagaaccgaaactgggtcttgcctccgaaagagcaaaacctgccgtactggtaactatcacgaaacaaccgaacacgaacacactggagttaaccgataaactggatcaggccatcgtggacctgcaaaagacattaccgtctgacgtgaaaatctcgtccgacatattccgtcaatcccgctttatcgaaagttctatctctaacatacagaaagcactattcgaaggggccattttcgttgttatcgtgcttttcttcttcttaatgaacgtgcgtaccacgattatttcgctagttgctctccccctatccttactggttgccatcctaacccttcatgggcttggcttgacgattaacacgatgagtttaggaggacttgccattgccatcggttcactcgtggatgatgccattgtcgacgtggagaacgtgtacaagcgcttacgggaaaatcaattaaagcccgcggaagaaagactttcctcgctgaaagtcgtgttcgaggcttcccgcgaagtacgtatgccgattttgaactcgacactaatcatcgtggcctgtttcttgcccttattcttcctttccggaatggaaggacgtatgttgatcccgctgggaatcgcattcatcgtggccctgttcgcctcaaccgtggtggcattgactttgaccccggtattatgtagctatatgctaacgactaaaagagcattgaaacaaaacgaaaaagaaccttttgtatcccgtaccttaaaagtatggtataaaaaagcattggaatgggctctccgttataaaaaaatagttatcgggaccagtgccgccctgttaatcttcacgattgtcatcatgaccggattgggacgtagtttcctgcccccattcaacgaaggatcactcacgattaacatcagtaccatgccgggagtttccttggaagaatctgataatatgggacgtatggcagaaaagattcttctggacattccggaaatacaaaccgtggcccgcaaaaccggacgtgcagaattggatgaacacgcccttggagtaaacgtatctgaaatggaagctcctttcgaactggataaacgttcccgggatgaattcttggctgacgtacgtcaacgactgggagaattaaagggagtgaacatcgaaatcggtcagccaatctcccaccgtattgacgccatgctttccggtacaaaagcgaatatcgccatcaaactattcggaaacgacttgaataaactatataacatcggtggacaaattaaagaggccatccagggaattgacggaattgccgatctaaccttggaacaacaaattgaacgtccccaattgcagatcaaacccaaacgggatatgctcgctaaatacggtatccctctgcctgaattctcggaattcattaacgtggctctttccggtaaagtcgtgtcacaagtctatgaaggcggtaaagtgttcgacctcaccgtaaaagtacatgatgatgacaaagctaacatggaacagattggtaatttaatgattgatgccaacggacagaaagtaccacttcactacgtggctgaaatccttcccttggtaggtccgaataccatcagccgggaaaacgtgcaacggaaaatcgttgtttccgccaatgttgccggacgtgacttgaacggtgtggtaaaagacatccaaaaaacagtaggggaacaaattaccctgccggaaggttaccacgtggaatacggtggacaattcgaaagcgaacaagctgcatcccgcacgttgttcctaacctcggtaatttccatattattgatcttcttattattgttcaacgagttccacagtatgccgttatccggtatcatcatgttgaacttaccgttggcaattatcggaggagtactaagtatctggtttacatcgggaatcatcagtattccggccatcatcgggtttatctccctgttcggaatcgctacccgaaacggtatattactcgtgtctcactacaatcacctgcgctcggagggtatgtccttgcatgatagcgttgttcatggttcacttgaccggttgaacccgatcttgatgacagccttgacttccgctttagccttgattccgttagccgtaggcggtgaccttccgggtaatgaaatccaaagccccatggctcaggtcattctaggtggattattaagctctactttattaaacggttttgtcgttccgatcatgtacttgttacttaatcacaaacaaaaagagatcgagaacttagaaatgtaaccttttgaaaataaagaaatgaaaacatataaattgtacatactcggatggatgcttttgggtactctcaccacgagagcccaaaatagcatcgatcaagtgctgaaaagcattgaaaccaacaacaagtcattgcaagctaacacgaaaatgaccgatgctcaaaagttggaggcccaaaccggaaagttccttgccaacccctcggtggaatgggaacagatgtggggtaaccgcaacaatcccggttcggagtacacgttgacggtaaaacaatcgctggatttcccaacgacctactcgaacaaaaacaaactggcaaatttaaaagcaaacacgatcggttttcaatccgccgcctatcgccaacaattgcttttaaatgccaaacagacttgtatagagatcatctacttgcggaaacaaaagagcctcttggacgaacgattagctaatgcagaaaccatgttcgctctctacaaaaagcggtttgaatccggtgacgcgaaccaattggaattaaataaaatccagttggaattattgaatgcccaaaatcaaagccgcttgaacaaagccgctttaaccgctgccgaagagcaacttcgcaattttaacggggggaacccgatcacgtttgacgcaacggactacccgacgggagaagaactcatcaattttgaccaattacaagctgccttcatggaggctgacccgaatttgaaaagccttaccggagatcaagagattgccaaccgggaagtgaaattaagtcgttcccttaccttaccgaaattcgatgtcgggtacaaacgcaatgcagccaaagatcacgtggcctctaatggatttatggtaggagtatctatccccctgttcgagaacaagaacacggtgaaaaaagcaaaagcacaagctgaatttgccacggcctcattggaagacaatcgcttgaatttgaaaacgaatcttcaacagctttaccaacaagccgaggcattacagatttctcgcgccgattatgccaaagtattggaacaacaacgtaatatcgaattactcaacaaggctctcaatgccggacaactttccgtgattgactatttcacggaactcacgacaatctatgatagtcaccaaagttatctggatgtagaaaaagaatatcacagtatattagctcaattgtatcaatacaagctataagtataaaacctaatgcaaagaaaagggactcgttatcgggtccctttttgaatatcttgttctcatctctcaagaaacagttcgtccatttgcctcagaacgactcctttttccgccaagcgttctgcactattgtgtcccccggcatacaatctgcaatcaaaccccaaggtctccgcaacctctgcatcatgtagtgtatcaccgaccataaccgtctctcccgggacgatcgggaacatccgtaacatctcctcccctcgtgcaaccttcccatccgcgtaaatattatttgatccgcaaactccctcgaaatattcccgaataccgaatcgctccaacattccggtcagcaaatcttcttgcaacgcggataatatatattgtcgtatgccttttttctttattccctccagcaccggaataatcccgggagtcagctccacgttcttcgccagatcattataaatgttcacgaaatccctcgacacggcctcccagtcatcctgcgtgaaatcaaacccgatcgattcataataaggcttcacgggaaacccgaaaatcgatcggtattcttccaccgtcaacttccccaaatgcttccgttccaacatcacgttaatcgtatccacgctaattttcacatcatccaataacgtcccgttccaatcccaaaccacattcttgtattccatatcattcattatttctgcatttaaacggccattacaccacgtgtaaatctttctcgacaaaggtaatcatttcccgtttgaattgaaaaacggagttcgagtaatgatctattcatgcaaaacgagtatcctgacaaatttcatgatttacacaataatcatcatgttattatttactcatacaaatgttaacttctactatctatctctaattttttattattgcaatagaagcggaataggacaggaatgggagcggaatgggagcggcttactttatgataacacaatgatagcatttaaataacattattttacattaattcaaaatcaacttttgacaaacctcatcaaaattaagtatcgctcccggctcatttcccattacacgggcctccagcatgtttactcgttttcctcgggatgaaatgcctcgattcccgtccatcctaaccgttgacgagccacgttctccgggaatatccgataaaccacatctgcctcactacccaacgttccatccgcattgaataattccacgtgcatctttgccaaacgggtactttgttccacgatacgggaacgcaggaatatttctccccgatcggaataaacggtagcacgatatttcgttgttaattcaaccgtgactcccgcacttttcactttagcaaaaacattccaacacgcaatttcatccatcaaagttgcctgtattcccccgtgtaacacgtgaaaaaaaccttgaaattcaggtcggggcatccaatgacaagtaatatattccccttcttcatagaattcacagcgcaaaccatgttcattgccggatgcacaaccgaaacaattatatccctcgtgttgctcgtaagcgttgtatagtttttttctttccatcttctgataaaaaaagggacgtggtcgcgtccctcatgataaattgtctaatatttttacaaattgctattaatcagcttagcacaaacttccatttcctctttcgggaattgtttcttcgggttagagaaattcaactcgttgccttcaaccaaaggaaccaagtgaatatgagcatgtggaacatccaagcccagcacggctacccccacacgttggcagggaacactcttcttaattgcttttgccacctttttggcaaacaccatcatcccggctaattcctcatccgtcaagtcaaacaaatagtcttcttctctctttggaaccactaacgtgtgtcccttctgcatgggattaatatccaagaatgcatagtaattttcatcctcagccaccttgtaagatggaatctccccgttaataatcatcgtgaaaattgaagccataatctattttagattttaaattttaaattttagattctaaattcccaaccccaccgactttcattttcaattctccattttcaattttcaattaaattgaaatgtccatgatctcaaactccatcaatcctgccggcacttgcacctcaaccttatcccctagctttttaccgatcaaagctttagcgataggagtggtgatcgacaacttaccagccttgaaatcagcctcgctttctgacaccaaagtataagtcatcgttgcctttgtctttatatttttgatcgtcactttattcaatatctgaacttttgacgtgtcgatctgtgactcgtcaatgatccggcaattggaaattatatcttgtagctgggcgattttagcctccagcaatccctgggcatctttcgccgcatcatactctgcattctcggagatatctcctttttcgatggcttctccaattgccttagaaatcttagggcgctctacattctgcagattgtccagttcatcctgcaattttttcagcccttctttggttacataagataccttctttgtcataattgttatattaagatcttgatttgtacataaaaaaataaatgacacttatcctccaataagtgcctttatctagttaagaattccattctctctggaatcctcacctcctgaagacaaaattaggacctttttttgaataaaacaatttttccccacaaatatttttatttaaaaaattcgatgccatttatctgatacagaaaaaactatctttcccactctacaagcaggaaagggagggtcacttaaaaatcattcgatcccgtttttatcatttcccggtatataaatagcgtcaaggcaagtaatcttcccggatattttgcatcgctgcaaacaaattgctccgggcatgaggagagatcatttccatttggtcaagcaacttactcacggcatcccggttcgttgccttttcatgggggcaatgctttttttgctttttaaactgccgcatttcggcatatcgtgaagtctcgtcattcgaaagatagattaatggacgaataagcgtgaacgtattcttgaacatttccaaccgggcaggcatactgcaaatcgttccgttgaacatcatgctcatcaaaagactttccacggcatcatcccggtgatggcccaaggccagtttcttacaatcatgctctttggcaatatcgaaaagcatcttgcgccgatgccatgaacacacgaaacaagccggtttcttgggattcaccgtcgtgtccacccgaatcgtccggtaaacatactccacccccaaacgttcacaaaacgctcgcaagtaatcgctgtccacttcgtaagcgacatcctccaccgcgatatgagccgctatgaccgtgtaattttgtttcgggtccttggcgcgcatggccaacacttccaacaaggccaatgaatccttcccgcccgaaactcctaccaaaatccggtccccgtcctctattaaattataatcatgtatcgctttccccacctttcgaaagaaatcccgggtaaatactttatcttgtttttcttctgttatcattctcttctacgtataatttccctgcctctgttgttatgtatttttggttccggtcattcgggttttccggtattgttcgagccagcaatccaagcgtaactaacccagttacatgtgacttcctatttttcgaatgattaattacgcctaaataatctaatatttctttactagttcttggctccaagcaaaaatacaatatatctacttgcctttttcctaaatatacctctcctttttcttggacactttcttggacactttcttggacactttcttggacactttcttggacactttcactgacactttcactgacactttcactgacactttcactgacactcgtgtattcccgatacaactcgacatccacgaaatctcctttttcagtaatcaacggttttgcaaccccggcctcttcgcaccatgaaaatatcctctttattccactgccccattgttcgatatagtccaactctttaaacacacgggctatcgccttgtttctcgtttcagagcgtcctgcaagcacgtcctcaatcgtaatcgaactcgggaaacctccgggggaaacaatattcacgatgtcatcataaataccgacttttatatcccgccctaaattaatatagtccctatgtacataagcgttcaatataacttcccgaatcgcctccatcgggatctcgtaccgatcttcccgttgtaaccctttaatcactcccgccaaatggagatggttttttataaacatctcgacttgatccaattgagaaaaaaggtctcccgaatattccttcttatcaataaatgatcccatggtcgttcccttaaaacgggcacacttcacggtggcattttcccgtacccctaacaaaattaacaaagcttgtgaaggatacaaatgcccatgttcttcttggacgagtttcagacttttcaacttctctatatcaaggatcttccccctcgcctcgaaccttttctgcaacggggtcaaatccagactatcaaaagacgtgtcaaaacagatctcctcgtcaaaacttctatttattctttgccgctccaaatcgatcacggtctccacgtctgctttacggttagaacttcctatccgcacgtaagtaccatgatttcgcccttcttttttcaaatagtaaggcaacagattcccacgatagacctctattataaacaataactttccatccacgtttatcgtgtaaaattcgggaagaatattcgggtaacataaatcatagataatggatgccactctatcctgcaattcaaaaatatccacgtcggggtcaatgccttttattgttctgtcgtctccaaccccgataattaattgccccccgctagtattagagaatgcaataacagttttcgctattttatccccttgcggcaggatttctttaaattccaagactttactctcccccgctgatattttatcctgcaaacgtgtgtccatacggttatgatttacttctttcatgcaaatttaagaattccacgccacatattgttgctctctcacaaatatttgtaaatttgaaccctcaatctaaaaacacagccattatgctaaagaaagtgccgcacacctacaccattgtattttcaatcattatcatctgtgctatcctaacttggatcattccgggtggggaatatgcccgggaaaccgtcgatgtcaatggagtggaacgtactgtaatcgtgaacgattcattccacgaggtggccaaaagcccgcaaacgtggcaggtgttttcggcccttttcaacggattcgagaaacaagccggaattatcgcttttatcctaatcatcgggggtgctttctggatcatgaataacagcaaggccattgacgtgggaattttctccttcttacgctccactcagaaactcgaacatatcgggattatccgtaaactaggggtcaataacatcattatcaccatggtcatgctcctgttcagttgttttggggcgatcttcgggatgagcgaggaaacgctggcttttgtcattattattgttcctttggccatatccatgggttacgattctctcacgggagtatgtatggtctacgtcgccgcccatgtcgggttcgcgggtgctattctgaatcccttcacgatcggcatcgcacaaggattatcagacctaccgctattctccgggtttgaataccgggttttctgctgggccatcctcaacgtgatcatgattgcttgggtactacgctacgcggcaaaagtcaaaaagaatcccaaagcctctctcgtgtacaacttggatagccattggagacaggaaaaagtggacaacacgcaggaaattgaatataaaagttacacctcatcttgggtagtttatctttttatcctctccggacttgtactcttctcctgttatttcccccgcacgacactatccatcggggaacattccagtctgaccacgtttgttgttccggtattaaccgtgctatttgccttgatcggatatttttctttacggaaatctttccactttttcatcttgacgatcctagggttcacgattcttttcctaatcgtgggagtgatgggctacgggtggtatctgcccgaaatatccggattattccttgccatgggaatcctttccggttttgcagcaaaagaaaatgcagatagtattgtcaagctctttatcgcgggagtaaaagatattctttctgccgcgctggtagtcgggttggccgggggaatcatcattgtcttgcaggaaggacatattatagacccaatccttcactcgctggcaagcctgatgagtgaggcaggacgtgtactttcactaggaatcatgtacttgattcaaaccatgatcaacattatcatcccatcgggttcagccaaagcggctctcactatgccgatcatggctcctttctccgacgtgatcgggttatcccgacaagccaccgtgatggccttccagttcggggacgggttcacgaacatgatcaccccgacttccggcgtgttgattggcgctttgggaattgcccgtattccttacgatatttgggtgaaatttttctggagattcatcctgctgcttgtcattatcggtttcgtgttattaattcccacggcaaccatgcagttgaatgggttctaaaatttataatgatctgaatgaataacctttttataaaaatatttaaaattttaatctcatgaaatcctatttattattacttttttctattattttcactctcacgtgtagctcatgtgacgatgacgacgacaacgaggataaaaatattactccccacgggattgttatacttaacccgcaaattctaatagataacgagagtaattgtgaaatcatttttcgcgtaaacccatcaaattatgaagtttcacccgggagtattgcgctggattgcgtacaatcaaacacgataggccgcggcgtgtcggtcacgccacccgaaaattttgaactcgtaagtgttcaagcacttgttgacgaggaagaaaaaattcacgaaggagaatgggttgccacggttaaggtaaaagacggacttccatttgccgaattaacgcgaatctttcttgtgctaaattataatatcgaaaaaaatcaagttgtcagcatcacctcttctaattatgctgaaattacaacaatacccgccatttctgaaaaaatggtttcattttcaaacccaacggttcaaagctacaaatcacccgtgaatggcgaagttctttcgtcccgaatccacgtgacccccaaccctttaaacgagacgactaatataaattacgatctttcattgatccaaaacatggaagtcgttttaaaaggagagtttgcagattatttccaagtgtccaagatgcaagatgattacgggttagcatttgacatcacccccattctatcaaatttcgatgcatacttcaacgaacacaccgatataaactcgattccaacgaccgcggaagtaactttgacggatattttcgggaacacgttggttcataacgttgacgtttctttctttcgcaacatccaaattatcccggtgacagaagggttgacctacaacagagctgactttgaaggcccagatcttgtaccggaggtgattgttgatatgtcagaatatttacccaaaattggcatcactcaggaatttttagccgagcatcccaaccgagccttttcaatcgtttgtaccggttacatgcccgacggacaagaaggaaactacggattcggatttgccggtcattccataaccgatgacgagacctacatgaaaaccgggaaatttcaagcgacattagatgtccttttcgatccagagcattccttatcgggaagttactatgccgtcattcgtttcttcatcgtggatcccatcacgagagatacgatcatctgtgcagacattcgtcaggaaataaaacttgttgactaaaatcataacgttaaattgaaatcatgcaaaaagaatgattctttttgcatgatttcaatttaatcaatgcaaagactccacgcataaccacagggcgggttcttcacaaaagaagatggtagtgtcaccaacaccccattcccaactcgtttatatgacaaattccctttataacccaacaacgagattttagcccctttagccgggttgatactgtacaacataatctgtgaaggcggattcggttcatcctcatcattcaaataaatggcgtacacttttccgttattcttatgtttcgtgtaacaaatcttcgcctccttgtaaggagcaaccggccgggtctcgtaaattgcctccccgttaatcttcatccaagctcctatctctttcatgatcttgatcccttccggcgggatctccccgttaccatccacacccacgttcaacaagaaatttcctcccttactgacaatatccacgagataatgcaccaattcccgggtagacttatacttatcacccggcaaatatgaccattgattagccatcgtcatacacgtctcccacgggtaatcccacggtttctcgggaatcttctgttccggagtgcggtagttctcgtacttccctccaacccaacgatccacgacaatcaagccgggttgatatccccgggccatatcgacaatccgatccattttaatatcctgtccccgattctccggggccacccatcccccgtccagccagataatatccacattcccgtacccggtcatcaattccttcacctgattataagtaaagtcgcagaatttctcccacatccacgggtgatccttgatcttgtaattcacgttacgatcgccatgttgccagcgatccgaccaataataagggctattccaatccggctttgaaaaataggccccgatcatgaaatctctttccccgaaggcccgaaacaactccttcacgacatccgcattcggagccgtatggaaaggacattcctcggaagtaatcttgtaatccgtttcccgggtatcccacatacagaacccgtcatggtgtttcgtggtaaacacgaaatacttcataccggcctcttttgccagatcagcccagtattccgggttaaacttcaccgggttaaacgtcttctttaatcccacgtaattccggtaatactcgtcataagaaatcgtcgtgtcccgttgaatccaatccacgtcttccgaacaaatcgtccacgactcgcaataccctttctggctataaggtccccaatgcacgaaaaaaccaaacttcaaatcctgccactgttctaatttcgcttgtactgccgggtcctgttctcggtaatattccattccctcgtactgggcatataataacatgctccatccgacaagaatcacactcaataatactttccgcatgactattttttttacaattcatatattttacacaaacatttgcaaatatataaaaaagagtccatgtctaaagttcatcatcttcttacaatcaaaaaagggaatccaatttcacttatcggattccctctacattttaaaacacaaaccttatttcaatcgttcggagacaaaagccttcaatttctctcctctcagatttttagctataatacgattattttcatccaacacgaagatcgtcggaacagcatcaatattgtatttctttatcacgtcgccctgccatcctttcagatcagaaagatgtaaccaagtcaacccatctttcttgatcgcctccacccacttatcctttttctcgtccaaggaaacactgatcacggacaaacctttatctttaaattcagcatacagtttcaccatattcgggttctccatccgacacggcccacaccaagatgcccagaaatcaatgatcttcaatttccctttcacaccatacaaggcaacgtcctccccctccggtgtttgtagcgtgaaatccggggcaactgcatttacatcaaccccttccaacgcctgaatccgagctgccactaacctaccggggcctgttgcttttgctttatccgtcaaactcgcataacactccttcaaccgattcaaatccaaacgttccattccagccgtctggatgtaagctgcaaacacgttatctttattcctctccacgacctcagctaaacgagattgtgcatctgccatcacttgatccaacttcttctgcaattcacttgcagtacggtaatgtttcgcctcgctagcctccgccagttttgcccgtgcagccttaatcttctcgttttcctcagcaacgattccctgatatgttattaactcgctctgtaattttcctcctttaattacgcttttaccggactggaacagttccatctcgtaaggagcatctgaatccaaaataaaaacaaagcctccgccatatccttccacgtaaatcaacgccacgcaaggttcattcatttctccttccaccacgaacttcccgccatgaatatcccctcgtcccaacgtatccacccggtccaccaattgggtaatcactatcattctgcccgacggcatttccggtattttcccgttaatcgtaaacttctttccttccccgaaagacaatccggggaaaaggaaaaaagcaattataaacaattgactaaataacttatacatatc

SEQ ID NO: 27 - DNA, 18631 bp, Butyricimonas faecihominis
atatggtagatattagaattaaatctttgaaaaatacgagtttcgatgagttattcgaggcgttccggcaggcttttgccgagtatgagatgcaattgaatcgtgcggagttacaggccatgttgaaacgacgaggttttgatccggaattttcttttgccgcttttgacggggataagatcgtttcgtttacttgtaacgggatcggggatttcaacgggattcggacagcatacgacacgggaaccggaacattgaaagattaccggggaaccgggttggcaacacgggtgtttgagtcctccattccttatttgaaggaggccggaattaaagaatacttgttggaagtgttgcaacataacacgggagcggtttccgtttatcggaagattggtttccgggtgacgcgggagttttattattttagggcggagaacagacaggtccggaacgaggtacacgttgatattccttacacgttacaggctattcggatcgaagatcacgtttcgatctctgatttctgggatttcaagccgtcttggcagaatagtttggaggcgataggcagggcggctgatactttcgtttgcttgggtgttttcacggaagacaggttggttgggtacggggttttcgaacccgtgtccggggatgttacccagattgctgttgacagatcgttccgtcgtaagggcataggttccttgctgtttcaaaagatgctcgaaatgaataaattaaattccgtaaagatattgaacaccgatgttacttgcgattcgatgaccgcattcctgcgctcgaaaaatattgaaccgacgggaaaacaattcgagatgataaggcagttgtaggtgcggttactgtatcgcggttcgacaattcgtgtggcccttttttagtaaagagcccggtaggtgaacccttttttataggatttaacgggtttttcctagggtaaatcatggaaattgctaggtcgttgggcgcctcttaaaaggctgttaggcgctgtcgcccgattgtcgcccgatcatcgcccgattatcgccgccattttaacaagatataagcaaagataacatttgccgagaaaaagtgtggagagacaacagggaggcagcctgcaggcaagaataaatcaacggttactcgtaatcccgagacaagggtaaatgttgtttatgtctttccatttttgatgtatcgttaaggaatgagatcaaaatcttggttgacattctggttgacaaattggtttaaccgtagtttaaacattgggctgaaaatggcatttttgagggtaaaagaaaagagagtcactttcgtaactctctcattttcagtggtgccaccaggaatcgaaccggggacacaaggattttcagtcctttgctctaccaactgagctatggcaccatcgttattgtttaacgggtgcaaaagtagggaaaatttttgaaatcgcaagcgtttagggagaaaaagtggaggaaaatgtaaaaaaaatgatgaatatggaatcgagttaaggaaaacaggctgtgattcaatatctatgataagggaataaatctggtgtaaaataaagaaaaaatgcgtgattaatttttgattattaagaaattacttatatttgtcgcattagaagataaatagttgtttatcgttgaaaccaaagatatacctctacgtacccttctatatgtattattaattttaattatttttattgtgaatatttttgttgcaaagttaagttccacgaccacaagtgaggacttacaggctcttttctcagagcatggttctgtttcttcagccaaagttattatggacaaagaaactggtaactctaaatgttttggttttgttgagatggaagatgaaacggaaggtttcaacgcgatcaatgccttaaacgaaactgaattccaaggaagaaaaatcgttgtgaaaaaggctagacccagagaagaaggtggcgacgacagaggtcaaagattcccaagagaaagaagatttaattcgaatcgttaagaatgagaaaacagagagtttgaaaaagctctctgtttttttgtatcattttcggtacttcgctttcaaataagcgtataacacttggtgcattaattgtgcttccgtcagttcttcgtccgtgaggttgggagcgagttctatgccgttgcagacatctgtcaattgttcatcccggtcgatacggtcatcgaaattctgttctatcaagaaaatatcgaacaattgcatccgttcgatggattccaaggctagatttcgggcttccaacaggttgttctcccggtattttttcaagaagacttcgattaggctatccgtgaaatagtctgcgaaatagtgcattaggataatacgctttttgaggcactcgtagatgtgtaccggggctgacgagatacactcgctgatgcccagataagcaagttctgccagctcaatgctttcctcttcttcttcatctagttcaagtaggagaatcttgtataacaaatcggcgtattcctcctgacgggtgatgtcccggctttcatggtaataatgaaaacgatcggggatgactttcttcaataacagacggagggccttccggtccccgctggcactgtgtagtaaagattcgtcaagaatgttttccagtttgttcatggtggtctgttatttttcttcggacgggttaaagtttacccagccttgggctttcagctcgaatgaattaccgtccttcgtgattaaattataaccttcgcttttggcacaagtatgtccgatgatactgatctcttccatggtaatcagtttatcgtaggcatccagtggtgtggtgaacaagagttcataatcctctcccccggaaagagcgcataccgtggcgttcatgttaagctcctcggccattttgaacgtctggtaatcaattggaatcttttcctcgtagatgttgcaacctaggccggaatcatgacagatgtgcaatacctcggatgaaagaccgtcggaaacgtccatcatggcagtcggcttaatacctttttccttgagtaattggatgatatccattctggcttccggttttagctggcgttcgaggatatattcataccccgagaagtccggttgggcgttgggattttccttgaacacgactttttctctctccaacaactgaagtcccatgtaagcggcacccagattcccactgacacaaatcaggtcattttcccgtgcggtattgcgataaacaatatcttcctcgttagcctctccgatcaccgtgatactgatacacattcccgtttgggaagaggtcgtgtcaccccccacgagatcaatcccgtagtggtcgcaggcaagataaattccctcgtacaattcatcgaccgcttccaaggagaaacgattggaaacagcaagggaaaccgtgatctgccggggagttccgttcatggcgtatatgtcgctggcgtttgtcgctacagccttgtaccctagatgtttcaacggggcataggccagatcgaaatgtactccttcgatcagcatatccgtgctgaccagcacttttttgtccttgtaatcgagtacggccgcatcgtcgccgactcctttcaatgaagattcgttttttaattttatatcttgtgtcaggtggcggatcaagccgaattcccctaacgtggatagtttcgtcaatggtttgttttcactcatgtttcagttcttatatatcgaaaacaaaaatacgctaaattgatgaatcgagcaaatgataatgtggctacgccacgttacaggttacaagtttatgatgaggtatttcgcaagagagaatgaatcatagcggggatttatcacgtaatagatattatctacctgatagatgattgataggtaatatttttttgtacttttgcacagattgataaattggagataatagggtataaaagttatggctaaagaacaagacgatatattgaatgaagtaactgagggcgagtataaatacggttttgtttctgacgtggaaaccgagatgatcgggaagggattgaatgaatcggtgatccgcttgatttcacaaaagaaggaagagccggaatggctcttggaattccgtttgaaggcttaccgtcattggcttacgatgaaaatgcccacgtgggcgaagttggagattcctccgattgattatcaggacatcgtgtactacgcggccccgaaacaggaggtaaagaaatcgtgggatgaggtcgatcccgagttgaaagcgacgtttgacaaattgggtattcctttggatgaacaaaaagcgttatccggggtggctgtggatgctgtgatggatagcgtgtccgtgaagaccacgttcaaggagactctggcagagcggggagtgatcttttgctcgttctccgaggccgtgaagaatcacccggatttagtgaaacgttatctgggttcggttgtcccctatgctgacaatttttttgccgcgttaaattcggccgtgtttagtgacggatcgtttgtttacatcccgaaaggggttcgttgcccgatggagttgtccacttatttcaggatcaacgcggcaaacacgggacagtttgaacgtactttgatcgtggcagaagaggagagtttcgtgagctatttggaaggatgtaccgcaccgcaacgggacgagaatcagttacatgctgccatcgtggagatcgtggtggagaagaatgcagaagtgaaatacagtaccgtgcaaaactggtacccgggagataagaacgggaaaggtggtatctataatttcgtgacgaaacggggtatctgtaaaggggagaatgccaaattgatctgggcacaggtggagaccggatcagcggttacatggaaatacccgagtacgatattgaagggagacggatctgtcagcgagttttactccgtggccgtgactaataattaccaacaggcagacacgggaaccaagatgatccatatcggaaataacacccgtagccggatcgtatcgaaaggtatttcggcgggatatagttccaattcttatcggggacgggtgaaggtggtgaaaaactgtaagaatgctcggaatttctcacaatgtgactctttgttattgggagataaatgcggggctcacacgttcccttatttggaagtggcgaatcccacggctcaggtggaacacgaggcaacaacctccaagattggggaagaccagatattctattgtaatcagcgaggaatttcaacagaagatgccattggtttgatcatcaaaggatatgccggagatgtgatcaataaaatgccgatggaatttgccgtcgaggcacaaaagctgttgcaaatcagtttggcgggaagcgtgggataggaaactaaaagctaaaaactaaaagttaaaagctaagagctaaaagtttatagatttatcgatttatgaattacgatttatgattttggaatggaggcggttcgagggattggaatctgaaatctaaatttaaaatctaaaataaaatgggtttattaaagataaaaaacttacatgccgcgatagacgggaaagaaatattgaaagggattgatttggaggtgaatgccggggaggttcatgcgattatgggaccgaacggggcagggaagagtactttgtcggccgtgcttacgggacgggagtgtttcgaggtgacggaaggggaagtttggtttaacgggaagaatctgttggaacttccggcagaagaccgggcaagggaagggatattcctaagtttccagtatccggtagagattccgggtgtaagtactgttaatttcttgaagaccgctgtaaacgagcaacgcaaatacaagggattacccccttatccggcaagcgagtttctgaaaatgatccgggagaaaatggagatggtgaacattgacagtcgtttgttgaaccgttctctgaatgaaggtttttccggcggggagaagaaaaagaacgaaatattccagatggcggtgttggaaccgaaattggctattctggacgaaacggattccggtttggacattgacgcattacgtattgttgctagcggggtgaacaagttgaaacgaccggataactctactatcgtgattactcactaccagcgtttgttggattacatcgtgccggatgtcgtacacgtgttgtatgacggccgtatcgtgaagacggctggaaaagagttggtcttggagttagagaagtatggttatgattggattaaacaggaagttgcgtccggtaagtaatggaagatggaaagattagaaaagataaataatgatttcgcgactctgtttcgggagggacaacggttactgcaggaaggatgcggtgacgtgatgaaccgacaccgggaggaggcgtttcaacgtttcgaggccttgggaggaatcccctataaaacggaggactatctttatgcggataccttaccggtgtttgatcgggattatagggtggtactgaaatatatcaagcaagaggttgaagtgggcgagatattcaagtgtcacgtgccgaatttggacaccaatctgattttgacgatcaacggttggttcgtgcaggagaatgttgtaccggaaattcccgaaggcgtggtgatttgcagtatggcagaggccagcgtgaagtataaagagttatttgaaagacattataatcagtacacgaaaccggcagatgcggatggattagtggcactgaacacggcatttgcccaagacggggtattcgtgtatgttccggatcgggtagtgatggagcgtccgttgcagattgtgaacctgatgcgggcgaatgcggacttgatgtcgttccagaggaacatggttatcttgggacgtgatgctaaggcgactattttggtttgcgaccacacgctttccgatgatcgctttttatcgaataataccacggaagtggttgtcggggagaatgcggcttttgaatactaccatgttcagaatcaacatatcgaggcttcccagataaacagcgtgttcgtttcccagaaacgcaattctcggtatgatgcaaacgtgattaccctatatggcgggttcattcgtaacaatctttttgccgctttgacggaagaaggatgcgagagtaatctttacgggatgtatttgtcggataaaaaacaacaggtggacaacttcacctttatcgaccatattgcacctcattgtacaagtaatcaacatttcaaaggcgtgttggacgatgcggcactggctaattttgccggacggattgtcgtgcgtcccgatgctcaaaaaacggaggcttatcaagcgaacaataacttgttgttgacggatacagctcaagtgaacacgaaaccccagttggtgattgatgccgatgacgtgaagtgtagtcacggggccacggtcggacagatcgacgaggaggccatgttctatcttcgttcccgcgggatcggggaggccgaggctcgaatgatgatgatgttcggttttgcacatgagattgtcggacgggtaaaacttgaaccgctccgggaagagatcgatagtttggtggataaacgattaagaggagaattaaccaagtgtcacaattgcgtgatgcattgtaagaaataaattatgtttgacgtcaatcggattagaaaggatttcccgatactggaggaaaagatttatggcaaaccgttggtttaccttgataacggggctacaacccagcgacctttgcgggtggtggaaaagatgacggaatattatttacgttacaattccaacgtgcatcggggagtgcattatctgagtaataaatgtacggatgccaatgaacaagcccgggaaaccgtgagagagttcatcaacgcggagtccacggacgaggtgatatttacccggggaacgaccgagagtatcaatctcgtggcttacactttcggggagacttttatccgggaaggtgacgagatcatcgtgacggaagtggaacaccatgccaatattgttccttggcaaatgctatgtgaacgcaagaaggccgtgttgaaagtggttccttttagagataagggcgagctggacatggaggtgttccggggacttttgaatgagcgggtaagattggtgtgtgtggcttatgtttctaacgtgttgggtacggtgaatcccgtgaaggagatgattgatgcggcacacgctttgggagcatacgctttggttgacggggctcaggctatccaacatatcccggttgacgtgcgagcattggattgtgactttttcgctttttcagggcataaggtgtacgggcccacgggagttggtgtcctgtatggaaagcgtagcctgttggaacagatgccaccttggcagggcgggggagaaatgatcaaggaagttcgtttcgagaaaacgacttacaacgaattgccttttaaattcgaggcaggaactccggattttatcggggttgtcggtttaggtgaggccttggagtacgtgaaaagtatcggtttgcaagagattgccgaatatgaacatggtctgatggattatgccatgaaacaggttcgggaggttccgggcattattttatatggggatgccgcaaataagtcttctgtgatctcgtttggaatcgagggcatacatcctttcgatttgggtactttgctggataagatggggattgccatacgtacgggacaattgtgcgccgaacccgtgatgcaacattacggggtacagggaatggctcgcgcttccatagccatgtataacacccgggaagaaattgatgttttctgtgaagggttaagaaagatagaaaagattttcaaattataagagtaatgacgatagaagagattcagaatcaaatcgtggatgagttttccatgtatgatgattggatggataaatatgcttatctgatagaaataggtaatggcttgaacgcgatggacgaaacgcacaagacagatgacaatttgattaaaggatgtcagtctagggtgtggtttcatgccgaattgcgggatgataagttgtattttgaagcggatagtgatgccattatcacgaaaggtattgccgggttattgatccgggtattctccggtcagacgcctcacgacatcgtgaatgctaatctggattttatcgacaagatcggtttaactcaacacctgtcaccgacacgttctaacgggttgttgtcgatggtgaaacaaataaagtattacgccttggcatacgagggaaaataacgagagatatgggaaaaagtttaatggaagatttagtgatcgagaaattgtctaccgtttatgatccggaagttccggtgaatatatgggagttgggactcgtttataatattgaattcccgaaacaaaacgaggtgattgttaccatgacccttactgctccgggatgtccgattgccgaccagatcgtgcaggaggtgcatgatgtcgtgttgacgatcgacggaattgatgaagccacggtaaacctgactttcgaaccgatgtggactccggaaagaatgagcgaaacggcccggttggaattgggttttgatatttaagttcataaatggagtcattgttgaaaaaagccagagagtgcgggtttgatgcctgtggtgttgttccggtggatgttttatcccgggagagggagcggttggagcgatggatcggacaaggatttcatgcgggaatgaattacatggcgaataatatagaaaagcgggagaatcccgctttacttgttgaaggggcctgctcggtgattgtaactctgactaattattatactccgaaactccaatcggaaggcattccggtagttgcccgctacgcatacgggaaagattatcaccgggtggtgaaagaccggttatttaaattgcatacttgtctggaagaagtgaccggacgaaagattacgggccgggcattcgtggattccgctccggtgtttgaacacgagtgggcccgacgggccgggttgggatggattggacggaactctttgttgattcatcctcgtttggggtcctattgttttattggtgttattatatcggattttgaaccttcaaggtattctctacccgaagaacggaatttctgtggtcagtgtaaccgatgcgtggagacttgtcccacgggagccctttcctcgcatgaagtgaatgccaacctttgtatttcttataactcgatcgagagaaaagatgacatcccgtcagaaataaagaaaaagatgggagatcgctttttcgggtgtgacgcctgtcaggaggtctgtccgtggaatcggaaagctgtactgcatcatgtagaggaattttccccgaatgaatggttgatgcggatgagccgggatgagtggttggcacttgatgaggaggcatttcaagtccgctttaaggaatccccgctccagaggcccggtttggaacggataaaacacaacttgtaatttcggatcattcatacattgtttttttcttgctaaaattccccttgattttagattcaccggataaaaattctatttttgtatcaaaatggattcaatctgttatgatgagacagcggtcggtgaaagatcaagaaatttgtgatttgttaaatgctcgtgatcaacgagggatggagcttttatttgaagcttattataaatctctggtttcatgggctaatacttttttgaatgatctcggggtagcagaggacgttgtgcaggaattttttattgctctgtggaatcaagagattcatcgagaattaaagccggaaacactttcttcttttttgcgggtgttggttcgaaatcgttgctataatcgcttgacgaaacgtgatatattcacgtgttttgtgcgtgtggaacgtgtcgattgtatgtttgaggaatatgatgattcgaaggaccagttgatcgctaaagtgatggatgaagttgctcttcttccgaatcgtagtcgggaaatattgaatggcgtttttgttgagggaatgaaatatcaagaagtggcagatcgttacaatatttcggtttctacggtaaaaactttgttaggaacatctatacggaaactacgggagcggatggggcgtgaaggatttcttgattttttactcgtttattgccggtattgttaaaaaataatgtttttgggataattgatgatttttcttcaaaaatcactagactttttcatcctcttttttgtacataagatgaaaaaggatcaaatctatggaaaaaacgaaattggatcacgaaacagaggattggttaattgcttttctgagtggtgaattagacgagcgggaagaggaaaatgtgcgtgtatggttggaggcgagtccagagaatcggaatgcttacgaatctttgatgaaggattatttacgaatccggtgggtacaagaaaatgtacagatacgggaagaacaggcaaaaaagatcatattctcttctttgaaaaagaaaaggaatctgacgccttattacggagtggcagcttcaatagcggtgttattaattgtgacattattcttttttattcgagaggataaacagatcgtttctgaaaaacttgttacgtcggaaataaagccaattcaatcaaaggcaatattagttctgtccacgggtgaacaaattcagttaacaaaatcgacgcaaaagattcaggagcaagacggttccgtgttgaaaatcgacagtgtcatgggagtacaatatgattctttatctacaaagagagctgaaaagccgatctacaacaaaattgtcgttccgcggggaggtgaatattttgtgacattaagtgaaggtacgaaagtgtggttggatgcggactctgaattagagtatccggtatttttttctggagatttcagagaggtaaaattgaaaggaaatgcttatttctgtgttacgaaaaaaaatgataagccttttgtcgtacgtgcaggggaattttcgttgaaggtatatgggactgagtttaacgtgaatgcttacgatttacaaaatattgagactgtcctcgtgaacggatcaatagggtttaaggcgaatgaaagtactccggaacggatgatggaacccaacgagttagctgtttcggattcccggacggggctgagtgaaatacatcaggtggatatatatccttatattgcttggaaaaatcaaaacatagtgtttgtcaacgagcggttagaatctatcatggaaaaaatggctcgttggtatgatgtaaccgtgttttttcaagatgaaagtctgaaagatttacggtttgattgtaacatgagacggtatactgatattagggatttgtttttctttttggagaaaacctcaaatgcccggtttgctctgaatggacgaacagttgtcataagtaaaaaataagtgacgaagaaatgagcctcttcatcacttacagataactaatagataggttcaattgagcctgaacctatccagtattaattttagttcaatcacaaatgtatgaaaaaaaagagaatcatgtggcacatcttggatgagtcgcataaaaaaaattggatgatcatgaggttgtgtgtcatgtttgtgttttttttgcaatttaccgtatttgcaaatagtgtagcacaagatcaagtgattagcttgaacttgaaaaacgtgagtttttatcagttatttgatgaaattcatagacagacggggttacggtttatttataacacgaaccaactggagaaaatggacaagttggacattcatgcggaaaagaagaaagttaaagatgttttacgtgatgcgttggctgaaaccccatttacctttttgtttgataaggacgtggtgatgttggtgcaaaaagaggagaaagaaaagaaatcaatccggcttaagggatttgtgtatgacacgaagaagcaaccgatgccgggcgtgacggtgaagttgatagggacttccgtgggtacggcaactgatgctaatgggtggttttccgtggtattgccggtgaaaaaggggcagttggaattctcttttatcggtttccgtagccaaattgtgtattttttagaaaagacggaaaccgatactttaaagataacgttgcatgaggatatgcaagcgattgatgaagtggtggtaacgggttacggtgacgtgagccggaaaaactacactggagcagcgacaacagtacgggcagcggatattttaatgccgggagtctcctctatcgatcagatgttacaaggtgttgttcccggaatgttagtatggaacacaacagggcaagtgggggcaacacccaagattcgagttcggggaacttccactttgttggggagtcaagaaccggtatgggtagtggatggcgtaatccaacgggatattcaaccttttaactcggaggataacacgaaattttccacggatgctgatgatattaaacaattggcgggaaatgccatttcgtggttgaatcccaatgacattgaatccataaccgtgctgaaagatgcttctgccactgctatttacggttccaaggcggcgaacggggtgatcgtgattaccacgaaaaaagccactgtggggaaggtgcaggttagttacagcggaaatgtatccattggccagcgtccccgttacgggttgtatgacttgatgaactcggcagagcacatgcaatttcaacgggaaatacatgaggaacgcaaacaatacccttctggttctcttgtgttacctatggggtattatggtttacagcagaaattattgcggaaagaggtcacgttagaagagatgaataaagagtacgagaaattagctcggatgaacacggattggtttgacattctattccgcaattcatttaatcattctcattcgttagggatcagtggcggttcggagaaaattcaaaatcgtacatccttgggatatacacaagaaaaaggagaggcaaggggaaacgatatgaggagtttcacgatgtcttccaatacaacggtgtcactttgggagcgcatggttcttaatttatcgctcaatggaagtgtccggaatgtggaaggttttgcttatgatgtggatccgtttaattacgcttacaacacttctcgtgcgattccggcttacaacgaggacggttcgttgttttatcatgagaaaataggtagtacaagtacagcgataggtggtaaaacgacttataactataatattttgaatgaattggcaaacacgggaagcgaaaatgaaacccggacatggagtgccacggtggatttgcaatgggagattttgccaggtttgagttatcagggattgttctcttactcttctgcttcggcggacacggaacaatatgcgggggaacgctctttttatatttccagttttcgagggtacgagtacgggagtgtatcccccaatggaaatgaaacaaaatgcacccgtttgcccatggggggattgcaagaaagcagtttgacgaacaccaagggtatctcggtacgtaatagtctagtttacaatcgatcgtttaaagaaaaacaccggataacgttgcaattgggaatcgagacaaattcaacaaagacaaagggagcatccaataaacgctacggatatatgccggatcgcggggaatcttttgccactcccccagctacttattactgggacatgtctatcgagagagacaataaagacgttgttagcggggaacactccatcgtgaatcgcatagagaatagtttgagtgaatttgccacggcggtgtacacgtatgataatcgttacgtgttgaactttagtgcccgcctggatgcttcaaatcgtttcgggcaagataaaaacaagcggttccaacccacttggtcggcaggtttcaaatggaatgtggcaagtgagccgtttgtggctgcttcttggtggttgaataacttggatatttatacctcatacggttaccagggaaatgcggtctcttctgtcggtccggaattgatcactacagagaaataccttgatcattatggagcgtatgggttagagattaaatcgttgccttaccctgatttaggttgggagaaaacgaaaacttggaatttgggaatagatgcctcttttttgaaaggacgtttgaatttcacgttcaattatttcaaaaaaatcagtgatgtactttcttcccgcggtatagctgttgagaacggcatgacaaatggcatcgtttccggctccacgatggaaaatagtgggtatgatttcgtgattaatgtggtcccagttcggacgaaagatttcacgtggcaactttcattaaatacctccatcacggaaaatagcgtggataagaatgagcgtatcaataccttagatgattatttgaatggctctgccgtggtggaaggtcgtgctttttccacgttctactcttacgaatttgacggtttggacgaagagacgggaatgcccacgttcaaacacatggatattgctttcgaggatgccgaaagcccgaaagatttcttggtgaaaagcggtaagtttatcccggatttctcggggggattgaatacgatgtttaagtacaagaatttttctctttatgcgttgtttgccgtgcaatggggaggacacaagcgcttaccggatttatatccctctggcggcgtggttgctggctctggactccctcgtccggaacaaaatgtttcacggaaattgatcgatcgttggaaatctccgggagagcagaccatttacccctctttaccgagttctacccaagatgaaatcatatatctccctgaaacaaaaacatcctcagagcaggaagagaatagatatgtcatgtataatttctctgatattcgtgtggccaacacggactttatacgttgtcgttcactttctttcagttatgatttcacggggaaatcgttgaggaaaatgggattgggttatttgcgattatcagcgagcatgacgaacccattcatgtgggtatcagacaaaaaatgggatggattagacccggaaacgggagattggccggctcgtcgaataacgtcattctcattgtcggtaatgttttagtttttacgtgtaaataaagaaaaaaatgaaacagttaggattaatgatattagggatattctgtatctttctattgaacgggtgttctgattttctcgaagaaaagtctcaagatgaggtgatccccaaaacagtggaggactataacgaattattgttgaattatatgggatacacggatatttggagtgtgctttacgtcttgagtgatgaaacaggtataggggagaagctattgcggtctgatactgataaagatgattatcgggctgttgaaattaaaggtgtttttacctggcagccggatatgtgggaaaccgaatcagtcggagtcaattccgcttacgaggacacgtataagttaattatgggggtaaatgccgtgttggacgggatcgacgaggctactggagatcaaaagacgagagataggattaaagcagaagccttgggaatgagaggattttattatttcttcttggtaaacttgtatggcgagccgtataattataataaagacgcactcggtgtcccgctgaaattgacggcagctttagaggaaaacggtattgcgcgtgctaccgtgggagaaatatacgaacagatcgtgaacgatttggaagcttcgtctaaattatttagtaatctcccgaaacagcgtggtgattaccggataaatggtacaacggtagatattttattgtcccgggtatatcttttcatggagcggtatgacgagaccatcgctgctgccgataaggcaatccagtcagccgaggggttgacagattatactgccttgcccggggatacggaatttttcatgccgacttacgatcatagcgaggtagagtgggtgtatggtgctgtaagtttggaatctggtatgcatgtatttgctccggcgagggagttgatgacttatttcgaggggaaagaggatcgacgggaaattttttggtttgaaaataatacaaaagacgaggtgcaaatcaataagatcgcttatagttatcagtccgttccgaacaacacgattcgtgtttccgaggcctacttgaaccgggcggaggcttacgtattgtcgggacaggcgaataaaaacacgcttgccttggcggatttgaacgaattgcgtcgccaccgtattgtgggttacgaagacgttaccatcgcagatgaaacggagttattggctgagatccgggaggaacgttacgtggaactgtgttacgagggacaccgttggtttgatctgcgtcgttacgggatgccttctatttcccatgattataaggcaagatcaagtcttccgtgggtaacctatactttgcgagaaaaagatccgctctacacgttgccatttccaacaaccgtgttcaagaataatattcagttgaaacaaaacccttctgcccgggagccggaaagaacgggtgaaattaaatcgaactaaaatgcagaaaatgatggggaaatatgtagtatacttgagcatgttgggacttttagtctgcttggcttgctcagaggacaagaaaataggagaagtggaaacgttgaccttagattacgaattaccgcaaggaaaatctccggcagatgatcgtatcgttgagatttacgaaaaatatggatcgtatatcttgtacgagtacacggataaggacttttattatgatagtgacattaattttggaagaacgtatgtttatcaactgttggatccgcaatgcgtggagaacatggtagatttgttggatgaaatctggttcgatctctacccggaaaaatttcatcaacagacgttgccttaccatgtttttctggcaagtgatttgttctacgaggatttatttggtgaaatcgtgagagaacctatttgtacgggagcattctcggctgtggtgagtgtgagtaccgaaatgttacaagaattgacttcggaaatgaagttagaattaaaaaatagcttacaaataaaattgtggaaattctggcagagttataactatattgagctgccggacgaattttatgaagtgagtaattatgtgggagtggctaatacagatgaatcttcccctaattatgctcgtgcaagagggtttgtggacggatataatcaaactactttatggtatacttctatagatgactggaatgcgggaactgttagccaaaaatctgatttgtatacatttatagagtgtatgctgacccgatcgtcggaagaatgggaagatgatttggcgtggcctttagtaaaaaagaaatacgatattttaagaaattggatacaaaagcaatatggctttgatattcaggttgtcggaaatttattttgtgaataagtatagaaataacattaacg

SEQ ID NO: 28 - DNA, 18610 bp, Butyricimonas faecihominis
ctcgtaaacagagagttagacacaaaacagataagaagtcctaaagctcaattccactcgtttttaaacgatccttttttgatcgaataaaaaacacactagataggaacaattttatttaagcgtggaactaaaatttaaatattacttgaacacaaaaagatttattttcattctgtgtatcattctgttgccggctgtcagttatgctcaatccgtgagatcaacaagcacaacggcaatggattctattcgcaggcaattcgaaaaagaagcgacacaaacaatcgctgatttcgaagcatacagcaagaaagcacgggaagaatacgaaaaatacgaggcacaagcccgtgcggactattctcgttacactcgctcgatcaaacaaacatggggcggtgacagtatcgtggataatacaccgacacaatgggtagaatacagtaatgattatcaaaatcgttcgatcgttaattttgataaaggaaaaattctcgtggaagtcgcacttgaggatggcaacacgatggattccgccacgataaatgcctgtctggctgttgccattgaacgcatgttgaatagtcagggatcaacctgtccctatccatcctctgttgatgtatcaaagccgctgaccaacaaccccgtactggatggattggttgatttttccatgtacaaacctgataaatcactagaattgacgggacaaaatccgacacttacccgtacagcacctcccacgccaacggtcaaagggaaaaaactaactctcaataacaatcaaaaggaagattcatccggggattccaccacaaccgggattaccatggcccgccgcgtacaggaagaaggaaacagaggttccaataatcctctcgcgaacaaacgggaagatgcccacagacgagcagaacaaaaagcacaggcatggcagaatgaatcggaaaaggccattatgataaaaacgatcgccgcacaaagcaagaaaaagatcacgaaaataaaagggaatgacgggaaagtacgtcaagtagtacaaatagagatgaacctcgtttccgacaatctctcgaaaaacgcggctctttacaaagacctcgtggcagaattctcacaaattttccagatcgaacaaccgcttatctttgccgtgatggaacaagaatcccgtttcaatccggaggccacgagttgggttcccgcttacgggctgatgcaattggttcccacctccggagggttggatgcctataattacgtgtacaagaactgttgggtcccgacacggagctatcttttcataccacgtaataatatagaactgggcacagcctatctccgtgtcctcatgaatcaattctcatcggttaccgacccgcattgccgcaggctttgcgtcattgccggatataacaccggggccggaaacgtgagcagggctttcaccggagccaccaatctaaataaggcaatcccgctaattaataaatacaattatgaacaattgtaccaccatctcacgaatcgtttaagcacgagcgaagcccgaaactatgtttcaggagtgagcaagcgacgggaaaaatatcttaaaccataaaaaggaataacaatgttttgtccagaatgtggccatcgtatagaagatcagaatatacatttttgtccggaatgcggaacaaaaatagaatggctttgtcataccgagaagaaagcaccgaatacgccccacccccaaaacatgggcatgcacgggttgattttcacgaacttgcacctactggccggaaagctggaagtggacgagcaaatcttgatcaccatttttgatgaatttatccaacagaaacgggaatacgggatctcgtacaaacttatcgatgccggtaattattcgtaccagaaaagtggttttttgggaaacacgaagaaagcacatttaaaagccaacagcccgttgtgggattacatggacatactgatggatgtccacaacggggaacaagcgggaggagatgaaatatcgcaatacctatttattataggtagcaatgacattattcccatgccgtgcatccggcactacatctccgacgatgccaacgatgacagtatcgacacggacattctctacgcttatccctatggcaaagagatgcttgcattgctcgaaaaccaagaagcgtttacgtacgatcaactctttttcgtggggaggttgccactcggagaagatgcttcatttgaagatttacgcgattacttggaacgtgacgttaattattcccttggtttcccgatgaacgaggcttacggccaatgtgacccccactggaaaaaggtgtccagtcgcgtggcaaatgaccttttgcaaggaaattatttgcgcgacttaggtaattacctgtcagccgactactattataaccgattgattctctcccccatgatcgtggaaggaaatcttcatcaggtttttcacacgaatgcctcgctatattatttcaatctccacggcggggaaggacgggaatctcgcggttacgcaggagttatgcttaacaaggaagaatacggggctttaccggccatagaaccggaacacatgatgacctgcgaggaacctaatatcgtgatcagcgaggcttgttatggaggacgttttatcggtctggataaacgccacagcatgatgctggcttcactctttaccaacacgttagcattcgtcggatcatcacgcgtggcttggggagccgttgatgatctatcctcgtcccaatcccgggtatcggttagctacgcggacatcatagccggttatttcatcaacgcgatcttacaaggatacacggtagccgaagcattatttattgcccgcggtgccgtgttacaagaaaccgtcccgggagacccgcataccgcgttgacagtcgtggaattcaatcttttcggcgacccgatgatcacgatgaacgctcttacaagcttgaagtccggaaataaaatgacccgaaaaacggctctagctgaacaagatacccaaataggatgtacaatcgagaaggtgggacatggaacgggaaaaggttctatcctagaacaggtacgaggagccgtggacgctaatattcaacagattcatgccacgattggccagtacctgtacacaaattacgggataaaaccgcggccagtagaagagattttaaagattaaatataataacggacaggaagagttgaaattcaattatgacctgacttccgaaaggaaaataccgacccgttgggttgtcacgacaagcacggacgggaaaatcaagagagtttactctaccaaataaacagcttaaagtgaaacaataaacgatacaagtatgaattgccctaaatgtaacgccattcttcgtccgggagtaaagttttgtacttcttgcggacaaaaaatagagacatcggccacgtgtactcaatgcggagccccgttaaaatcaggagccaaattttgcatcaaatgcggacagcgggtcactcttgcagaaaagacatccgccacgtcacaagaaacgacatcggacattaattctgtcaagggacgcatctactggaacatacaaccggggcaagtggctcgcatcattaacgaaacggaatttgactcttataacaatattcaaggtattattatcccggaaggaacaaccgcctatattcgtgccaacggacgcacgattgcttctatcagcgggggaacctataatttcacaggctcttcgagtgattcttccaaccatttgacaggttcactgcggaaaggatgggaatttatcgtcaacttattcaaaaacaagaaaaaggaagagaaaccgacaacggaaactctctacctacaacagcaaaatctgattctggaaaacgccaagaaaggagccgctttctctgttgttatcttactggataagtctttcccgcttcttttcggttccaagcaaggaacgcttgatgcttacaaggattttgtcccgatgaacatacaaacccggtatctggatatggcgttaggcgtaaacgcatatttcaaaatctcggatccggaacgatttatcattcattacctgaccgaacgccagatgttgaacacaacggtcatcgtggatgaactcacggataccatccggaacattttgcaggaaacgttatacgacacggaactctcgtccaatcgcataccccaagaactccacgccttactgaaagaaaagattaatgccatcgccgcagaagcctttttcggcatttccatcgtgcgtattgtcgaaatttcagcgaccagcgaggatttagagcgcttcagggtattgagccgcgaactctacctctcggacaaagaactggattatctccgacgcaccaatgatttcaaaaaccggatggcggataccgtaaattcgcaacgactgcatgaggccgcgacggatcttgaattggacaaacaactggagactataaatcacgatcggctgttgcatgaagacgaggtggagaagtttaaatatttcttgaggaacgagcgcatcgtacgggaggctcaaaacgacgatgaacgaaatgccgctcttctggaaattgccaaaacaggattcatccgggaagatgaagcacgggcccttcaagatcaattgaaaacgaacgattaccaacgggggatgatgttccaaatgatgcaactccgtgacggtatcgagttcgaacgtacccgcatggagggcgaagctgaaaaagcgaccctgattgtcagaaaagagcttgaattacaagaactacaagatgattacgcggatggccgtttctataaagaagtcgaaaaacaacgcacggttgccgaaaccaatctcgatctggatcaacgccagcgggatatggaatacaatgatgccaaacggatgcacgacatggaacgggaagatgatgacacgcagttccaacaattcatggcgatccaaaacgcggaagaacaagcaagagaaaatcaacgcaagcatgaggcggaagtagaacaaaaccgtttaaagacggccgaggagatggaacgtttaaaatgggaaaacgcgaaagaactttccgatgaaaaagtgtgggctctaaacggcggggatgccgccgtggcgtacgcggaaaacaagtacagctcggaggccgaacgcgaggcaagcgaacggttggaagcacaacgacgggaaatggaagcccggttggaagcagaacgggcctcccgtgatagcgaacaccgggaaaatcaatcccaaatgttccagatgatgcgggatatgatgaccatgaccgggggcatccaagcccaaaaggtagatgaaaaagaacgtcaattgcgcgaacgtgatgaacgtattctccgtcaggagggacggatggacacggcttatgaccgggcattggattacacgacccataataatatgccaccgcaaatgccacaacaagcggttcccgcgcaacccgaaccacaagccccacgaccacagcaaacgcaagagccacaatcacccgcggccaaaacagccacaccggcaacctgcccggaatgtggagcgccattggaacccggaacaaaattctgtgctgattgcggtgccggaatcatgtaaaaacgatttttcaattcaatgtataaagatatgactatcattcatggaattctggaatgtcccttattgaacctcgggtctaaatccgaaggccggagagctatcttgacagatgatgagggtaaaaaatataaactttaccgggccgggatattacccgccggtgacccgttttttatcccttacgatggaatgcatatcggagtttccgggaacgcagaggaagaaacagggagttttctagttacatccattttattggatgatggcacggaagtctttcctcagccgacagaaatacctgtcggggatcccatcgaacttcccttaccacataaatcaaaaaaatcactgaaaaagaaaaataaataaacttacgagattatgagcaaagagagattttgtccggaatgtggtcagcccgtgaatgcagacgaacgtttctgcccggattgcggggctgaagtcccgtttgaacccaccaacaacacgggcatcccggaaggcccactaaataaagtgaaaccttcagagacaagcgaaccgattataggcgcaggagcacgtgcaaatattaccggaggaattaataaaacctccaccacccatgctaatattaatacatccagtgtcgataactcttccacggtccataacaacacgacgattgtcatggagaaagaagaagccgagtattgtgaggtatgtggaaatccttttgacgaaaggcatgccagatgccccaaatgcgggaaagagatttgctttgactgcaaagtaaaaggaaaaaatcgttgcgtggaatgcgaaaaaaaatctattaacgagtatcgccttgctttccaacagctacttctgacgaccaacagcaatatcggtatcgccggccgacagatgatggatcaaaaagccagagaattggacgtggaagacgtgaaagccgacattgaaaaagagatgatagaattgtataaaccggcaagtaaagccactcaaccggccgtggtttctaccccttcctcggatcgcccagctcaatcacaggaagccaaccagaaaggtataggagccttaaccgggactcaccaacatcccatttcacggccgggatcgggaagaaacaaatggatttccctgagtgtcatcatactcgttgtacttgccggttattttatcttatcgaagaaagaacatctgatcaaggaaactcccgtgccatccccgacagaacagaagcagacagctacgaaacaaaaggctgttcccccggttcaaaccaaaaccactccccctgcaatcactcccgataaaaaagagatacaaacgggaaaggtgcagacgcaacccgccgtggaaaagaaagatgccgagtatgacgcaggaatggaagcttacgagaaagggaaaggactggatgccattcgtcttttcaaaaaatccggaagtgcaaaatcatattacatgctgggattgatttatgaaaacggctgcggcacagtgggaagtaacgggatgatggcccggaagaatttcaaaaaagccgcagagatgggacacgaagaagcaaaatcgaaattataatatcatatttctattaacctttaatttaaattcattattatgctaaagagaattattacaattatggcgttactctgtgttgctgttatcgcagttaaagcacaagaggtgaagaaaccgaggatgtatgttgaatacttcacggaagcagatggagttgaggaagcaaatagcgacaaagttcgccaagcggtcatggcagccctcaacaaaacgaaacgatttgaactggtagatcaagatgccgagtattccatgaaaaaagaagaagaacggcgcacggatgaaaaagcaatgagtgacgagaaatcacgcacacaaaccatcaccgctgccggacatgattacattttaggaggaaacgtactggcctgctccgtaaaatccgaacagaaagacgggaaaacgatgtattcctgcgtattgaattattcagtaaccgtgacagaagtagccacttcaacaacggttgcaagtgccacatttgatcactccccctccgggattggtggtacggtaggtaaacttttggatttatcggattcaaaagacaaagccatcgcaagtgcagtcaacatgatcgcaagtgacattgaaaacttcctgatcaaagaatttccattggaaagcacgattgttcctatggattatgaagtgaaaaaagacaaattggtgaaatgttatatcaacctaggctctgatcatggagtgaaaaaaggagattatttctccgtattagctcctagcgtaagagcgggtcgtacgacatacagcgagatcggtaaaatgaaagtggaagaagtagtagatggaaccatgtcacaatgtaaagtagtacaaggcgacaagaaaatattcactgccatggaagctttccaagctcttgacgaggctgcccaaaagcaacaacctctaaaagtgaaagcaacgatagcacctttattctcattgtaatcggttatttatgaagaaagtagtgaacatatttggcatgctgttactcctcttttcaacttctgtcaaagcccaagagtaccttcagatcgtttctctagaagccgacaaaggagcaaacgccgttttctcctcggctggaatcgcagataacaagaaagggatcgaaacagatgccatcaaatcacttatctacaccctgttttttcagggtgtagaaggtgttaatgacgggaaacctttagtcagcaaacccaatgaggcttacacgaataccttctttaataacttggctcgttacactccttacgtggttagtgcggaagaagcagtgaaagcaacaaaagtaggtggacgtttccaaggtacgatgcgaattactttacgtcttcgccaattgattaatgatgtccggaaaaacacacattacgacgaggtaatggctgaaattcccaaaccacgtcttcccaaaccaacgattatcgtggtcccttacaagaaaaagggagagagtttcgaggcgaagttggaaaacgacaacgactatcgtattgccgtgagtgccgtgcaaaaaggattggaagcctgcgacatcaagaccattgatctacaaggacgaattgacgccatgaatcgtcggggtcaatatgaagaaaatgccggagccgcagaatccaacgataagcaacttttgatgtcttccggagcagacgtttatgtcacggtggacttgatgaaagattacacggcacaaggcgcccgcgtagcattaatcatgaaagcatacgaaaccgcaagcggaacgatctgggcatcggaagacggctggacaaatcgtttccagacaacacaaacggaggtcctatgttcttatgccgtgaaagatcatctttcccctttcttggaacaaatcattaaaaatttctcccttcctgcccgagttgtcctgcaaatctccattagtgggaactcgacgggttctttgcaagatgcttgctgtgctaacggggaaagaattatagatttcatccaaaactggctggaccgtaacgcacacgaaggagattatcatatacaaggtatcatggacgaatcggccatatttgattacgtgatgatcccgagggaagacaaaaacggcttcaaaatgacctcctcgaagttcgcaaaagacctgaacgatcagctcaaggcacaagacgtttcaggaaccgttcgcattgacggaaacacaattttgttaatgctggacttgtaacaagtaataacacaaaaactaaaattatgcgaaagattattctaggcctgttactctcgatatgcagtgttttccatgccgaggcacaagcacccgactgggtaacccaacgcccgacttcgtctgacgcttacatcggtattggcgtcgcgtcgttatcggaaaccgattacatgaaaaaagcgacccagaacgccttgttggacatcgtttcacagatcgctgtaaaacttgaaaacaattcttttttgcaccgggtagacgtggatggcaaaacacgtgaaatgctggaagacaaaattcacagttcaatggtagcttggctggaaggacaagaactgaaaggcagttaccagtcggaacaaaaatattacgtgtattacgccttggataaaaaagtatatgcccgaaaagccgaagaacgcagacaacaagcgatcaggacaggcatggattacctgcaaaaaggacgtggagaggaaagcgccatgaatctttcgcaagctgcccagctctacggcaaaggactggaagccgtggagccttgggcatttatggatttgactacaaatgccggaggttcatccgtgaatgttcccatagaactctataacgcttacgtgaatgtgttcagcggaatggccatcacgaccaacgtcatgatggtagaaggcgaggcctttaaagcaattgccgaacctatcgccggatgtctttccaaaaacggggttgtcgttccgaatgttaaattaaaggcttcattcgcatccggtaatggcactgtatcccccgccatacagacagactacacgggtacagcggaattttacgtaacgaatattacctcgaaagaagaggtgcaggaattgcgcatcaccattgacgactcgttcatgaatagtctacccgaggcatatcgtcaattgttgcaaaatcaaacttggccctcggctaaagtcacgatttcattgaagagcgcaccgatcacggcctacctctacgtaaacgaggataacgagctggaaggtatcgaacgccagatcagtagcctactgaccaacaattatttcacattatcggaagaccccgatgccgccacgtgcttcgtggatttatccactaaattggaaatgggagaagtcgttaccgggggaacgtatgacttaaatacatgttactgttccctagttctaaagatttacaataacaaaacacagcaaatgctcttgaactattcggtaaaccaagttaaagttctagtacccgtaaacaaatcggcaaccgcatcactctcgatgtgtatccgggaagtgataaaacgagtgaaccgggaattgccggcccagattaaaaaattaaaaatcaattaaaaggtagtattatgaaacactatgtcttatggggattgattgtagctgcattctttttattaagcagttgcggttcgtcaaagaaaatccaagaaaaaagccccgtcaccacgtttatcatgccgggagcagaccttgtcagcggcaacggtgtacttcggggctggggttcaggcaggtccgacagcgaagcctctgcccggaaaaaagcccaaatggccgcttcagcagaattagccgctattttggctaaaacggtggaatctacaaccgaagagtactcgacgatcctgtcagaaggtatgtcttccgaatccaagtctttacttacggataaaacgaaaataaccgtgaatcaaaccttggcgggagccacgatcgtattcgaccgctgggacaaagacgaaaagaccggacaatttattaattatatcgttctggaactcaaaggagacgattacttgaaaaatttgtataaagaacttgaaaagaatgatgcggttaccgtagatcgggatttgctgcaacgccttttcttgaaacacattgacaagaattcgaaaaagtaactaataaaggggctgtacaaaaagtccggcttgtatttgccaactaccccctccagctcccccttacacagggggagtcagtgggggtagttgtttaaaattgactttttgtacagctcctttattttaacatcgaatctctcatcctcaatcatataccctcaacttccctcccacaaccatccccctcccgcttaaaatgaacaattcttagcgattctacacacatcttttctctccactttgccgtaaaaatcaagaaaaagatgtattttcgaaaaaataaaatcattggttgtgaaaaggaacattttacttacatttctgacaattcttgtcttattaaatagtgcggcgatcggatattacgtttatcatgatcagaaggaacatgaagaaaacgaggaaccaccattccacctcatgaaatcatcagacgtggatttcccgacaacattcagcttggcaggagaaccggttcccctagaaagaattgacgtggcggaagccttcaaaaaagaactcatcgtgaatacctacttgcattcacacacgatccaagttttgaaaaatgctccccgctattttcatatcatcgaacctatcctaaaagcggaaggagttcccaacgacttcaaatacctagccgtcatcgagagtagcttgaacccgttggccgtatcttacgctggagccacgggaatatggcaactcatgagtgcaacggccaaagaacttgggctagaggtgacgaatgacgtggacgaacgctaccatgtggaaaaagctacccgtgccgcttgtacctatttgaaaaaagcctatcaaaaattcggttcatggacattagccgcagcctcttataacggaggcatgaatatgctcaccagacaaatggaccgacaaaaggaaaaaaacttttacgatcttttgcttggtgaagaaaccggaagatacgtgtaccgtatgctggcattaaagcaaatcatggaagaaccccacctatacgatttttacgtggaccatttgtatcccgtggaaccaaccacacaagtgaaagtgactaaaaacataaaaaacctagcggattttgcccaagaacacggaatatcctataaaacgctgaaacgctttaacccttggttgcgacagacctcgttaaaagttggaaagcataaaacgtactatattgctattccggaaaacaagcaggcatacaagtaaaaatattcggcacgctatttgtaccaccctgcctatattggatgtaaaaaacctcccaacatggaaaagaataaaataaccgtcttttgtgaaaacaatggacaagaataccagatacccacgggatctagtttaaaagaattcaaaaaaatcgtgttccccatgaatcaccaaaacattctgggagcattagtcaataacgaagtacaagacctgcattacgagatatacaacccgaaatacgtgaactttgttgacgtaaccacactggacgggtatagcgtgtacttgcgttctcttattttcgtactttacaaggcgatacataatctctacccgaaaaaaacgcttgtcgtggaatatcacctttctaacgggatattctgccgtctggcaaataaagaatttattctcacgggggagaggatcaccgagataaaaaaagagatgcaacgcatcatcgaccacgattacgagatcatgcgcacggagacccccacggaagaagccatcaagctttttaaccgacagggtctaaaggataaagaattattactttccacacgaggaaagatgtttacctccgtttattccattgacggcacttgtgactatttctacgggacgctggccccttccaccggatgcttgaaagtgttcgacctgatggattacaaggatgggatgttattaatgccacccgaacgcacgaacccgacacaaatagtcccgttcgtaccccaagaaaaactgttcagcacgttcagcgagttcaaacgctggggaaagatctccgaggttatgcaaattgggcatttaaaccaagccatcgaacataaacacgccggggatatgatcaaggtaagcgaagccctgcacgagaaaaagatctcccagatcgctgaccaaatcaagaaacagaaaaaggtaaaagtcgtgcttatcgccggtccttcctcttcgggcaagaccacgttcggaaagcgattagccatccagctattagtgaacggcatcaaacccgtcaatctatccttggacaattatttcgtgaaccgggaagatactccccgggatgaaaaaggggaatacgacttcgagacgattgacgccttggacatcaataccttcaacgaaaacatcatgagcctactaagaggtgaagaagtggagatacccaaattctcgttcgaaacaggccaacgtttctatgacggagagaaattaaaaatgacccgcaacaacgtgattatcgtggaaggcattcacgggctgaatcccaaattaaccgaatgcctgcctcatgaaagcctgttcaaaatattcatctcggcacttacggtaatttccattgataaccataacattatcaacccatcggacaatcgtttgattcgccgtatggtccgggatcacaaataccggggctactcagctctcgataccttgaaaagatgggaaagcgtgctttccggtgaacaaaaacacatcacaccttaccaagaagaggccgatgtcatgtttaactcggctctcgtgtatgagttgggagccttgaaacaacaagctgttccattgctggaagaagtactggtaaaatacccggaacactccaaagccaaacgcctgttgaagttcttctcgtacgtccaagccgtacctacccgtgaaataccacccacctctatcttaagggagttcttgggaggaagttcgttcaaatactagaatatgccagaggaagagctagtaattcctattcatcataggtagtattccaacccttcctctgtttatatatcaaatcccctccacccctttccgtaaagaatctctaaaggcttgatcctcctctatcatgccttcccaagaatatctgaccttaccctctttatccaacaagaaataagcagggtaattcgttatttcaaatctctctttcaaaaaagcaacatcgggatcatccatgtctatcctcacgctaacgcataaagaatccagataattcacccgctcgggtaaatcccacgcccaattccgcataataaaataagcatcactacctcttacgcattccaacaacaaaggcttatttttttcctttactctctccaaagcatcactccaaaatttcccgttacaacttatcggaaaacccaggtacctgaatttttgataaaaatcccattgttccacgggagttttagcaaattcaaagagcatcttggaagtaaactgacccattcgttccttgtcttcatcttttccgttcaatcctacatattgcatcgcgtgccacaagcaatcccgccactcttttagttccaccagttcttgcatcccttccaccatccccgggatatcattttctaggaaagcttttacttcttttgcccaagccaatacaacttttactttatcttcccccgagataacagtacggtctggggtggacactgccatcgtaatttgttttatcaaatcgaacgcctctggagaagcttgactgccatacatcaaacgctgaatttcttgtttatagccttgaaccaggtaatcatcaattcgctcttttccttgcttttcccggaacttgtcaccatgtttcaccacgtattcaaaatattggcttccatatacctcttcgctgaaaagagaccaacattctttatctgttaatttttcaaacggggtctgctcaaacaaaactgtccgaaggctatcggcatcatgcaattttcttatatctttcaataccatataataatcaactttattctgcaaactcattttttgctttcgttcaagcaaaccattcaaaaaaaacaatgatgacgtttcatttacaccacgtttagcccaggctagaaaatcttccggtcttcttgctccccgcaagcgatgtcttactgtgccatcctcttgcaaaataaaaaatgtcgggatggagttcacgccgtacttctttttaaagtctttcccctccaatttatctacatccatttgtatacaaataaattgtttgttacaatactcccccacgtcttttctactcaacacttcttcaagcatcacttgacacggcccacaccaagaagcggtaacatcaacaaaaacaaactttccctccgctcgtgcccgtgaaagagcttgatccaaagacaaggtatcaaattttacactttgggcaaatacactacaataagtcaaaagacttatcactaataacatactttttttcatacacaatattatttaacaatacgaacatataccactttaccgggaatgaagtaaaacttgttttcatttgcaaacttcctcccaagaacagagaggaaaccaatttcaactagcacgatcagtttccttctgtcctatttcttaatttacgtaactccttctagtgaaaagattgacaagtaaccccgtttgctttacaaaaaagatcaactaactttttcatgtacaaacgtcgttgaatacatttttcgctatactctacacccgcgaaaagattcttgaactcttcatccgaaaaggcgtaaacagaggcaatataattcatcgcatcacaagatttctccagagcttttcgatgcacgatccacctgctactatctttaggatctatttcacaccactcggcatccccccattccaggaatcccatacgccagtaatcccataactccgcaccgaaataccaatcaggattccaatccatctcctccccggtatcgatcattctataaaatttataatcatgcaaattatataatgttcgtgattttttaggtaaatccgaatttgtcatcttataaaagactgtcaaagaatccgaacagtgactgtttaaccaattatacactttagaactcaacaccattcccgcccaaaatttcaacgtgggttcatccatgttttttatatcagccaatttacccacgggcgttgtttcaatcgattcctcaaagacccaagccgtttttcctccttctcttatcgtatcaccgccataatcctccgttaacaggctatccactaacaacaaagatcttatccgatatttaccggaagggggcaaactaggcaatacccatttctctatcgcataggctgctttcaacatggcagccgtatcttgtgataaaacaaaacgaatatctttggacacagaactataaataagatatttttcacttaccgtctcatagaactttaccggattaccgccagcatcaaccccgtcttccgcgtatcccaacgtatcgttaacaaaaattgaaactcccgtctcttcatatatttcatgaagtaaatgccccagttctcccggtttgtcctgtatggcaaaccaatctataacggtacttgcatccagttttatatcttccttgttacaagaagtcaataacgtgaagacgcatatactatataataaataacttttccacatataattacctttttaatactcaattattctaattcccgatccactcgttgaggattatccaccaaattaccctggttatacacgatctcgtaaccgggaatgggtagtacccaagccgggtcttcgccatacggttttaacacgtaatccccttccaacttaccttttatgtcataagccgtatgtcttatggattttttctccggatatttgggagacaccgcgtacctgcgcaaatcaaaccatcggtgagcctcaaaacaaagttcacggcgtcgttcatcccggataaatgaaaccaaatcttttccgctcaaaccgtccacatcggggattccaccttcaaaacgattatgcaacaaggttttaatcgtctgtatcgcctccactttatccaacatggcttcggcttccgccttgttcaaatataactctacgcttcgaatcgcgaaacaatcgtacaccttctcccccacttttgacaccctgtattgctcgtccccattatcctcaaaaaaagcattcagtctcaagtctttaattacttggtcatcaaaactattatataaagagatcaattcttcagaacaactaaaagaacatatggtaaaataagagatatttttgtagaatacattagttgcactgtatccttgggtaaatattatttccggattttcaacatctaatatataccgattctcctcccttcccggaaatgaatttaaatccattaattccacatttccaaattcaatgccttttggcattcatccaacgccaattgccactctcccatatataaatataccctacttagtagaatccgtgcagcaagttcattcaccctgtaaatagtgggttgtgtaacccccttcaacttatcggcggcaacattcagatcctcaacgattacacgataacactcttccatggaattacgatgataatactcatctataatatcctcagtaagatttaaagggactcccatatccgtggaggcagtttctttcacatagggattcgcatagagattcattaacaaatagtaataagcacctcgcaggaaacgagcctctccttcaattctatttcgaatttcaacggagtcatgtgtaaattttttcacgtgagcgataatgacattcaaataggctatatggctatatattttttcccaatcattgtcttcccactcttcgcctgtttttggattaatcgtcaattgatcagaccagtcatagaaatttttaaaagaagcaatatcattaataacatcaccagctccatctcttctaaatatcgtcattgccatatcatcgtccatcacatgaatgtaaggatagtacccacccccataaacactcgcttccgcaaaatataacggttgttccatgtatccattaccgataagaatctcgtccaaatcggtacaactttcggcataagccaaatcctgtgaaaattcttctaaaaattttccacatgaaataaaagataacacaccaagtatcaaga

SEQ ID NO: 29 - DNA, 18208 bp, Butyricimonas faecihominis
agtttacagtaaactcgtatataaattcctaaatttattggtaaatcttcgtgatatatcgaaaaaatggcgaattttacaagataaacgatttatatatggaagtatgtttgatcagacacacgaaaacggcggttattccgggaacgtgttacgggaattcggatgttgacgtggccgattctttcctcgaagaggcagggaaggtgagggagaggctgaaaggggagaggtttgatgcggtttattccagtccgttacagcgttgcaggaagttggcggtttactgcggttacgagaatccgattctggatgaccggctgaaggaattgaattttgggagctgggaggggcaacgttgggaggagattcaagaccctcgtttgcaggaatggtatgatgattggttaagtatacctgccgggggagcggagagttttttggaacaatataaccgggtgtcggcttttttggatgatctgaaagaaacgggatacgggaaggtatgcgtgtttgctcatgggggaacgattcgtgcggcattgatttatgccggaaaatacaattttaaccaagcattcacggatgatgtgaattacggtgctcaggtgaagatgacgatatagaaattattccttttcctctttcagttttttgcgaatgcctctttcgatagctagaacgagaatgattactagcgtgatgataatcacgctgatccaagattggtatgataactcggtgaaatcggtcatggccagtttcgtgatggcagcaagtatcaggatatacaggcacgtgcgcacgttccgcaacttcttctcggtggtaagttcggcattcttttcagtgacatcctttttaattttcatgatctgtttgttgagatacgtactgctttgtaaagatatgaaattatattcaaattgtttggaaaggagaataaataaaaaaaccacccgaaggtggttttgaattattctatcgttttacttcttctctttctttcgttttcatcgaggtagatcttgcgaagtctcattgcttttggcgtaacttccacgtattcgtcctctttgatgtattcgagagcctcttccaagctaaaaaggataggaggtgcgatgtttgtcttttcgtcagaaccgctggcacgcatgttggtcagttttttagacttgcatacgttaatcacgatgtcatcctgacgggtactttcaccgattacctgtccggcgtaaacctcatctcccggggtaatgaagaatctacctctatcttgcagtttattaatagcgtaggcaaatgaatcacctgtttccatggcgatcaaagagccgttggtacgcatttcaatttcaccggcatagggttcgaaacctttcaaacggtgagcgattacggcctctccggcagtagcggtgagtaggttacttctcagaccgatgataccccgtgaagggatattgaaagtcaggtgtacccgttcgttacggtgttccatgtttgtcatgacacctttacggcggttcaccatctcgatagcttttcctgatacctcttccggtaggtcgatggtcaattcctcaacaggctcgcattttaccccgttaatttctttgatgataactttcggctgtccgacttgtaactcgtagccttcacgacgcatggtttcgatcaacacgcttaaatgaagtacgcctcgtccgaacacgatgaaagaatcggcactttgtcccggttcaacccgtaaagcaagattcttttccagttcccggtccaaacgttctttgatgtgacgggaagtcacgtatttaccgtcccggccgaaaaatggcgagtcgttgatggtgaactgcatactcatggtcggttcgtcaatggcgataggagccagtgcttccgggttttcgaagtccgcaatggtatcaccgatttcgaatccctcgatcccaacaagcgcgcagatttctccacattgcacctcgtcaactttctgttttcccatcccctcgaaggtcattaaatctttgatgcgggttttaaccagtgttacaccgtctcttttgcagagggtgactggcataccggattttaatgttccgcgggtcaatttaccaatggcgattcgtcccacgtaagaggaatattccagagacgtgattagcatctgcggggttccttcctgtactgtcggggcgggaatatctttgatgatagcatccaataacggggtaatgtccgttgtaggtttgtgccagtcggtggacatccaaccttgtttggcactaccgtaaacgacggtgaagtccaattgttcttccgtggcatccaaggagaacatcaagtcgaatacttgctcgtacacgaagtccggacgacagttcggtttgtctactttgttcacgacaacaatcggtttcttgccgagggcaagcgctttttggagtacgaaacgtgtttgaggcatagtaccttcaaaagcgtcaaccaataataatactccgtcagccatgttcaacacgcgttccacctctccaccaaagtcggcatggcccggggtatcaataatattaatcttgtaatctttataatgaacggatacgttcttggctaagatggtgatccctcgttctctctccaggtcattgttatccagtaatagatcacccgtattttctgtttctctgaataagtttccttgaaaaatcattttgtcaaccaatgtggttttcccgtggtcaacgtgcgcgataatcgcgatgtttctaatcttctgcattttgctcctatggtattaaatccaaatagggcgcaaagttagtattttttttaaagaaaagggactcattgagcccctttttttattctaccctgttggcacttcctaaaacgtgtaccgttttgtgcttgtataattcttttaatgcatctctggcggggcctaggtacttacgcgggtcgaattctgccggcttgtttgcgaagacttcacgaacggctgcggtcattgccaaacggccgtcggagtcgatattgattttacatacggcagaagtagcggctctacgcaattgttcttccgggatacccacggcatcttttaatgcaccgccatatttattgataatagcaactttgtcttgtggtacggaggatgatccgtggagaacgattgggaatccggggatacgtctttcgatttcttccaagatgtcgaaacgtaatgggggaggaacgaggattccgtccgcgttacgggtacattgctccggtttgaatttatttgccccgtgggaagttccgatggagatggccaatgaatccactccggttttcttcacgaagtcttccaccaagtccgggctggtgtaaacgctggctgcggcaaccacgtcgtcttcgattccggccagaacaccaagttcaccttctacggtaacatcatatttatgagcatattcaaccactttcttggttaatgccacgttctcgtcataaggaagggccgatccgtcgatcatgacagaagagaatcccatttcgatacaagatacgcacaactcgtacgtgtcgccatggtctaggtgaagacaaattggaatattgcatccaagttctttggcatattcaaccgcaccttgtgccatgtaacgtaaaatggtttgatttgcatatttacgggcaccgctggaaacttgtaagataacaggagattttgtttccacgcaagctgcaacaatagcctgcatttgctccatgttattgaaattgaaagccggaatagcgtatttaccttccattgctttcttgaacatttctctggaattaaccagtcctaagtctttgtaattaaccatagctgctatattttatattcgtgcatcaaagttaagcattaaaaacagagatatgcaaggaaacgaaggaaaaatttcaaacgtttgcggagattgaaaattccctgaattttcaagttgcaggttaacgggttacaagttacaggttcgaagtgtgaaggtcatgttttgtccgaatttgcaacttgttaacctgtaacttgtaacttgaaatcgcaggggtaaaaaaaatagagtggttaccactctatttcttttaatccatgcgatttcaaataagcattcgcctgactgaattggtgattgccgaaccagccgccccggttggcagacaagggggaggggtgtacggatttcagcaccaaatgccgttgggtgtcgatgaaggcacctttgcgttgggcgtaggaaccccaaaggaagaaaacgaggttttcttttttctcggaaatgattttgatgacggcatcggtgaaggtttcccaacctttgttctgatgtgaaccagcctgatgggctctcacggtcaatgtagcgttgagtaatagcactccctgttctgcccagcgttcgaggttgccggacgtggggacgggtttacccaaatcgttatttatttctttgaaaatgttctgtaatgaaggtggttgatcgatgccttccggaacggaaaaacaaagcccgtgtgcttgtccgggaccatggtacgggtcttgcccgagaatgacaaccttggtttgttccgcgggacaatgatcaaaggcattgaaaatgagttttcccggaggatatatcttcgtggtcttgtactcgtttttcacgaattggatcaactcggagaaataaggtttctcaaattcatcttttaagagttctttccaagagggctcgatttttacgtcaaccatagaattttgattttagatttaatgattgggtgattgccgatttcgtgattaggtgattcctacatcactgaatcggaaatcacagaatcactcaattatttcgtttttatctcaaataactttggccagtgttttccggtaatgtaaatcgtgcccttcttttcgttgtatgcgataccgtttaaaacatcgtcgttctggtccagtttggctctttcggaggcggtgagtagattcgggagtagtaggtcctgtactacttcgcctgattccgggtcgatgatgacaatccggtctgtaagccattcgtttgcccagatataaccgtttatgtattccagttcatttaagttggttaccggacctttgttgtcgaaaacttccacggttttgacaacgctgaagaggttcgggtccaaatggtacaagttatgtgaaccgtcactcatgacgagtttgtcgcccatcgtggtcagtccccagccttgctccatggagtagtcgaatgtcgttaacagggtgaaagaggccaagtcgtaaacgaacgctttctgggaagtccaggtaagctggtatatcttatccttgtaaaccgtgatcccctctccgaaatattggctgtccaatcccagcatggcgagtgttttgttgttctccaagtcgatcttgcgcagggtggattggcctttgatcccggttccctcgtagataatgccgtctatatatactaatccctgcgtggaggcatccgtggcatgggaataggttttcatcagttggtattgaagtggttggggtgccttatccggtttcacgataaaggattgggtggctaccccgcatttgttgttgggatggaatgcgatcactttgagcgtgttggtaccacatttttctttcgggattttgaacacgaattcccgggttgcgctgtcgagcgtggcaatctgtttctggttgaagaacaggtgggcggagtctattttatagtgcttgttgttcgcgtatacaattttgagttcctcgttaaaccgacaggtgtcgaatttcatgggatacacgaattgcacgcttttcacgtatttaggtcccgtcgttttgcggctttgggcgctgtctaccgtaatctggttctggtcccctttactctttttttctccctgacaggcagagagcaacaggagcgaaagtagtatgtagtagagataaggcataatgtattatgtgatttagtgatttatgatttcgtgattcttgtgtttacgatcaagtgtaatcactccatcgtaaatcacttcatctgcaatcattcaaggctccattcgtaaccgtccttcgtgtcttttatctggatgcctgcgtttttcagctcgtcacggatgctgtcggaggtagcccagtccttgtttgcacgggcggttttgcgcacgttcatcatagcgtcgatcaccttgcctagggcttggttgctggcgctggagtcctcttctcccttgaggccgaggatgtcgaacacgaagctgtggaacaggtttttcaacatttccaagttttctgcgttgatcttttccgagcctgccgcgatggagttgatgatgcggacaccttcgaacaagtgggcgattaatatcggcgtgttcaaatcgtcgttcatggcctcgaaacagttcgtctgtaaagtagcgatgtctaccgtgttctcgttggacgctttcaacctgttaagttgtgaaacggcggccatcattcgctcgtaacctttctccgctgcctttaatgcctcgttcgagaagtcaagcgggctgcgatagtgtgcttgcaggatgaaaaaacgaacggtcatggcggagtaagcctgttccagcacgttgttgttgcccgtgaagagctgatccagcgtgatgaagttccccagggatttacccatcttctgcccgttgatggtcaccatgttattgtgcatccagtattttaccgcctcgtgtccttgtgcggccacgttttgggcgatttcacattcgtggtgcgggaattgcaagtccaaaccgcccccgtgaatgtcaaatgtttctcctaggtatttctgactcatgcaggaacattcaaggtgccagcccggaaatcctacaccccaaggtgagggccagcgcatgatgtgttccggggaagcctttttccacagggcgaagtcaaatgggttacgtttttcctgttgtccgctcagttctctcgtgttggcaaacaattcgtcgattttacgaccggatagtttaccgtagtgatatttttggttatagcgttccacgtcgaaatagatatttccctcgctttcataggcaaaaccgttttcgatgatctgtttgattaattcctgttgctcgatgatgtgaccggacgcgtgtggctcgatgctggggggtagcgtgttcagttgctccatgtttttgtggtaacggttcgagtagaattgtaccacttccatcggctccagttgttccagtttggcttttttggcgatcttgtcttctccttcatccgcatcattcacgaggtgacccacgtcagtgatgttgcggacgtatcttacccggtaccccatgaatttaagataacggaacaacaagtcaaaggtgattgccggacgggcatggcccaaatgagcgtccccgtatacggtcggtccacaaacatataatcctacgaaaggcgggttaatgggttcaaataactctttttttcgacttaacgtgttgtatatcgttaacttgttttccatgatactataatgctttattgatatgattcaacaaaagtagaaattttctccttgaaaatgacgggaaagggtaaattaatgccttattcttgtcattcatggtttgttttccgtttgttgttactttagtttttcttgtattttaacgcttccgggatggcctcttttagtttagcaatccgttttgtgtcagcagggtgagtggataggaattcgggctgtttgcctgttgatgcgtttgccatacgggtccagaaagcgacagcctcattcgggtcgtaaccggccatggccatgaagatcagtcccaagtgatccgcctcgtactcgtgtttacgggagaaggggagtgtgattcccacgttggttcccatacctatcgcggcagctaaaatggcttttctcgcatcactttggtcgtgaccaaggatttcggtggcagcggcctgcccgtattgtatgagtgcctgctggctcatgcgctcgttgctgtggtgagccacggcgtgggcgatctcatgccccatgacgacagcgattcccgcatcattctgacagtagggtaatatcccctcgtagaaaacgaccttacctcccggcatacaccatgcgttgggttcgttgctggccacgaggttgaattcccattggaaattggcaatctggtcttgcagcccatttgcggcaagatattgttcaacggctttcgagatctttgccccgacatttttgatccgttgtttattgacggcatcggtggatagcttgttttcctttaaaaaactactgtatgaggttaaactcatggagaccatttggtcttccgggaataggataagttggtgtcttcccgtaagcggcacggtggcgcatcggaagaaaagcagaacgatccctacgatgaacgtaaggcgtaaaattgttcttttcataagctgaataattgaacggttatattttaagtgctaaaatataatacggatttgatatttgcaatgtttgttaaagaatgtcgtttagattattctacatgaaaatatgactgttccttggcaagttctagataaagagtctttgtgccttcgatttgctggtaatgttctccgactttatggcagaagttccagcatattttttgagggttgaagatgatggttgcgtcttccgggtaggattcgcaccattgatttacggattctttatattgtttaccttggaataatgaggctgtctcgttttcaatcataaaaatgaattgtgaaaagccgagtagttggaagttgttggaaagaagatagtaggtttgtccgtccttttgcaaggtgaatatcttctcgatctttacgtatccggtggtatcaatggctgtggtattccaaccgcctttaccgttctcgtaaaggaggaatgaatacaaggggttgtatgaccattcttgaaaatttatgactccgactttgtggtctgcagaggctacgtcagctaataaatgtacatccggacataggcgggctgcttgttcgagaaaacgaaagaagaagactgtttcttcggttgtcagctcttcacctcgatggttttggcggtagcctaattcatgtcgcatgagttccaaggctgcttgaacctcttctgccgggtagtatttacgttctcctatttggtatttttgtaggagtgctaccgtgtgtatgactttttgctgctcggtggaatctgtgtgatagggaatgaagaaaccttgttgttgtaaggaatcgaaatatgccgtgagatttttaggtgccgtgctttcttgtattgggccgtgtaacagaaaggtttgttccagtttttgtttattttccgagcgattccgatttgagttacatgaaataatcagggctgagctcaagatgaatagtaaaagtatcaagggtctcatggcttatatctttttttaaacaagcagtccgacaacggactgcttgtttaatgtttgaaatgatactttagttcaattctgccaattgttgttcaatggctttgatttttgcttcggcatcagcttgttttttacgttcgttctcgacaacctgtgccggggctccactgacaaacttctcgttcgagagttttttcatcacggatgccaagaagccttgggcgtaagctagatcagcttgcagtttggctctgacttcttctgtgttgacttctcctactgcggggatgaagtattcaaccgtgtcgcagataaagctccatgctccttttaccgtgtcgttgaccatttctacatcttggatattacccattttacagataatactctcgaatagtagcgggtagcggtcattacttttcactcttaaagaaatcgcatccttaaaggcaatgttgttttgcttgcgaatcgtgcggattccggcgatcacttctttcgtgttttcaaaggtattcaagaagttttcgtcgtattttccggggattggcatcacggaaaccatgatactttctccgtctttccgctctctcaagttctgccagatctcttccgtgatgaacggcatgaacgggtgaagtaattgtaacatttcctcgaagaggtaaatggtcttatcataagtgatccggtcaatcggttgctcgaatcccggtttgatgatttccaataaccaagaggagaactcatcgcggaatccggtgtacacggtcataagagcctcggagatccggtattgctcaaattgggtgttcaaggtttctttgcacttgttcaagtattgttcgaaccattcaagagctaatttagaatgcaagggttgttccaggtctgcgactttccagttgctgactaggcggaatgcattccatattttagtcgtgaaattacgtccttgttccggaagactttcatcaaaaagaaggtctcccccggcgggtgcgcacaataacatgccaacccgtacaccgtctgccccgtattggttgatcaggtcaattgggtccggagagttaccaagagatttggacatcttgcgatgcagtttatctcgaacgattccagtgaggtacaggttcgagaacggtttctcgtggcgatattcataaccggccatgatcattcttgccatccagaagaacagaatatcgggtccggaaactaggtcatttgtcgggtagtaatagttaatatcttcattgtccggttccaaaatgccgttgaacacggagataggccacagccaagaagagaaccaagtgtccaaacaatcttcatcttgacgtaactgatctgccgggatgtctttgccgaatttctccttcaccagttgtactgcttccgtgggtgttgcggcaaccacatagtcgttgctatccggcaggtagtataccggaatctggtggccccaccacaattggcggctgatacaccaatctttcacgttctccatccagtagcgatacgtgttcttgtattttgtcggagttaggagaatgtcatcgttcatcacggcatccaatgctggtttggccagctccttcattttcaggaaccattgcatggatagcttgggttctataaccacgttagtccgctcggaataccccaccttgttattatagtcttctatttttacaaggttacccgctttttccagttcgggaatgatttcttgacgtacaacaaaacgatctttccccacgaaaagttgagcattctcgtttaatgtaccgtcatcgttgaaaatatcgatggtttcaagatggtgtttataaccgatctcgtagtcattgatgtcgtgggccggggtgatttttaatgctccggtaccgaattccatatccacgtattcgtcctgaataatcgggatcacacggtttaccaagggaacaatacatttcttgccggccagatgacggaaacgctcgtcattgggattcacgcacacggcactatcacccaagatcgtttccgggcgggtcgtggcaatgatgatatattcatcctccgtcccttcaatacggtaacgtaggtaatataatttgctatgctcttctttgtaaacaacctcttcatcggatacggctgttttggccgatggatcccagttaaccatccggactcctttatagataagtcctttgttatacaggtcgataaatacctttatcacgctggcggaacgaatctcgtccatcgtgaagcaagttctgtcccaatcgcaggatgctcccaatcgctttaattgttcgaggatgatccccccgtgcttttcagtccatgtccaagcgtgttttaaaaactcatcccgggaaaggtcccttttctcgatgccttcacttttaagtttggctaccactttggcttccgtggcaatggaggcatggtcggttcccggaacccaacaagcatttttacccagtaaacgggcgcgtctgacgagtacatcctgtatcgtgttgttcagcatgtgtcccatgtgcaggactcccgtgacgttaggtggcgggattacaatacaatacggagttctctttttatcaacagtggaatggaaaaatctatgttccatccaatattgataccatttctcttcgctcgttcgcggatcatagtttgttgggatcattttaattcagattaaaattatatattcgtaaaaaggctgctttgtcgagcagccttgttttttattcttctgattttctaagtcttcttccttttttcttttgtgcatcaaggagagcttcaaggtctgctttttgttgcgaaccgtcgtagtcacagatgtatttatcgatgagaatacgaccacagtactcgcagacgatgattttcttccgagaacggatgtctaactgtctctgtggcgggattttgttgaaacatccaccacacgcatcacggtcaacggtaacaacggctaatccattgcgggcgttggagcggatacggcgatatgccgtcaatagacgttcgtcgatggtagcagcaagttcttctgattttgtctgtaaagactcttcatctttgtgtgtttcattgatgatgtcattcagttcgccttttttagcttctagatcagatactttatcttcataacgctttttggattcttccatcagcgcttctttttctgcttttgctttttgagcctcccggattctcttttcctgtaattcaatttccagtttctggaattcgatttccttgcttaaagcatcgtattcgcgattgttgcgaacgttatccaattgttcactgtattttttgatcgcttcctcggctttcttgatgtccattttccgagtggaagaggttttgtcaagttcacctaattcaaccttcaagttttcgatacgtgtttccaatcccgcgatctcgtcttcaaggtcttgaacttctaacggtaattctccccgtagagtcttgattttatcgatctcggtgtcaattctttgtaattcatacaggttctgcagtttttcttcaactgtcagttcttgcattttctcattgttattcgtcaccatatattataaatacttaatcggatttgtattaatctcagaaaactgaaccgcaaatttagatattttttttgtaagtatctcataaaatatctcttttgtgaattgttcgctttcgtaatggccaatatcggcaatcataatgcggttttccgtgaggaaaaagtcgtgatatttgaaatccccggagatgtatatgtcggcctgtccggctagggcctgcttgaaaaaggaggctccggctccgccacaaacagccacccgttgtatggagggcgtgtgaggtgtcgtgtaacgtaacctatcacaccggaatatttcttttacttgctgcaaaaaagccatgctttcaacgggttgttgtaacttgccgataatcccgaagccgttaccggccatcgggtccccttccggttgaagaacctgccgatggtacaggtctagtttatctgccatacgtccgcttacaccgttggctaccacgtccatgttcgtgtgtgcggcgtaaatagtgatgtcgtgtttgatggcatcgatcacgcaacgctccacgtaagttgccggagtgatatgttttagcccgctgaaaatgagtggatggtgggaaataattaaattgtgtcccttatcaatcgcttcctttacaacctcttcggtaacatcaatacatagtagtatggatgttaattcccgttccgggtccccgcaaagtaatccggaattatcgaaacttgcctgaagttttaacggggcatagtcttctatgagcgaaataatctcttttatatacatatttggaatttaaaatttagaatttaaaatctaaattattacggtagctggtttttgatggataacagctcgtccttaattcctttcaggcgttttatgacctcgaagtgtaattccgtttcgtctttccggttcttgagttgttgctgggctccttttagtgtcattcctttttccttgaccagatggtagatcagatggaaattatcgacatccgctttcgtaaattgacgattcccttttttgtttttgtggggtttaatcacgtcgaattctttttcccagaaccggatcagtgaagtattgactccgaacatctcggctacttctccgatagaataatacaactttaatgattcttcagccaccatggtttaattgaaaattgaaaattgaaaattgaaaattagcttttcaagtttcgtttttcggtgttatacattcatttagaattctaaatctaaaatttaaattggatcagtccatgctttgtcccgtgttatttgcggtctccactaacaactcgaactcgtcgggggtgagatcgttgaaataaaagtttatgggatctatcggcttgtcatttttccgtacttcatagtgtaggtgaggtcccgtggatagtccggtgttgcccaaatatccgataacgtcccctcgcttgattttttggccttttttagccaagattttatccatgtgggcatatagcgttttgtaactgaatccgtggtcgataaccacgtgacggccatatcccttatcaaatttactttcgataactacaccgttacctgttgcgtagattggggtcccgatggtacccgtgaagtccatgccagcatggaatttcggggtcttgtaaatagggtgcatccggtagccgaatgaagaggttacctgatgtgtatttttgtcttttaacgataccggaaggatagctggaatggaggctaacatgtcgattttgtttttggccagttcttcaatcttgtcaaaggatttgctttgaatatagattgcttttgataattcatctattttcttggcagtcccgataatcagatccgcattgtcgatttgtctcagatgttcgtactggtcgacccccccggaacctgcccggcgaatggatgatgggatgggatcggtttcgaaaataacccgatagatgttgtcatcccgtgattccatgtcttttaggacgttgtccagatgttctactttgttacttaataggctatattgagtaagaacttcctcgtatttccgttttaaaagtttttcttttggggaatcaatgaaagcatataccaagtatagcatgacaatagccaaggagaaactggaaaagaatttcttgaataatctccaaagcctttttcttaaagatgattctattttatcaaaagataatgtgtccgaattaaaatgataccctgcttttcgcatagttgctaataaaaaatagtgtttgcgatgcaaagttaaagaaataatctaaatttgcaacttggtaaacaaggcagatcaaagtgatagcatgatcatcccggttgaaatgcgcttggtaggaaagatgtcagaaagggatctgaatttcttttcgagcgaggatttgggcaataagcatggagttgatagagagtgaaagacagaatctgcgtatgtcatttttaaatttagaaggtatgaaatcagcagaaatcagacagagatttttagatttttttgagaagaaatcacatacaatagtaccatcggcaccgatggtgatcaagggggaccctactttgatgttcacgaatgctggaatgaatcaatttaaagatataattttgggaaatgtgcgtccgaaggcaacccgggtggcagattctcagaaatgtttacgtgtttccggaaagcacaatgatttggaggaggtgggacatgatacctatcatcacacgatgtttgagatgttgggcaactggtcgttcggtgattatttcaagaaggaggcgattgcttacgcttgggagttccttacgggagagatggggttggataaaaatcgattgtatgcaaccgtttttgagggaagtaaggatgatcgtttagaagaagataaagaggcgttggagtattggaaattgtacttgcctgaagatcggattctgtacgggaataaaaaagataatttctgggaaatgggagatatgggaccttgtggaccttgttcggagattcacatagacttgcgctcggaggcagaacgggcattgaaaccgggacgtgaactagtgaataaggataacccgttagtgatcgagatctggaatctggtgtttatgcagtataaccgtaaggcggatggtagtttggagaatttgcccagccatcacgtggacacggggatgggattcgagcgtttgtgtatggccgtacagggaaagacgtccaattatgacacggatgtatttactccgatcatcggggagattgctcgattgagtggaaaagaatacgggaaggatgcggctgcggatgtcgcaatgcgggtgattgcagatcacttgcgtacgatcgcattttcaattacagacgggcagttgccttcgaacgtgaaagccggttacgtgatccggagaatcttacgtcgggctgttcgttatgcttatacattcttggatcagaaggatgcattcatgtataagttggtgccggtgttgattgaggttatggggcaacattatccggaactctcttcccagcgggtattgattgagcgggtaatacaagaagaggaaaatgccttcttgcgtacattagataaaggtattaagttgttggataagattattgagaagaccaaggcggaagattttttgactgtaccggggaatgtggccttcgagttgtatgatacttatgggttcccgttggatttaaccgagttgattttgaaggaaaacggattggtggtaaatcgtcgagagttcaaggccgagatggaagctcagaaagaacgttctcgttcggctgcagctgtaagcacagatgattgggtggaattgattgctgatgatactcaggagttcgtgggatatgactacacggagacggaagtgcagattacccgttatcgtcgggtgaatacgaaggggaaaacgctttatcaactggtgtttaatataaccccattctacggagagagtggaggacaggtcggtgatcgtggctggttgatttcagaaacagaaaagattaatgttttagatacccataaagaaaacgggttgactgttcatataacagatcgtttgccggaggatttgacgcaagtgtttacggccaaggtggatttggacaagcggattgccacggaaaacaatcatacgtcaacccacttgttgcattacgctttgcggaaagtgctgggaacacacgtggaacaaaaaggatcatacgtgagtgatgagtatttgcgtttcgacttttcacatttccaaaaggtgaccgacgaggagttggagcaagtggctgccatcgtgaaccaggaagttcgtaagaactacccattagaagaaagtcgagctatacctatcgggcaagccaagaaaatgggcgcaatggccatctttggagagaagtatggagatttggtgcgtgtggtgaaatttggggaatctgtggaattgtgtggaggtacacatgcccatgccacggggcaaatcgggtttttcaagattatttcagagagttccgtttcagccggggtccgtcgtatagaagccattacggcagcgaaggcggaagaatatatcttgaattatttcaagatgatgaaggaaatcgacagtatgtttaaatctaatcgtggtgtattagagaatgttagagaattgttgaacgaaaacgaggggttgaagaaagatgtggaaaaattcacgcaagagagtttacgaatcatgaaagaagggtggaagaacgaaaagcgtgttatccgtgatattaacatgattgtgaagacggttatgatgcctccggccaacgtgaaagatattgcattccagttaaaaggagagttgaataaccttatcttggtgatcggtggcgtatttaacaacaaacctcatttgaccgtgatgttcagcgattctctggtgaaagatttcggattacacgccggacaaatcgttaaagatgcggcagtggaaattaaaggtggtggtggtggacaaccatttttcgcaactgccggaggatcaaatcccgatggggttagtaaagctttggaaagagccgagaaattgattttggataaaattcattagtttttggtacaaaatttgtgtagccttttatat

SEQ ID NO: 30 - DNA, 18145 bp, Butyricimonas faecihominis
ctagctaactatctgtttacgagaaatgacaataaatgactaaattttttacgattaccgaatttatttatatattgcaatgtttttaaacgatcattaaatgattctcaaacctatactcaaatccattgtattttcttacttttgtatcgaaatcaaaatacttatttatgcacctgttttacacgcctgacatcacaacaaacgagtacacgctacccgaggaagaatcaaaacattgtgtcaaagttcttcgtctcgaaataggcaacgagattttccttgttgacgggaaaggtggcttttaccgttgcgagattattcaagcgcaccctaaacgctgtgaagtcagatgcgttgaaaaaacagaaaattacggaaaacgggattaccatattcacattgccattgccccgacaaaaaatattgaacgcatcgaatggttcttggaaaaatgcacggaaatcgggattgacgaaattacacctctactttgcgatcactcggaacgcaaagtaatcaaagaagaacggctggaaaaagtgattatttctgccatgaaacaatccttgaaagcctacctgccacgactcaatcccatgatcgaattttctcgttttgtaaaaaacaatcaaaactcattgaagtgtatcgcccattgcgatgaaggaaataaaaagtcactccaagagatttatacccccggtcaaaacgccacgattcttatcggcccagagggagatttctcgggaaacgaaatcacgttagctttagcaaacaatttcattcccgtcaccctgggcgaaagtcgcctgcgaacagagaccgcaggaatcgtcgcttgtcatagtatcaattttatcaacgagataaatcactaaaacataaaacattcatacctgaggttataaaacataaacctaaaatgtcacgattctgccatattatttgtatttttgcggtgaaaggttaaatgtttttctgaattatttatcgtggattttattaacgaattgaacgagaaccaacgagaggccgtcgtgaacacggatgggcccacgcttgtgattgccggagcaggatcgggtaaaacaagggtattgacatatcgtatcgcgaacctgttgagcaagggtgtacccgcttaccgtattctcgcactgacgtttaccaacaaagccgcacgggagatgcagaaacgtattgccaccctcgtgggacaaggtaacgctgccaacttatggatgggaaccttccactccattttctccaaaattctacgggttgaggccgagcatctcgggtacacgtccaatttcacgatatatgattcacaggattcgaaaaacctgatcaagtctattgtcaaggacctgaaactggacgacaaggtgtacaaacccaacgacgtgctgggacgcatctccatggccaagaacaacctcgtcgtggcacaggcatacgcccaatcggcaaagatcacttctgccgaccaagcggccaagaaacccatgatctcggaaatatacaagtattatcaagcccgttgcaagcaaagcgacgtcatggatttcgacgacctcctattgcaaacgaatattctcttccgggattttccggagatactggaaaaataccagaagaagttcgactacatactcgtggacgagtatcaggacacgaactattcgcagtatcttatcatcaagaaactggcagaacagcataaaaacatctgcgtggtaggtgatgacgcgcaaagtatttattcattccggggagcccgcatcgaaaatatcttgaatttccgaaatgattacccgggctacaagttgtgcaagttggaacaaaattaccgttccacgaccaccatcgttgacgcggccaatagcatcatcagccggaacaaggaacaaattccgaaaaaaacattctcccagaacgaggaaggagataaaatccgggtaatgaaagccttatccgacaaggaagaaggtttccaagtggcacaggagatattccgtatctctcagaacgaacaagcggagttcaataatttcgctattctgtaccggacgaacgcccagtcccgtatcatggaagaggccttacgaaaaaggaatataccttataaaatatacggtggactttcattctaccaacgcaaggagatcaaagacttgatagcttacctgcgactgacgatcaaccagaatgacgaggaagccttaaaacgaatcatcaactatccgcggcgaggcatcggggacaccacgatcgacaagctgaaagaagtggcacaaaaatacaacgtgagtatctggacactactttgcaacttgaacaaagttccgggtatggtttctgccatgactgcagccaaactaactcattttaggcaactaatcgatggattcaccgagattgccaaagaagagaatgcatacgaaacaacttatcgagtggccaaagcatccggtatcatagaagacctttcttccgatgacacgccggaaggggtgtcccgccgagaaaacatacaggagttactgaatgcagtcaaagatttctgtgaaaccgcttacaaggaagggcgggatgacaaactccccgcatttttggaaggtgttgccctgttaaccgatcaggatagtgagaaaccggaagacaataataaggtgaccctaatgaccatccactccgcaaagggactggagtttgaaaacgtctttatcgtgggcatggaagaagaacttttccctgcccagcaaagtgcctattccccttccgctttggaagaagagagaaggttgttttacgtggcactgacccgtgcagagaaaagagtgatcatgacctattcctcttcccggtacaaaaatggtaacgtggtctatccgcaaccctcccggtttatcgcagaaatcgatccgcactacttggatggatttttcaccccggcccgtccctccatgggacgctcgttacacggtcccggaatacaggaaaaagtggcacgtcctaagattacccttcaacccaaggttgaagtgccggacattgacacctcgaaattggtacccatcaacggggaacagattattcccgacatggtgatctttcaccccaattttggcccgggaaaggtaatttccatagatggtttgggagtaaataaaaaggcaaaagtgatgttcccaaagcacggtcaaaaggttttattgttaaagtttgcaaaactttacgtgcaagggcatacaaattaatgacttataaacaaaaaatattatatttgcagcatattctaatttctaatagatgcgagggatagattattccggtattttaatgtgattttccggcgttttcccataaaataaaaaatttttaagaccaaaattatcctgtaatggactataatagccaaagaaaaaaacttattcttcccgaatatggaaggaatattcaaatgatggttgaccacctagcaacaataacagacagagacgagcgtacccgtgctgccaaaacagtaatcagcgtgatgggaaatctttacccgcaccttcgggacgttccggatttccgtcataaattgtgggatcacctgatgatcatgtcaaatttcacgctggacattgattctccctacccactcccggaaaaagatattctggaagaaaaaccggaaaagttaccgtataacaatcaccggatcaaatacaaacactatggtcttctcaccgagaaattaatcgagaaaatcaaagaaacagaagaccccgaaatcaaaagagtactcacggtgttaaccgccaaccacatgaaaaaatcattccttacgtggaataaagactccgtggaagacgatcaaatctacaacgacatcaatacattatacggtggcaatatcgaaatgccggaaggaatgatcctttctcactcgaaagacttgttgcagaagaaaaataccaaacccacgaataacaacaagcaacagaaaaacaataagaaacaattttacaaaaaacacaactaatagtagattttagattgcaaattttaaattgaatgttctttcaatctaaaatctaaaatcatcaaatctaaaattacttgggatgttggtaactttaatcttcgggggaaatcaaggggaccggaaagccttgatcggtgaggccataacggaaatgtcaagcatagggaagatcgaacgctgttcttccctttacgaaaccgccccgtggggattcgaatcatctgattctttttataatcaaattgttacttacgaaacaaatctacacccggaagaagttttggataaatgtcaggccacagaacaaaaactcggacgagttcgctccggtactcagttctgttcccgaaccatggatatagacattcttttctgtgattcccaaatcatcaacacgcctcgcctgacagttcctcatcccagactagcacaacgtaatttcgtacttgcccccctgaacgaaatcatgccggccttcattcatccggtcagtcacaaaaccattgccactcttctctcagaatgcacggacacgcttaaagcggagaagaaattttagagtaatgtagaatttaaaatttagaatgaaagaaagctactcccactggccccctttccactgggaggggagagacggatgcgagaatacgcttcaatgtaacagtgcagcgtgttctccccctgtgtaagggggagttagagggggtagttggaaaggtaaaagataaaagtaggaaatcaagaaacgttggccccgtgcggttggaatctaaaatctaaaattattacgttcttcctcagtcaacccgtctgatctccgcaccaatcgcattcaacttttcatcaatatgctcgtaaccgcggtcaatctggtcgatgttatcaatgacacttgtcccttgcgcagacaacgccgcgatcaacaaggcgattcccgcacgtatatccggcgacgtcatcttggtggcccgtagctgagattcatgattttgcccgataaccgtggcccgatgcggatcacaaagaataatcttcgcccccatgtcgattaatttgtccacgaagaacaaacggctctcgaacatcttctgatgaatcagcacactcccttttgcctgagtagcaacaacaaggaatacactcaataagtcgggcgtcaaccccggccaaggagcatcggcaattgtcaaaattgaaccatcaataaaatcttctatcatgtaatgttcctgacgaggaatatataaatcatccccacgttcctctacccggattcccaacttacggaacgcatccggaataatacctaactggggaatagcgacattcttaatcgtgatctccgagcgggtcaatgctgcaagtcctatgtaactacccacctcgatcatgtcgggtaaacaacgatgctgacaccccccaagactttcaaccccttcaatcgtcaacaaattggaagcaatccccgaaatccgggctcccatggcatttaacatcctgcataactgttgcacgtaaggctcgcaagcagcgttatagatcgtggtcaccccttccgccaacacggcagccatgataatattcgccgttccggtcaccgatgcctcatcaagtaacatataagtcccccgtaatttctgggcagaggccttgtaacatcccgaaatcgcatcatattcgaacgtggctcccaatttctcgaaaccaagaaaatgggtatctaaccgacgacgcccgattttatcccctcccggcttgggaaccaaaccgcaaccatgcatggccaacaacggtcccagaatcatgatcgacccgcgcaaactagccgctttactgtaaaaatcttctgtttccaagtaatcgaaatttatgtcgttcgcccggaaagaaaactcacctttttgaagtctctccaccttcactcccataccccgaagtagatcaatcaattttatcacatccaatatctccgggatattactgataaccacttcttccctagtcaacaaacaagcacagatcacctgtaatgcctcattctttgctccctggggaaccaactcgcctttcaatcgtctcccaccaataacttcaaatttgctcatgtcgtataattaaagagttacagttttcgctacaaacattttagccacgcatcgtaagggtaatatctatctcccgaaacgcaaccgaattctgcacgtaaaactatcaaaaaaacaaatgtcaacaaaataagtttacaaagtttgtaaaatagtgaatcgacaaaatcaattaaaattttgtatgaccggaattatatccatacatttgtaaacaagatttacaatataagccatattttgtatctctaaattttacccgagattattaataattttaaaacaacacataatgaaaagctttctgaaatacttgttagcgactattgtcggtattattatcgtacatgttatcctgtttttcgtgtttatcgggctcgtcggggccatagccagtttctccagtcccacgatcgagatcaaggacaacacgatactaaaactatcactgaagacagcgatcccggacagggcatcggagaacccatttcagaactttaacttgatgaccatgagcccagagaaacaaatcgggctaaataaaatacttgaatacattgacaacgccagcaaggattcccgcatcaaggggatttacctggatctgaccgagatcaactctaacttcggggctctcgccacgatcgacgagatccggaatgccctgttgagattcaagaaaagtggcaaattcatttacagctacaccaatctggggtactcccaaaagagctactacttagcgacagttgccgatagtgttttcgttaatcccgaaactccgctactattaaccggaatgagcgcaaacatatcgttctacaaagaccttttgaaaaaaatcggggtacaaccggaagtcattcgtgtcggtaaattcaaatcagccgtggaaccctacatcgaaacacacatgagtgatgccaaccgggaacaggtacagacctatttaagttctctttggggtaacatcgtgaaaggaatttccgccagcagaaatatcccggtagaaaagatcaatcaaatcaccgatgatttcaaaatctacccgacagaagaattcgtgaaagaaggattttttgatggaaccctttacgaaaacgccatgctcgacaaactgcgagaagcatgtggattaacagatgatgaaaaactatccctgacaagtttcgaagattacacgaaagccactttcccaagcgtgaactttgccgccgacaaaatcgcggtgatctatgcgcaagggaatatcgaattccaacagggaccggaaagtataggaccggaactggccacgaccatccgggaagcacgtgaagataaaaacatcaaagctatcgtgttacgtgtaaactccccgggaggtagcgcactgacttccgatattatctggaaagaggtacaactggccgcccagactaaaccgttcatcgcctccatgggtaacgtggccgcatccggagggtactacatatcctgtgcggcagacactatcgtggcagacccgacaaccctcacaggttccatcggtatattcggtttactattcagcggggagaaactgatcaaagataaactaggaatctcttccgacgtggtgaagaccaacgaacacagtgatttcggtggcggctacccgttacccatccctatcagtgatcgtcccttaacagactacgagcgcaacgtgatgcagacctacatcaaccggggatatgacaccttcctcgatcgggtaagccaaggacgccacatgaccaaagaggcggtaaacgaaatcgcacaaggacgggtgtggacaggagaggatgcgctgaaactcggattagttgacgtgttaggcggactcgaagatgccattgccatcgccgccaacaaagcaggtctgaacaattaccagatcaccgaactaccggttgaacgcagtcctttcgaagatattctgataaatttctcgcaaagcatcagaaccagcatattaaaatcagaactgggcgatttctatgatacttaccgggaacagaaagaattattaaaaataaaaggcatggtagccagaattccttacgatctcacgtttaattaaagcgaaatattgtgttgaaaaatctcattttatggcctttaagcgtactgtacggcatcggggtcagtattcgtaaccgtttgttcaacttgggcatactaaagatacgggagtttgacgttcccattatttgcgtgggaaatatcaccgtgggcggaacgggaaaaacccctcacacggaatccctgatcaacgagttgaaaaatgattaccgtgtagcctgtctcagccgggggtataaacgaaagacatctggtttcgtgctggcaacggaaaactccacggcaaacgacatcggggacgaacccatgcaaataaagaacaaattcccggaaatcacggtagccgtggatgcggatcgagtgcgtggcatcaagaaactcatgcaactcccggaaaaaccggaagtaatcatcttggatgacggttttcaacaccgctacgtgaaagcggacataaacatcatgctgatcgactataatcgtcctatctacgaggaccatttacttccccttggacgtctccgggaaagtattcacgccaaagacagggccaattatgtcatcgtgaccaaatgtcctgcgaacatctctcccatagagaaacggatcatcctgaaacacttgaatttaaaagcctaccaacagcttttgttcacttccatgagatacggggagcctcgttcgctggacgggaacagtcatcacgcggtaacgccgaaaacggccatactctgtgtcaccgggattgcccaaccggctccctacgtggaacatttaaaacagatgacagaccagatcgatcacatcacattcccggaccatcacaattacagtgacacggacataaaacatattctccaagagtacgataaaatcagctccacggacaaatgcatcttcaccacggaaaaagatgccgtccgcctcacgttatgcgatataccggaagagatcaagcgacagattttctatatcccgatcgaaccggaattcctgactccaagagatcaactcataaaaaatatatacgactatgttagacaagatacgagaaagtagcaaatacttggcccccttcgtgaaaggagaacacacaattggtattattctgggaacagggttgggagaactgggaaaatcaatcgagatcgaacacgcaatcccgtacatggcgattcctaatttccccgtttccacagtacaaggacatcggggagaattgcttatcgggtccttcgggggtaaaaaagtcattgctatgcagggacgttttcactattacgagggttattcaatgaaagaagtgaccttccccgtgagagtgatgcacgctctcggggtaaaaactcttttcgtttccaacgcggccgggggcgtgaacacgaattacttggttggtgacctgatgatcattcgggatcatatcaacctattcccggaacacccgctacggggtaaaaatatcgacgaactcggtccccgttttcccggaatggccgaggcatatagcaaacgcttaattcaactggcagaagaggccgggaataaattaaacattccattgcaaaaaggcgtgtacgccggactgcaagggccatccttcgaaactccggcagagtataactggattcgggttatcggaggagacgccgtgggaatgtccaccgtgccggaagtcatcgttgcccgtcacatgaacatggaatgtttcgggatgtcggttatcacgaacagcacggccagcgaggaactcataaaaacgaaccatgcagaagtacaggacgtgggcaaccacgctcaacctcgaatgggagctatattcaaagagattatcagtaaactataaattttccccctcacgtacagtgagggggactcgtatatatccctctatacactcttaggagtctcgttaatatgtaaattctacttcaagattttatccaccacaaaagaaccactttcccccattgacttcccgttgactttccgttaacttcccgttgacttactaacgagacaccagtgagacaccaatgcaatacacttgagatacccttctttagcctagaaaacacaagacacatttaaaaaagactcaacttcgacaattcaatcatgattttcgccgcaccccgggcatcacttaacgcctcgtggtgatttaatgcgatcccgaaatgatcacacaaagtattcaatttataattcggcaagcctttcaccaacttccgggacaaccggcaagtacaaaaagattcaggtaaacgggcatacagatccgcccgttccaaacaagctttcaacacgctcatatcaaaccccgcattgtgggcaaccaaagcctccgtatcaaagtaacgcccgatcacgccccacaaatcataaaacgaaggtgcatccttcaccatcacgggagtaatcccatgtatctcgataaacttcttgttaaaatagtaaggttccggcttaatcaagtgcgaaaactcttccgtgatctccccgtcctgcacgacaacaatcccgatagagcaagcactcgtcgggtaacggttagccgtctcgaaatctatggccgtgaaatcccgtaacatactaaaataatgacattacccactcgacgacaggcaccagtatcgccgttgtcactcccatcaaaccaattgccaaaccactaatagctccttccaacgcgcccaactccattgccctagcagtacccaacccgtgagccgcggcaccaagagataatccccgggcaatcttactatcaatgttcaacttgttcaacacgaaaggccccacgattcccccgaatatccccaccacgataacaattaccgccgcgatggcaggaatgccacccgctttctcggccacccccattgctatcggggtcgtcacggacttcggctccaatgtcgctatcaacacgtggtccgcccccatccaacgagcaatacaaatcacactcacgattcccaccaaactcccgacaaagatagaagtcatgatcgacaccgcattactcttcatgtattccacctgttcccacaacacgtagcccaaggccacgacagaaggtcccagcaggaaattaatcatccggctcccttgctggaaagattcatacggcatcccgatcacactcatcaccgccactaacgccggaatagaaactaacaaaggatgtaacagcgccaacttcgttttccggtatagccaaagcgcagccaagtataccccggctgccaacgttattacaaatatctctgacgaaataatagactgcattttcctacaaattaattcgttttaccatgtgcccgatgatcctcttgccattgctgcaaaaccgccaccacgatcaaaaccaacaaagtcgtcaccgtccccaccaccaacacgatgtcccagtaacgggacaatacatccatggacgtgataatccccactcccgccgggagaaagaaaaacgccatattatcacaaagaaaacgagccaccggacgcactctctccggtcggacccaacgcatggataatgccaaaaacaaaaacatcatccccaacacgctccccggcacaaaaccgttcaccaaccaagcgcaacattcacccagtaaataaaaagccataataataaaaattcctcctaacattccatctatatatttaacatgattcccgccccgaatcgtcccgtgtttccccggtcccctcgataagaaaaaaaacgatcatgatgacagacggtacaaattcccgccacttcaatacgaatatcctccacccccacttgccgtaattgacgacgattagcctcccacaaattcaacagatacttcccggcctgtttccccggttcgatcaatcccgtcaggtctcccaacccctcacgtgccgcctccacgacttcttccccgacctcaaaacaacagggtccgatagaaggtcctatcccgacaatcacatcccggggttcacatccaaactcctcccgcatccgctctacggtcttcgctgtaattcctcccaccgtacctcgccatcccgcatgaacagcagtaataacctgtacccggggatcgtacatcaaaacaggaacacaatcggcagcaagcaccatcagacaaacacccgtttctctcgtaatcaaagcatctgtcgaagataagcgagtcgctttctcccgtcctccccgaccacgttgcgaccgggtcacgacttctacgtgagtggtatgtttttgttctcccaaaataaaatcatccacaccacaaccaacagcctccgccagcaacatccggttagtcaacacccgttcatcccggtcctcatccatgaatcccaagttcaacgcggcttgcccgccgacactaacgccaccttcccttcccgacacgaaatgaattaatcccggaaaatcccgtaatcccaagaactggtagaacgtaactttatctctctcaaccctaatcatatttattcgttcttttgagcgcacaaagatacaacattccaaacaaaattgtcaacataaatcgtcttgtcacaaataaccataaaaaaataaacccccgttttgtttacacgtatcatcgataaaaaagaacgattatgtggcaagaactatgtaaaacccgcgaagaatacctcgaaagagcgaaactggacacgaaaggctattcgccccgacggtcggaaacgttactctacgagattgcccgcctagacggcatggacattaaaaaacaggactttttcaatatcctgaacgatattgagatctcacccaaagtaacacgagaagacacgcaccggataaaagacctgagcaacgcattcctttaccttgttaaatgtgcgcaacaacgcaaaaggttctcactcgacttcattcgggatgtcagcgcaaaagtgatgcaacacacgggcaaagaggtgtacacgacgatcggcggttacgatacctcgctgggcgatttccggctgggagaagagtactatgaagagggtatcctcgctaattatgcccagatcccggatatgctggaacaactgtgtaaagagacaaatgaaaagttggggaacgttcacgacatactgaccgtgaaacttgccgcagactttcactatcgtttcatgcacataaaacctttcggagccgggaatattaccgtcggcctcctgatgatgaactatatccagatgatgttcagggaaccgctcatcctcatcccgggagaagacaaggcaaaatatctcgctgccataaaaatgcagaaggacaccccaacgcccgaaacattcgaacgtttcgtgggtgaggaattactttcccagcttcgcaaagaagtcaccccgcggaaataatattatccatttcccaatgccggaagtatgttctgacaagcataaactccggcatcactttttaatccagaaacctccctccctactataactcgtgaatttcaatccttttcgccagacttttctcgctctcaattaaaaaagtctctgaaattctttgtgatttataatgaatcaactatctttgctgcccgttaaactaaggaacaattttaaaattatatacgaaatgaaaaagggcatacatcctgaaaattacagattagtagcgtttaaagatatgtctaatggaacgactacaatcaccaagtctactgctgcaacgaaggagactatcgagatcgacggagttgaatatccattagtaaagatggaaatctccaactcttcacacccgttctataccggtaaaattaaactgatcgacactgcaggacgtgttgacaagttcatgaaccgttacaagaaccacatggaaaacagaaagaaataatttttctgatataatacaaaaagaggagattctaagaatctcctctttttgtatggtcacaagttgcaggttgaaccttcggttatgcaagttacaggttaaaaatgtaatccttaacctataacttacctatttttatcgttcgggatcagcaaaaacatgctctataatccggcgatcaacatcatgaaacgtcttgttccggcgtttcatgacagcctcagccgtggaaacgaactgattcattttatgctccgtaaacccactggctccaccccatgagaaagaaggaacaaaattccgaggaaaatccgaaccgaaaatattggtccccacaccgatcactgttccggtgttaatcatggtggaaatacccagttttgcatggtcacccatgatcagaccgcagaattgaagtccggtccgacggaaatgcttggtctcgtaatcccataacttcacctccacgtaagtgttcttcagattagaattattcgttccggcaccaatgttacaccattcgcccagcacggaattcccgagaaaaccgtcatgcgccttattcgaatagccaatcatcacgacgttattgacctctcccccacatttgcaatacggcccgagagtcgttgccccgtacaccttggcccccatcgtcagtaccgaatgctcacacatggccaatgggccccgcaccaaaacaccttccataatctcggcatctttaccgatatacaccggaccaccctccgtgttaattaccgcacaacgtacaacagccccctcttcgacgaaaacgggatgttctccatacacctgcacgcaactattcaacgggacactctcacgtccttccgtgatcaaccggaaatcaacctccagttctcgggcattcagagaaaacaaatgataaggataaacaacacgggtaaacactcccatgtattctttacgtgtaaaatcgggtatcgtcactggatcaaaggttgcaacgtcctgtttacccattcgcacggcgatcagacaatcaccctgtaataacatctctccagcctgcaaagacttgatttcctgaatcaattcatcattcgggcataccgaactattgataagcaaattatcgtcttccacagacaacgggaacttttcctgaaggtaatctttggtcagatatgcaaccttatccccaaaccgcttttcccacttttcccggatcgtgagaattccaaccctcaattcagaaatcggacgagtaaaagtcaagggccttaaagtaccccaacttttatcatcaaacaaaattattttcattgtgtgttttatatttgcacacaaaagtaacaaatgcatcatatttcacaaaaaaaatctttggcataggaattgtcctattatgtagtggtttatttttcagcgcctttttgtcaaaatgtcagtttttggaacaaggctaaccacgggaaaaccggaaataaaccaaatgtggaaaagtttaaaacaatagagataaggagatcataatgaataaaatagatttaaaagatattttacaagaaaacttggcggacgataatcaagattatttatccatccttggagacgagaaggagatgctcaacgaccacacggatattcctgacactctgccaattttaccgctacggaacacagttctgttccccggtgtcataattcctataaatattggtagggaaaagtcactgaaactcatccggtacgtgtataaaagcagcgtacccttcggtgttattgcccagagagacaccaacacggaaaatcccaaactggaagacctatacacgataggtacagttgccaccgtcttgaagatattggaaatgccggatggaacaacgacggctatcatacaaggcaaaaagagattcgaacttgatgatatcctgtacgatgaaccctatcacgtgggaaaaatcattgttaaacaagaggacacgatcacggaagaagatcaagagtacaatgctatcggagaggctttaaaagacatggccttgaagattgtaaaatattccagcaacatcccgaacgaggcaggattcgctttgaaaaacatcgagagcatgttattcctgatcaatttcatttcttcgaacacggatattgactaccggaataaacaggaattactggaaattgacatcctgaaagaacgggcaactaaattactggaacttttgggcaaacaggtcaaaatactggaactcaaagaggacatccagaaaaaagtgaaagtcgatctggataaacagcaacgggaatacctactccaccagcagatgaagactattcagaacgaactgggaactaacccggtggatgaagatcttcaagaactggaagaggcagccaaaaagaagaagtggggaaagaacgtacaggaaatttttgaaaaggaacttcaaaaactaaaacgccaaaatccctccaccccggactattccgtgcaattcaattacgtgaaagaattgacagagttaccttgggaacattattccgaagacaatttcgacttgaagaaagcctccgagattctggatgccgatcattacggactggataaagtgaaagagcgaattctcgaatacctcgccgtactgaaactgaaaggagatatgaaatctccaattctatgcctgtacggccctccgggagtcggtaaaacctctttgggaaaatctgtcgcacgggcccttaaccgagagttcgtacgtatgtcattgggaggcttacacgatgaatccgaaatccggggacaccgtcgtacctatattggagccatgcccggacgaatcatccaaagtatcaagaaagccggcacgtcaaaccccgtgttcatactggacgagattgacaaagtaggtcaggatttccggggtgacccgcagtccgccctgttggaggttcttgatccggaacagaacacgaccttccatgataactaccttgatattgactatgatttatcgaaagtcatgtttatcgctacggcaaacgatatttcaacgattgcccccccactaagggatcgcatggaaatgatcgaagtaagcggttatctcatggaagaaaaaatagagattgccaaacggcatttgatacccagacaattggtgaatcacgggttaaaaacagaacaaatcgagttcacggatgatatattaaatttcatcatcgacaaatacacccgagaatcgggagtacggggattggataagactttggcaaagatcatgcgtcaagtggcaaagcacgtggctctggactcgtctttcacgattaaaccgacaaaaacaaccgtggaagaatacctaggtacccctatctttacccgggaagaataccaaggtaacgaattacccggagtggttaccggcttggcatggacagccgtgggcggtgaaattctttacgtggaatcgagtatcagcaagggcaaaggcgccctaaccatgacagggagcctcggtgatgtgatgaaagaatctgccaccttggcattagaatacattaaatcgcacgccgaagaactaggcatccagccctcagccgtggaagaacacaatatccacattcacgtgccggcaggtgccgtaccgaaggatggtccctcggcgggtatcaccatggtcacctcgttagcctcatcgctaaccggaagaaaggtaaagaaagccctcgccatgaccggagaaatcacgttgagaggtaaagttctccccgtgggaggcatccgggagaagatcctagctgccaaacgtgccggaatcaaagaaatcatcctttgcagggaaaacaaaaaagacattgacgagattaaaaaagaatatgtcaaaggcattaaattccacttcgttgaccacattcgggaagtattggacattgccttgatctaaaaggaatctacccattttgaagtgcatcttaaaaaacaagtttcatttttaagatgcacttcgttttttacccccctctcacatgataatactatctattttagac

SEQ ID NO: 31 - DNA, 17745 bp, Butyricimonas faecihominis
cctcaaaataatatttatatatttgcaggcgtcttggtgctttcatgttggaagaaaagggaatccggtgaaattccggggctgtccccgcagctgtaaagtcattgcccgtccgagagggcggatcttttcgttaggccactggtgataccgggaaggggaaaagatgacaagccagaaaacctgccatgagacgtgattaattaatactttcggaggaaaagaaatgaatgtagtgcgttttttttatcttttatgcttttgtagtgttctcttttgttgcaagtcgacttcacgcaaacagtcgtcgggagaacagaccgtgaaagagaaggtcgatacggtttcccggattcatattaagtatgctaaaggtttttggttggaggaacgtgaggggtacgtggtactgaacatcaaggacccgcaggagagtagtcatactcattaccagtacgctttggttccgcgtggatcgacggtgcagaccccaaaagatttaccggtggtggcgttgcccgtgcggagtgccatttgcatgacttcgttgcagctctccaatttcatcaagttgggggcgatggatcgggtggtgggaatcacgagtactcgtttcctgtttaacaaggatatgcaacggcaggtggacgaggggctaacccgtcgtatcggtatcgagggaaatttcgataacgaggtgattatgagtattaatcccgacctgatgttgatttccccgttcaaacgcggggggtatgatgccgtgaaagatattggaatcccgctggtgcctcatctcggttacaaggagatgacaccgctcggtcaggccgagtggatcaagtttgtcggcctattattggggatggaggacgtggcgaaccgggagttcgatcgaatcgagcaacgttataactctttgaaagcgatggtgggagaggtgaagtatcgtcccgttgtatttagcggggagttacgtgggggtgtttggtatgccgtgggaggaaagagctttttggcgcaattgttccatgatgcgggggcggattatttcttgaaggatgatccccgttccggtggtgtgacgcttgatttcgagaccgtgtacaatcaggcagagagtgccgattactggcggatagcgaatagctttgccggggagtattgttacgaggccctgaaggcgcaggacgagcgttacgcggacttcaaggcgttcaaggaaaaacacgtggtctattgtaatatgcgggaaaaaccgttctacgagagtatgcctgccgaaccggaagtcgtgctggcggatatgatacgggtgttccacccggaaatccttcctgatcatgaaccggtgtattatgatattttaaaaaagtgagccgatgaagagaggtaagtacacgatactcgtttttgcgatcacgatttccattctcgtgttcttgttgttaaacttgttgctgggttcagtggccatcccgtttcgtgcggtttggaatatcttgacgggaggcgagggagatccggtggcatggcagaatattatattgaaatcccgtcttccccaagcgttgaccgctttggtggcgggtgcgggactttcgataagcggtttgcagatgcagacgattttccgcaacccgttagcggggccgtccgtgttgggtatcagctcgggggcaagtctcggcgtggcgttcgtggtgttactttccggtcaactgggtggggtggcattaagtcgtctcggttttatcggggaggtagccctgtcgattgcggctatcgtgggagccttgtcggtgatggggctgatcgtgctggcatcccggaaagtggcggggagcgtgacattgttgattatcggggttatgatcgggtatatcgctaacgcggtgatcggggtgttgaagttttttagcgtggaagaggatattaaggcttacgtgatctggggattggggagctttgcccgggtttcgggtaaccagatgatgctgttcgtgacgatcatggccgtgattatcccgttatcgtttttgctgatcaagccgttgaatttgctgatgttgggtgatggttatgcccgtaatctggggttgaatatcaaccgggcccgggtgtgggtgattacctgtgcgggggtgttgacggcaatcgtgacggcgtattgcgggccgattattttccttgggttggcggtacctcacttgtgccgggcaattttccagacatccgatcaccgggtgctgatgccggcctcgatgctcgtcggggcatcgctggcattgctctgcaacttgattgcccgcttgccgggattcgagggtgcgctacccgtgaattccgtgacggcattggtgggggcgcccgtggtagcgtcggtgttgtttaggaagaggaaaaggcgagatgcggtggagttttagggattcagtgatttcgtgatttatgattttagatttacaactacccccaccagctcccccttgcatagggggtgagacgaacgaaagaagtcgcttttatgtttcaatgtagcgcattctccccctgtgtaagggggagttagagggggtagttaatacgttttcagttataacaagtatgaaacaggcaaccattcaattaaggaatctggcgatcgggtacaagggaaagaacgacacgaaggtggtggcgagcgatatttgcacggcgattaacggcggggaactgacctgtctgctgggggcaaacggggtaggaaaatccacgttgttgcgcacgctatccgctttccaacccaagttggagggagagattgatattatggggcgggagattggcacgtattccgacaaggagttgtcccgcacgattggcgtggtactgacggagaaatgcgatgtccggaacatgacagcccgggaactgatcgagatgggacgcgctccctacacgggtttctggggtacgttgcacggggaggatcgggagattgtcgaacgatcaatcgctctcgtgaagatcgaaaatctggcggatcgtatggttcacacgttaagtgatggcgaacgacaaaaagtgatgattgccaaagcgttggcacagcaaacgcccgtgattttccttgacgagccgacggcattccttgattttccaagtaaggtggaaatcatgcagttacttcaccagttgacccgggagaccggaaaaacgatattcctttcgacccatgatttggagctagccttgcagatcgccgacaaaatctggctcatggatcgccaacacggcatcacgatcggcacgccggaggatttggctcttgagggacatttgagcggtttcttcgctcgcaaaggaattgttttcgacatggaaaccggattgtttcgcgtggaaaaccagtattcatcccaagtgcggttagtgggccacggtcagaaatacgccatggtgcgtaaggcgttacagcgtaacggcatcttggcaaaccggaacgtggaatcgagcgtgtgggtagaaacgggagatttaacaacttccggtttccggatctgccgggaaggggaaaacgtgattgaagtggggacaatcgaggaactactggaacaattgaaaattgaaaattgaaaatgaaaaagactaccccctttggctcccccttgcacagggggagaaacgaacgcaagaaagcgcctcaatgtttcaatgtagtatgtcctccccctgtgcaagggggagttagagggggtagttggaaagattggagctaaaaactaaaaactaaaagataaaagttgaaaatctagaagggtgatttcgtgggtggaaatctaaaatgaataaacctgtaacttgctgagggcaaaaaaataaggcagatccttattcagatccgccttatttcttttgcggttatacactttcttggatttgtgtacccggttgatgttcaccgggtggagatgttctcggatctcctcgtcccgccgggcttttctcatggctttgaggtagtcggcccgggtaattttaaatttgcttttcatgcttcaattgttttaacgtgtttccagtcacgtgtttttcaagtacaaagatagcatttattttcgggattattccgtgtcgggaagtgtgatcgctttatcctcggaaaaggccgtgttatctgcgcgtgcaaagaatgggtggatacatacttcaccgtcgtcatcgcgaaggatgatttcgcatttcccgtctctacgggtagtcccggtttctttttcgagcgtgaaagtgtcgcggtaatctgcatagaatatacctaccatcatgcggtctgtcggggctgcggagggttcatcccgcggatcgtcccacgtgatggagacaagcgtgccgttccgtgtcgctcgtaggttgagggggagggcgagagggccaagactgacttgaaaaccttccatatcaagaattttccccttttcgtctaggtatttatagttggttgattgtatcaggttatcatcggtcatccctcgttgggccgcggcaatcttccagacgggtagatccccaaatctcttgcgaatgaaggcgaacatgtagcgggcaaaggtgaatttggtgttatttttcctttgtttcggtgttcgatcagggataatgttgccgttctcgtcttttcttatctttttcttgagagtaatgcgcttactcgggcaggcttgtaacttgccaagcctgtaataataggtgatgcctcccactcggaagcgttttttcggggttaacgaggtgccttctacttgcatgatgatgtttttagtgttttcgtgcgtgattcggagattcttaaactattcacttacttccctccggtccttcgctaatgtaaaaataatcatttaatttgatataaacaatacttatactgtataagtagtatatgaatagtagaagagcagtagaagagcagtagatagagtaaagagaggccaaagaagagccagcgaaggattggcgaagagctatcgttggctatgttcgggaactagcgtaatatctaggctggcgtgtggaagtagtggacggcagacggcgagacagcgatcaacaagtagggcgaaaaaggccggggtgtcggcaaaaagttcccaaagttcacgggcaagggttattccggcgatgcgggcaacgctttccggggagcagtggctttcacgggcgagggtggcgatgaagtcccggttcatgatgacgttgcggctatgcgtgtccagatgtccctcggcgagcttgacggctttaccgatcatgatgcccatcgtgaggtgggtgatgccttcctcttcggcaagacggagggtatctccgatatagttgccgtaatgtacgaaggcttgcggtgggaggtggggaaaacgggagcggagataattttcgctcttggctccggagttgataacgagttccgtgcatccaagggcccgggcaacttggatctctttgcgtatggagttgacaaaagcctcggaggagaagggacggacgatgccggaagtaccgatgatagagattcccccggtaataccgagtttgggattgaaggttttttgagcgagttcgctacctccgggtacggaaatgcggacggacacgccggacaacgtaccatgagtgcgaagcaaccgttcgatctcaccggtgatcatgcggcggggtgttgggttgatggcgggatcgccaacgggtatgccgatgccgggaagggtgaccgtaccgacgccttcgccgggcaggaatcgcactccgggaatgtctgtgagagagacggtggaaaaaatggtgtagccgttcgtgacatccgggtcgtctccggcatccttggtaaccccgcaggtgcaactatctttggtgagaacgcacgaactgacggggagcgttaccgtttctccatcgggaagggtaatcgtggcggagtgttgtggaattcgtgaaagaaggccttcgagggcagcacgggtggcggcggtggcacacgagccggtggtgaacccgctacggagagggtaaaaaccgggaaggaggcgttccacgcggtagcgcaagccatgttcaccgttcacgacgtagaaactgtcggggagcggcggacggcgaatgacgatgaccgggatgcccagttgccgggctgcggtgattttttcctcgtagtacccggattcaccgctttctttggtaaggatagccccgggacgtagctggcggaacagggttagttcgtcctgtccctcctgccagaaaaggaggttttccgcgggaaatcctgcccggtgggcgatctcccgggagttatcccggtcgaggacacggaaatggcagggatgtttttcccagtaacgttgtagtttggttatggtctggaccccggaaagggccaacagatcacgtatttcgtgagattcgaggtaatcaatggcgtcatcgaaggtgtcacaccacacgagcgattcgtctcgtggcggataacgacgttcgaggcgaatgacgggcagatccagttgttcggaaacggcagccacggtggtgtggagcaaagaggcgaagggatgggcggcgtcgatgatgaggtgtatgtcgtgtgtcgagcaaaattccgtcatggcgtcatgatccatgcctcccgctacccgggtcccatgtttacattcgatttgctgggcattgccacgggtggagtagtagtagggactacctgcctcatcgagtacttttaccgctgttcttccttctgttgttcctccgaaaatgagaatcatgacgttttaattttagatttaagattccagccacgcaaggccttgctaattttagattttaaattttagattccaatcgggattcgcctttggcgagttacaggtttcttttacttttatcttttagtttttatctttaaccttttcgactaccccctctaactcccccttacacagggggaggatgcgctacattgaaacattgatacgatttcttgcgttcgtttctccccctgtgcaagggggagccggtgggggtagttttttcattttcaattttcaattctccattttcaatttctaaacaggtgtttgaactggtgtgaatagagtttcgacaggccttgtcggttgtcgatggcgtcacccacgacgatcatggtggtgagggtgaggttattctctttcacgatcttcgccaagtcttgcaattctccccggtatatccgctcgtctttccacgtgagatggtagcaggcggcgacgggggtggttggcgggtagtgttgcatcagttcggattgcacttgatcaacgatagaggcactgagaaagatgcacattgtgctttgcgaacgggccagcaggtggagtttctctttttccggcatcggggtacgcccttctccgcgggtaagaatgattgtctgcactttttcggggatggtgaactgtgactgcaaggccgctgccgctgcaaggaaagaggatatacccggtgtgatgtggtaatccatgccgtattcgtcaaagaaagccatctgttcctgaatggctccgtagatgcaggggtccccggtgtgcaggcgcacgataaagaggccccggtcatagaattctttcatgagagcgaattgttcttcaagggtcatgtcggcagaactgcgcacggtggcaccgggtttggcgtagtacgtgagttccacggggacaagactgccggcgtagaggatgaggtcggcttgttcaaggaagtacttgcctttaacggagatcagttccggatctccggggccggccccgacgatctcgatgaatccccggcgttcgacagtacgattcatggcaacggcaaaagtaaagtcattgccctcactgagtttacctttctgtttttcaaggagcagacgggtattcccggtagatttcagggcggcggcctcggcgacgctgggggaagaagttacttcacgtactttctccgaggggttgggaacggagatgttccggagttcgtcgggcgagtacgagtccattgaaagtattaaactgtgagtaagaaggtcgacaacaggttcatcctttttgatgtcaatcgtcgcgaggttcgtgagactggtcggggagattcccgcctcgataagacgtgcggtgatgtattcccgtacacccgacgggtcacagttttcccgacacccaaaaccgagggaaagcacgtgtgggcgatagtagagggttgggataacgacggggtagatgaaggggctgacgatgagcagggcctcgtaacgattctggtctatttcctgaaaggagttgtaaatgtcgacgtgaggcggtgcggtacgttcgaggttccgggttccgctatcttggatgtctaggagtagggccacgggacggcggttgacgaacttgtagatgatttcattcatcggcccgacgggttccgggatccatccctcgaacctttcgtgaatggtgtcgagggcccagaggtcgttgttgtcgctttgggtggtgatgacggggacggctccgagtatggcagcgagccgacgagtaagggcattggccccaccgacgtgaccggagaggacagaaatggcgttcctacccatggagtcgatgcagacgacggcggggtccgtgtacttggattgcgtgcaaggggcgatggcccggacacagatgccgagagcgccgataaagacgagaccttcgtagcgggtaaagttggtggcgatgaaggccgggatggagtcgatggaggtacagggatttgcctctccttcgcctgcgtagaatagttctgttccgggaagttcccggtgtatggtaagggctggtgccagtccttgacgggaggctatgatgatggctatttttttcatgggattatattttttgtgctttcatgattaatatggggttgtggtcatcgatggccacgtgttgggtgctgacgagagtgaagccgtgttgtttgacggtttcggcgaataattcctgactttgcttagagacggaattgaagacgataattccgtccgggagcaggtgttcgctgactttccggacgatttgatccatgtggccgccgtggccgccgatgaatacggcgtcgggggcgggaaggtcgtctagttcagcctgcaggaagtctccgatgcgggtgatgatgccgggcgtcccgaaacgggcagcgttgagttccatgaggcgcttgccctcggggcgttgctcgaaagccacgacgtgcaggtgagggaactggagtttcgcctcgatggagacggaacccgtgcagaacccgatgtcccacagggtttgatggcgacgaagatccagttgtgccagcgtgagcaggcggatcggtgctttcgtgatcatgttgacacgtccgtcgagcagttcgaagtcgctttcgggaatgccgaaatgccgctgacgctcgtacgtgcggtagagaatgaggcagttcgggtggcggaaggtgagggccgtggcatcatcgggaacgaggacgcggacggtttcggtgtcactgccgagggcttcaccgacgtacatgatgtagttgtcatacccgtaacggagcatacgttcggcgatggtggtcggcgtgtgttcccggtcggtaagcacgccgattttctcctgtccctcgatgagtgctcggtcgaactcgtgccacggtctcccggtgagggaaacgacgtgcatatcatggtaggggagcaggaggcggtgagccagtgtctgcaaggagttgaacgtgggaatcagggtgatcttggcgtcggggagacgtttgagtacggtgttggcgaaaccgaaaaagagtgggtccccggaggcgaaaacaacgatgtccgggtggttctcgtattggcggaacacctcgtccagcgggacggtgatgtcgatccagaggtgggcctccggcaggttgtcacgcatgatctcgtggtgccttttccccccggaaaaaacgtgatgggtggcgatggccgcccgggcctgttccggtaattcgggatgatccttgtcatctataccgatgattgtgaagttattcattttagatttaataattttagatttaactctctcccggttccgccgtactccctctataaacagagggagagttggattactcaccatcttcgggaatggttaccagctcctcctctgtttatagaggaggtggcagcgtggctgacggaggagtttgttgcgttccttcagtcagtgctatccttatcgtttcgagtatattttccggttgttcaaaaattagcttgttttcaaaacggagagtacggattccatgtttttgccaaagagattctgtccggcgttcatcattatatccgccatcgggagtgaaatgacttgccccgtctaattcaatgcaaagtcgggccgccgggcaatagaaatcgagaatataggtttcgatactaaattgtctacgccatcttaaattatttatttgtcgtcccttgaggaatttccaaagagtcgcttccgctggtgttccgtgctggtgtagttccctacgaatgtcccgttgttttttcgtgttgtgggtaatttttgggtttgtcatggtttatcttttatgttgaactccctcccccttcgggtactccctctataaacagagggagagctgggttactcactggcttcgggaaattttcaattttcaattctccattttcaattcctcaaaggtctcttcccggtcgtagctgtgcggcgtcatcgaaacaaaggatggcgttgacgagggtggcggcgaggttactacctcccttgcgcccctcgatgacgagcttgggtagacgggtgaaagatttcagcatatgtttggattcccgaacgttgacaaaaccgacgggcgcaccgataacaccgatcggatgggccttatcctgacgcatgagcttgcatagttccatgagggccgtgggggcattaccgaaaacgtagagtgcttcgggatgttcttccacggcaaggcgtatgccggcttgtgtgcgggtgattttgagacgggatgccatttctgccacgcgaggatcgtcgaggtagcatttgacttcaatgccgagacgttcgagggctcccttgcggattccggaggctgccatggtgacgtcggttactatcatgcgtaccttgccatcgtgcagggcagtatggagtgtttccacggcgtcattgtcggtgtagagaatgttctccatgtcgaagtcggcagtggtgtggatggcgtgtaacaacgcccatttacggccgagggggatgtttttgtcccttaattcggattcgatagtgcggaaactgcgcatcatgatttcctgcccgataccaacgttttcggtacattgttcccggtagtaaccgcggggagtgatgatcttgtcattccacgtgtaggactgagagtttccgatgattacaatcgtgaacatatcgatctcttccgggttgaaatcatgtagtgtcgtgatcttgacttcttgttcttcacgtccggcttggcggatgtagccgacaggggtttccggttcgcggtatttgagaaatagttctttcaggcgatagagttgccagtagcgtccctcgcttttggggttgtagacggcagtcacgaaatcggcagatgcggcggcttctatgcgacgctcgatcttttcccacggggtcatgaggtcggagagggagatgatgcaaaagtcatgcccgataggggctcccagtaatgcggctcctttctggaaggcgctgatcccgggaagaatttctacctcaacatcactcgctttatcccgtttcatttcaagaacgaggggtgccatcccgtatattccggcatctccggagctgacaacacagacggtgtgtccttgttcggcatactcgaaggcaagggctgcccggtctttctcttttttcatcccggtatcgatgcactccgtttcggggcggacgatggatcggatgaagttaaagtaatatttgtaacccaccacgacgtccgattgcatgatggctgtccgtacggctggggtaatgtcttcctcgctacccggcccaatgccggcgacatatatttttccgtgtttcataaataaagacgttatttcgagcaaagttacgatttagtttgtaaagtttataaggtttgtaaagtttataaagtgacgggcgtccttcggacggagttttgggctgtccaagaagtcattttatatcaaaaaactcctccgtcacttcgtgccacctcctctataaacagaggaggagctggtgactttccctgaagacagggagtatttcaactctccctctgtttatagagggagtaccccgaaggggggagggagtttgaaaaatgactttttggacagcccaaaaaaggtacctgcgggggacactactttatgaaccttataaactttacgaactttataaacctgtttttgaggtatttcaccgaaagtacgattcccgtgaaggagacaacagcaccgccaaggagaagggtccaaatgaccacggtccatagtgcggggcgctcgacgagaaatttgatgtcaagggtgtgaagaccacggtaaagccagcgtttccagcgtccgttggtgtcgtagtgaacgggacggaaagattcaaggttatagtaataacagtccttcgccttgttgtcgaacgtgaccttgtagacagggagcggtagaggacgacgacgggatatatagtagttgtcgtactcgttcatcttggtgatggagtaggtggttgagtccccggcgaggcgtttgacggcagcgaggatcatctcttccgtgatgcggaaaggacgaatcgtgtcagtggaggcgtctaaggtcacttccttgctgaccgtgcggagacgatagaggggaataccttggtagtgggtccactcgatggttttgacaggatcatccggagtagcggtgagggtaatggcttttcgatagtccaaggcatagtcggtaggtgacggggcttgtctttcagccgggctttggcggaatccgcgggagtcctgtttgccgaagagccacgaaggaagcggagccatggacatataaccgctcagtatccacgtgaagacaaatataccgaagaagaaacccgtgatgtggtgccacttgaaccatcgcttcttgtacggggagcgaagaaagcctttccggcgagcgagccagtaggaacgtatgccgagaacgaatccggtaaaacacatgaacattccgagataacatgcccagtacatgaattgtgtccaaagattctggttttcccggataacggtgaaatacacccaatggggaatggctccaaaccatgcccagaaacgattgtcggaatcggtaaactgcaggatattggcggttcgggaagagacgtaaagctggtatttttccggaccgtcgaagtagaatttgtagatgggaaattcccgcttgtaatgggcgagggggatccattggtcgagggcgtacagggtatccacccgggtaatctttcgatcggcacaccagcgagcagcccggttttcacagagtgcgtagttaataacgggagccacgacattcgtgtccgcgtataactcaacgctttgacgtcctccccctatactgaatacgggatctccataagggttgttcagggagagtccgcgggttggcgttttggccgggaggcggagtaacacgtcttggatggcgggcaagccattcgtatcaagaatttccgcacgagtgaaccgatcttcttggcttacacggggaaaggagtggtagatcatcacgattccggatatgaaccatgaaaagcacaggatacagagaattaaccccagtatccggtggatatggataaacaatttggttaacatgggcgggttagtctatatcgtctgttttctcgtatttctttttcttcacggtgatgtcttcccgttggtgtttggtggcgaatttcacgtgttggatgaaaagttcctgtatggcgggatattctcccagtcctttgagcaggacgtttactttatagcctttcttttccagttcgtctttccagtccccggcgatgtcattcttggcatggtctccggccacgaacatgaagggtatcaaggtcacttcttttgccttattcgcttcgagttcgcggattacatcatccatcgtggggtaaccttcgatcgttcccacgtggtagttcttgtgtccttgagctttcatcacgtagtcgagcatcccgtaggttgagtttgccgggtggtaggtcccgtggcatacgaagacgcaatcccctttttccttgtccttgattgatgcggcaatcgcttttaccacggcttggtaatcctcgggagaatgaagaagagctgtccctaagcgaatgtctttgaacttcgtttggtatgatgcaacttctttttgcagggcttccatttcaattccttcgatgatgttcgtgggttgaaggatcaagtgggtataaccgtcggcaatcagtttgtccatggcctcggtcggattcagtttgaccatacctttctctttgaggcggcgcatgatcatgcgggaagtgtaggcttcacggacttccactccggggaatgtttgtgacacttttttgttaatggcctcgatggtcaaggctcgggtgtcatcgtgagttgtaccgaagtgaaccatgagaatggctactttgtcattaggaccaagagtcttgaatatatcggaatgtttgaaaccacctccaccgtgggcaaatgtgaacagacttgtcaataaaagtagagctgtaaatatgtttttcatgatgtttgtttatttggtgaaacgaataatgagactggcaaatagtgtgcgtccggggtttagcgtggcatagtttaccccgctggggcgatcgtccgtccagtcaaagatgttgtcaatcccggcgttgatttcgaacaggaagttacccacgggagcgaaggtgtgggtggtcgccaagttccagagctggtacttgggggcgctgacgtcggtgtaaatgtctttcccggttgttttgtccgtggtctttttgtagatgtattttgaaccttgcattctcccgttgatgttggcccgtagtttgtacttgttccattcatggctccacccggcccggaaggttgccgcgtggcgtaccgattcgctcaggcggcgtccggaatcatcggcggcatacacgcagttgtaggatccggcggcagaaaacccggcacccaagtagctattgatcgtgacatcgaagcctttgatactggctttgtcgaggttgtggtacacgttccgggtttttatcccgttcgctttatcctcgtcggtaaccccaacgtcgtatttctcgatgatgtctttcacgtcgttgatgtacccgttgacagagacattcagatatttcccggcatattccacgttgatgttgtagtagtttgctttttccggtttcaggtctgggttcccgatggtgatagccccgcgggcttcgtaatcgtaatatagttcttgtatgctgggggttttaaaaccggcggcgtaggatgttctgaaattgaaggagccgagggtgtacatcaaggctattttcggggtaaagcggttcttaaacatctcgttgtacacgtagcggaatcccggcaaaatttgcaggtttttccagaggcgaatctcgtcttgcgcgtacagggccagcgtgtagatctcttccggttcttcgaggtttccggggtttttcatgtagtcgttcgtgtactcggtacctgcggaaattttgttgtatgagcctagtttaaacacgcctttcaggttcccgttgtagtatttctggcgtttcgtcaattcctcgtccccgatgcggaaggtcgtgtcttttttactgacctgtgccacggtgtacagtttgttgtattcgtagttgtccatgtagaggtccagtgcgatgtaatcggtggagtttagctggtagcgtccgcccacgccgatgttgtagtccatgtaggttaggtcataggtgtagcccccgtcatctttcttctcctgcacgggacggtttacttcccggtcaaaatatcccccttgggcgtacaggcttaggcttttcaccggggcgtaggtgaagcgttgattgacaatgttggaatggaacttgctggaagcttctcttctcgtgagtatggctgtgtccccgtcaatctcgtaagggcttaattgccagcctcccatctgtctcctttggtaggaggtggaagaggtgaatttaccaaagtgtaggtctatgctggcattttgcgagaagctggattctcccccgaaacgggtcttggattgcacgctgatcgggtctttcggttgttccgtgatgatgttgattaccccggcaatagcgtcggaaccatagagtgcggatgccgctcctttcagtatttcgatacgcttgacccggctcatgtcaatacgggagaggtcggtgttgttggacacgtccccggccacttttttgccgtcgacaaggatgaggatgtatttgttactcatgccgttcagcgtgaagtaggaacccatgacggtgggacgtatgttgaatgaaggattcagtaacaggagggcatcttcgaaggagttcacgcccgcacttttcaagtcagtaccgctgatgacctcgatgggtacgggagaatctttcaaacggcggtgtgttcccgttcccgtgacgacaacttgattcaggtttaccggggtggccgtgagccggaatagaatgtcgtttttgttgctgttgacttttatcgaggcaacttcgtagcctgaatagcttgcccgtagcgtgtacgtgccatccggaatattttctagaatgaactcccctttgttgttggtggcaatccctatgcttgttccgaccagacgaacgtttgcaccgatgagggcttttccactctttgcatctgtgacttttccttttaatgtgatctctgcaaacgaggtacttaccaaggctaacatgaatatcatgcctagcattacaattctcttcattagatgatgatgttttaaatgtttataatagtattcctgaccccgagaatacgctattacctatgtttgtcttggcaggtctcctgactacgcctaagaaaaataccttcccatccgtgtggacagtggtgtaagaatctttctttgaatctccttatccggagaaacgggcatcacagtagcgggcactgttccggattctaaccggcttccctcttgtgtgttaattgggcatcaacacatcacctaagacgagacaaatgtatataattttttataaaaggttgttgccggatgaaaaaaatgtattactttcgcaccaagttttggtgcggaaccttcggtcatggaggtaacgcttaatagggaacccggtgtgaatccgggactgtacccgcagctgtaagttcctttacaagggattttgtacttcaaatgtcactggttataaactgggaaggcaacaaaatccggaacaagtcagaagacctgccgaacaagataaaccatagctttcgggaaaaaaagcgagagggaaaaagacggattttaccttagactcatgttgcccaaaagactatgttaataatgctttattc

SEQ ID NO: 32 - DNA, 17243 bp, Butyricimonas faecihominis
tttattttttattgtaacacaaagctaaggattaaaactcagacctatatcacgtaaaaaaggttttaagatagatttaatacaaccccttactttttatccacgaccacccggaaaccatcatccaaacgcagaaggccgctaaacgtactaccgtcctcatttttaaagccattcaacgctcccgttttccctttcaacaccaaagtctcgacttgcttctgtgttaattttttcccaaaaaattccatggggataataaaatcacaagatttccgatacaggctacacccccaagccgcccgtcccttgataatctcgccgttcccgcatttcggacatttcaacacgacgggttctgcgggagctttctccttcttcgaggctttcttctctttcggggtagattctttttccgcctcttctgccacctccacggtgatcgctttccggggagaacacttcaccacgtgtaccaactcgttcaccatcaccttcaactcctccataaaatccgacacgttgtaagtcccctcctcgatcatccgcaactttttctcccattgtccggtcaactcggccgacttcaacaagtcattctggatcgtatcaatcagttcaacgcccgtggctgttgccaccaaccgctttttatccttccggatataccctcttttcaataacgtctcgataatccccgcccgggtagacggacgtcctatcccgttctccttcatcaaatcccggagttcctcgtcttccacctgttttccggcagtctccatcgcccgcagcaaatccgcctccgtgtaatacttcggcggctgcgtctccttctcctgcaattcgggcgtgtgcggccccttttccccgacctcgtacacaggcaacacgttctcatcactctgtttgttcgatgccgcgggaaaaactacccgccaagccgggtcaataatctgttttccggttgccttgaactcgttcacccccacctgagccataaccgtcgtgttcgcaatctcgcaatccggatagaacaccgcgataaaccgtcgggccaccaaatcatacacccgcttttcatccggggtcatatcataactaaaaactcctgtcggaataatggcatggtgatccgtgattttcttgtcattgaacaccttcggagactttcgtatcttactcccgttaataatcgggtcgatcaacgtgacgtatggtttcagccccttcaaaatcccgggaactttgggatatatatcattcggtaagaaattcgtatctacacggggataagttgtcaactttttctcgtacaacgactggatgattttcaaagtcgtgtccgccgagaaagcaaacttccggttacactccacctgcaacaacgtcaggtcgaacagtttcggagggtgttccatggcctttttgcgttccacgctcttgatttccaactctaaaggtagaatctcctgcatgaaagcctcagcctcctcctttaccgtgaaacgtcctttcgtgtaagagaaccagcctccccggtaatccgtccgtacttcccagtaagtttccggtttgaattgctcgattgctttctgccgatcgacaatcagagccaacgtcggggtctgcacccgcccgatcgacaacacgttcttcccgttcccgtagcgcaacgtgtaagccctcgtggcattcatccccaacagccagtccccgatcgcccgggctgccccggcagcgtatagcgtgtcaaaatccttcgacgacatcaacttggcaaacccgtcccggatcgcctcttccgtcaacgaagaaatccacaaccgcatcaccggagccttgcacttcgccttcgtaagcacccagcgctggatcaactccccttcctgccccgcatcaccacaattaatcaccatctccgcccgattgaacaactcctctataatggcaaactgccgtttgattccctcgtcatcaatcaacttgatacggaacgaggacggaatcatcggcaacatactcaaattccactgcctccacttctccgtgtactcgtgcggttcctgcaacgaacaaagatgcccgaatgtccacgtcacacaatagtcattcccctcgaaataaccattccgacgtactttggctcccagaacctccgcgatctccttcgccacactcggcttttccgctatacaaacacgcatcgattaattttagatttaatgattttagaccaaactccctcccccttcgggtactccctctataaacagagggagagttgaattactcaccgtcttcgggaagagtcaccagctcctcctctgtttatagaggaggtgtcagcaagctgacggaggaattcattttcaattctccattttcaattttcaattatttaaaagctcaactgaatcctcccctgtatcatactaaacgtctgcttcccatctatcggtgcatgtttatccaagcacaccaagctataactcattttcgctgccacatacttgttgaaataatagatacccccaatcgagaaatcattctgttttcctcccataattccggcatccttatcgttcatgtcggtgatattatagcgacacagaatttccaagctcttcgcccccggagccgtggccataccactcgttttattataaccataacggccattcagtaaggcataccccacttgcgcgtaccaaccgtcaccgttataattctcaaccgacgctttacgattcacgtgagccatcaggtattcactctggaaataccacctgtcaagcaccatcaccacctcggccccgaatttccattcattaattgcctcggtcacctctgccttcaaaaacttctcgggaatcaaattcgaaggagccccggccgaataagtcaacgtgttctcttctgcctctccctgcactccaaaccgagaagaaaccccgacatgaatcacgtccttctcctttgaataaggacggtacaacactctccccgacaacgcgtacccttcatcccctttctccgtgttgtcaatatctttatcgctgaacacgcctcccgacacgttcaacacgtcgcaattatacgtgtaactgattcccagccgccgacgatccccgaaagcaatcccggtcacggctgccccgttaaacttcatatcagacgtcccgatccggtactccaaactgaacggttcgaaataatggcccacccggaacagattcttcccgtcattatactcgatataaatatctttcatcgacaccttactcttggcaaaccccatctcgatcttcccggtccacctttctaggaaacgaatcaccgtccccatgcggacatcatatacctcaaccgcatttcccaaagacgttttatcactaaaaaacacccctccgtcaaataacgcccgaccaatcaaacgagcctcaaaatctcccttctccgacttcaacgtcaactgcgccgaagcactcattccacaaaccaatagcatcaaaatcaatagcgtatgcctcatcatcaatagtttaaggattaatttaattgtatagaattagaataccctgcaaaaatacaaaaaaatcaacaattcatagatttcttcctcacaagagatttaatcacatcatccagtaatcaaactctacatatcttctaaagataagcctttgtactctaccgtaaacttagaaaattttttcacgatgttttttgatttctcttcaaggatgggtaagctaattcgcttaggatttctcttgatctcacaaaaaacaatacgtttttcaaactcattcacagcaacaatgtctatttcatcttctcctttattattccaatagccttgaatatccgagtactccatagagtcaatcatttttgcccggaaatatttttctaatataatcccgctgaatgtatcataatccctttccattatgttacgcacatagtccaagttgccaatctcaatggcactacgatatttataaataaaacggaaccaaagatttaagaaattatcttcaatcagatatttattgttacggctaccctctttagcaccgaaggggcgtaccctcttgataatattatactccttttcaagtttatctaaataaccaccaacaggcatttctaaaatgctctccatttcgccacgttctgttttggaagaagctattaaagaaaggatagaaaaataattaccataatctttgccaaactcatctattaaaacatctttaccctcattcagaaaataagaattttccttgaatatggcgtccagaatcctagttttggttaaggcctgaaattgaaccagttgttctatgtatttagccacaccacctgtagccatataaaaagcaagtaaatcatcgggcttataatcggggttgtgatctgccaatatctctttgatagttgcgatgtcaaacggcttaatggtcatttttgatgtggctctaccaaacaatggctcttttgaattctcaaaaattcttttcatcattgaatatatcgaaccacagaggaccaagttcatatggccttgatccttgtaagtgtcccaaatattctgcatatcactgaatacggacttatttagactggtaaactcttgaaattcgtcaataatcaacgtgaaatttctttcacttgatagcaccataattgccttgaatagagatgcaaaattctggaaacgtcccaaagccactcctaacttatcttcaacttcacgagtaaattcttcacataacagcacctcatttttctttgctacaaagaaatacaataccgactttttctcaaatgcacgtttaagaagagttgttttgccaacacgtcttctacctaccattatagtcatctgagatgacttggaagagttctgctctatttcttttaaggtagctatttctttctgtctattataaaatttcataagctgttaaatttgtgttatcgcaaccgctgttacagtaacagcggttgcgataacacaaatttaacagctttcattaaaacaaccaaacaattataagaatatctattgtttcaaccatcacatacttgtagctttcggaaccacccgactcgttctctcattttttatctttatctttacccctcgaaccaaaataatgaaatatggaacaagcaattatcgatcaaaccataaaagccttggaaagaaaccatttcgaagtttacttcgccaacaaccggcaagaggctagagacattttctttcaagaaatttttgacaagataaaaccgaccactatttcatggggagactccgaaacgatgaaagccacgggaattctttccgagatcgagcaacgaccggaatgcattctcatccggacttttcaagacggttacagccgggcccagaaaacatactggcgccgccaagccctcctcgccgatttattcgtcacgggtactaatgccctcacccgccaagggcaacttgtcaacgtggacatggtaggtaaccgggtagcaggcatcaccttcgggccggaacacgtcattctgttcatcggtaccaacaaaatcacggatgacatcgagcaagccatggagcgtattcgcacgatagctgccccactcaacgccattcgccaccctcacttgcataccccttgccaaacgacaagaacctgcatgaattgtcaaagtgccgaccgcctgtgcaacacgtggaccatcacggaaaaatcactcccccaaaaacgaatcaaaattatccttatcaacgaatcattaggcttataaatgctgaaaaaaacaaatttccaaatcacgaatcataattcgactaaatcccgtttttctctaattatatttcgtaacatcaaaaaaaaacataacgagtatcacagattttactaagtttgtacccgaatttataggcttataatcatgaaagattacgcatttgaaatagagatgaaagtacgggactacgaatgtgacctgcaaggcgtggtcaataattccaactatcaacactacatggaacacgcccgtcacgaatttttggaaaccaccggaaccagtttttccgccctgcacgaccaaggcatcgacgtaatggtctcccgcatcgacatttcctacaaacactcccttcgcggcagcgaccgctttgtcgtccaagttgcctaccaaagagaaggtatcaagctggtattcttcgaggacatctacaaactccccgaaaacattctatgcgccaaaggacgaatcgaggccatttgcctgcaaaacggtaaacttacccgaggcgaactgttcgaaaccatcttcattaacaaaattgaaaagaaacaagaatagtgccgacgggacaacgtttttgtcagcaacttgaaacgtccgagaggtatcatacccctaggaaaaggctggcatttccctatctaacccctatcctcgattctaacttgttaatcattctatttatagttcatttagaccacgaagcattcatcctgcattcatagagcattcaccttcgataaacatggatggtaactgccccctgcatatatccgacttataaaatcgtatgaattaaaagacacgtaacttattatacagtaatcaccaaagatagcgtaaatagagaggaagtatatcataccccgagcgaagtccccgatgaagtagagaataaacccaaataaagaagtaatctaacccaaataataccccttccccagagcttattcagagcttactcgtggctcacacaacacgctatgcagcagctctgaataaatttcgagggatcatcgaaagagtgggattattaccttcctatttcccttacttctcttttggttctccccgataccccaaaatcacacaatccattcacacacatcagccctagttttcatcccctttaactagggtaataatctcccccgtccctttcactaccctttcatcgccctttcgcgatagacaaacaaggaccgggaaagaggtttgcaagcagtattggagattattacccataaaaaacggttacattacccgggcagaacggtaaccgattaaagtcattgtcacaaataaaaagggagggtgtgtcaaaagtcctgcttgtatttaccaactacccccaccagcccccccttacacagggggagttagagggggtagttgtgtaaattgactttctagacaacacctgtttcagcagaatccgcctactaaacacccacacgttccatcatctaggtttatacgcaatactcttcaccttgcacaacccctcccacttcgagcctttctcctccttgatcacaatatcatccacatcatccacaatcgcatatttcctgatctcaccgccagtcgatgccggtttcgccggattatacaacgctatatagaaataatcctttgaagtctctaccaagatgtccgataaaaacaaggtaatctcgtaaccatcaaacgttttcaacagttcacacttcctcctcgcgaaatcgtaaccatacagtttattccccatggtatagtaaatcacggataacatattacttgtcccgaaaaactccgccttatccaagtcgatcacgttatccatttttaccattaattgttttattataccgaaactataggaaatccggtaactatacaaataaaaatcacttccatcccttaatatcgtgtaagtcgaacccgaacctttatgacaattcagtgttgtcacgtactcgtattccggtttccaagagaaaggatcccccacccgatcagacatatccgcacagtagccaacaggagtaccgtaaccactttcttgatacacgaaacgcccatcccgcttattatacaacacggtagcatatccccgttctttcacgctatatccgattttatcccccaccgggaagagatcataattacccttgtaatgattacttggggatccaaagaaacaagcctgttggccacccaattccgtataatacaaattaccatccacaagggcagcacggtaatatcccataatctgtacagcctcggtcatcacgcactctccggcagccgatacatcataaaaagaccatttcaaatgtgccccctcaatgggcaacagggttgaagtactaagcctgtaagtacctttatccgtcccgacatgaatataattcaatgcagcggcagggcgatagggaggaacaaaaatgcaagtcggcttaccccattcctgcaaatcaacctcttgtaaaatatttttcaacaaagtcgtgtcctctcctcccgttgataccatatcaagctgggttcgcccgtcatctccttcccccagcacaagccatcctcgcgaaaacaaggttgacaattgcaaacttaaacttgaaatcgtggttaatcccgtggacttatcctgaattttaaaataaacactatagctctgggaaggcaaagtaatcggataaaccaaatccttctcttttcccagcgtatattgtcccccgatcgtcggatcgccgcccacggccacccattcatactcataattatcgggatcatggttaacggttgttgaaatttcaggaaaaactcgcaacgtatccacgaaagaatacatacgtaacaccgtgtctccaaaaaagtcatgtttcacggtgatctcgttaatcgcacgataggaataatttcccttgtcatcatagcaactttcaaacagaaaaattcccagtaatccgatcagaaaaatcttatatatcattctcataacatttcatttaaaaataaatcatatcagaggccccatcgtcatctcaaactcgttacccgcggcatctttatccatcaccgtacgtcctgccgctttttcctctttcagatagcgatcaaaattctgggccaatgtttgcgacctgttcaagttcatagtcttgtaatcttcaaaatcctgcatcgttagaccaagcaccacgcataccagcttgaatttcgtgggagaaaacgttccccaataattcgcagcccattgcttgggtacaaccacttgatcatttatcccgatcacatgaacgagcggattaacaactttatccgttgaaccatatatgcttccgaaaggaatccaccttttcaacggcaatttaaaatccacactctcctccagccgcacggtcaagtaaatcatcgtgtcaggattttgcattaatttttccgtccacacgatccgacaagggacttccgcctgtctctccccggcttttaccacttggctattctcgaacggctcgtaatcttcccccgcctttgccgtcgtgagagtatctaccacccgaatcgtgaaataacggtcgtgatcaaccacgtctccggtaatcctcactcggatcggtaacacggtatccttggccgtgaacatcgcgaaagggatcaaagtggtatccacgtattcatactgttccggatcaccatacccggaagccggaggtttctgcatcataaaataaataccgctctccccctcgtatcccatcatctctgtctcgcaagcgcacaaccacgttgccagaccaatgatcaatatggctatatatcttcgtttcataatctcattcgtttaattctttattccacacctcgtttatctttctcgtcttgaggcaaatcaaacaaataaaaactcttttccatcgtgatcatgttattgagatctttacttgaaggtatttgcgccctattctgtcgtttgtaaaaccagaacaattgtccctctccaatgaactccctccgaaattctgcttcgaccagatccatcagcccgagcgtttgatttaccttggcaacaccccgtgccgcccgtaatcgattcagatggtcaaatgcttccacctcgttgttggaacattccgccacgatcagatacatctcggaaatccgcatgacaggcatgagatacgtgtatccctgactaactttattatcatcaggcccctccgtatcatccacggccatatacttcacgaaatgtttcttttcattcccatccggatctttcaaggtcatccattgttccgtataacgccaatcattcatcctcgtgttctcctcgtacaaattctcgatattagcatctgtcggacgtagaatcaccttctctcccaacttgttagaaaatgtggattcgtacacgtccgcccgcttcaaattatacaacccgaacaagatttccgttttatacacccggtcccatttcgagagagtcgtggccgctgcacgagtgacaaaagggaaccagttattatcctcctgcgtttccttgatcacttgccgggcataggtcaacgcggtttccttgtcccccgtgtacaatgccaaccgggcgatataggcctttaccgcgtaataattcaagcgcagggagcgatacaccatatcattgggtaaccccggaccttcatccccccaaagcgctcctttttcaatcaccggatcataatccttcagcaactcctctgccgccttgaaatcatccataatcaactttgccacttccgatgctttcagtaaaggtcttactttcaaatcagaagattctgaataaggcatacactccgtttccggatcaagggaatagatcggtccaaacaccctgaaaacttcaaaatgcaacaatccacgcaacgccaaagcttcccctttgaggacatgataatattcgctattcagcacatcctttctctcgtcacacgcctctataatcgtgttcacgttgacaagcaacgtgtaagccttcgaccataacccggccacttgtccttttttagccgtttggtcaaaagtagataacttttgccacgtctgttcatctttatcacaatcatagtattgcgcaagaatatcaaacgtcttgtaagacaacgtacctccatacaagttggaatttagtaattcaatatacaccccgttcagagcggtcataaacccggcttgagaagagaaaagcgtgttttccatgatccggtcttccgatcccaaatccaaccaactgtcacaagacaccacggtggtgaccaacacgatcatcgtgaggcatttcaacttgttcaataatttactcgcaaatttcataatttcgtcttttagaatcgtaaactcaatgaaaatgaaacagtgcgggcaaaaggataatccgttccccgttcttccttgaaagaagacacccggaaaatatcattcatatatgccctgaaagtaattccttccgccccgattttctttatccacgcggcagaagattcgtatcccatggaaatggattcaccggagaacgtgttttccgtccgcacgaaacgggaagacatcggtgtcggagaagtatcttttatcgacttgaactttgccttatctcccggtttctgccaacgatcatgtaacgcccgcttatcctgattataataaatttgctcttccgatatattctccactttcgagtacagggccgaggccatcacctctccccccaaacgataccggaaatttaccgaagcggaaaaacctttgtagtagaaggaagaaccgataactccctccacgtccggacgggaacaccccacaaccacctcgtcggctgtcgaatagataaaggtctgggaaccatctttctttctaaacatttccgccccggttgccgggtcaattcccaacgagggcacagcccacatatcatcgggactggctccttcataataacgaaccaagctctgcgcgcttcccaattcattaaattcgttcaatttatcaccaatatcccgatactcggacttggacgttctaaaattcatgttcaacgtccaactcatatcctgtttctggatcaccgtcccgaaaatactcccgttccatccccaagaaagctgccgcccggcattcgcattaatggaacccacgcccacggacggaggcatcggaacactgatcaaaagaggatcggtatccttgtaataataatccagcgtcacccggattcgattccgcaacatggatatatccaccccgatattcttatccaacgtacgttgccaatccaaatccttgttaccaaactggtcaattatcgcgcttgaaccaaacatattttgcagttccacgttatacttgtaaatcttcatcgcctgatatgcgtcaaaattctgattcccggggttacccacggatgccctgatcttgaaattcgtgaaaagccccaacgacttcataaactcctcgttatgaatattccaagccaaacccacagaccaagttgtcgagaaacgtttattcgccccgaatttagacgtaccgtccgaacgcacgttgaaatccatcaggtagcgattcataaaagaatagttgacattcatgaaaaagctggtcgaacggctacgctccaaagagtaattaggcttctgtccatctgtaaaacccgtggaaaaagccggattcatatgcagatcatcgttaaaaccgacaacactataaccatcccgcttatttttattctcactaaaagaccatcctcccaccacgttcacttgatgtttttccacgaacaacttaccgaaagcaatattcaaatccccgttataagagaatgcctccgaggttgaagccgaaaatgaaccctgtttcaacttatccgtttccagataatcaggatgtttgggggatttgaattgctcatcccggctcacgttcttggtaagcccgactctcgccgtcgccctcaaaaaaggatacatcctccactcgatcgagaaattatcacgcaaggcgatcgaattcccaatattcgtattttttattccccacgcgtataacggattctttaatgatcctttgttttgttccgtcccggtatcctccaaccacatgggaacatatccgttttccaatctcttccgataatacgggttcgctttcgaaaattcggaaaaagccacgggttcccgctccgtatgagtaacatccatgctaaacttattggcaaacaacaacttttcccgacgataagtcaaatcaatgttggcactgatgacattccgatcagacccttgcatcacgccattggaattattgtaaccgaatcccaacccgtaacgcatggcatcatcacccccgtcaatataaacgttgtgactatgattgaatacggtacggagcggttcgttcatccaataagtatcaacaccccgcttcacctcggctagccgccgattatatttttcaatattacttatattcgtgttactctccaaatccccgtaaagcccggttaggcgttcaaactccaacttctcggatgcattcatcaaattataggcagaaagatccgcaaattgaatcccgtaattaccgttataagaaagacgtaacttccccgcttccggttgaaccgtctcaacgacaatcacgccgttggccgcttttgacccgtaaatggccgtggaggcagcatctttcaaaatcgtcacgctagccacccggtccatgttcaaattaacaatcgtctccagcgtcgtttcgataccgtccaaaataaacaaaggctgattcgggtcattatcaaattccgtctttaaaccaaccacactcgtctttccccggatttcaatgtccggcatccggttcgggtccgatccccattgtttactctccagtaccagcatggaaggatccaaacttttcagactctggataacattctggctcccgatcattttcaaatcttccttcgagtaggtagcgaatgatcccgtgaaactttctttattacgggaatagattccggtcaccaccacttcttgaatcgtctcggaatcctcctccaaggtaacgttcaacgtcttcgcatccttcacggctatttcccgtgtcttcatcccgatacacgtgaatgtcagcaccacgccatccagcgaaggcaaggcaagcgcaaacttcccgtccgcatccgacgcagtacccagcgtggttcccttcaacacaacagatacccccggaatcgtgttcccgtcttgatccgacacgactccccggataaccacttcgcccggtttctggggaacagtagcccgtttttttatcacgacagttgaattttcataaatgtactcgaatggactcccctgaaacactcgtttcaagacagcatccaccgtcaccccttgcatggtcagcgtcacgggcggcaaggtggccacctgcgccttgtcgtaaacaaaattcaaacccgcctgttctttaatctgccgaaaaacttcctgtacccccgctttattcacccgaacagacactttttgttgctgggctcgaccaacaaagggcaacatcagcaaaatcacgcacatcaggcaaacgtgcctccattgcaattttgtttttccacgggtacaatggtccccaaaaacaaaatacttcttgctttttttcataaatttgtattttaaaattaaacatttactagatgcttccaacatctagtccgaaccgggagttgttagcgcaacacccggtttttcatcgtgttacatccacgtatattctcttgaatcttgtttgcaatctgtctatcgaacgacaatttaggcgtaaaactttccactcataagtttttttcataactttgatcgttgattaatttgtaaaattgattaacaggaggagtgagtattctgtgttttctaggctcgggatacactcctttttttcatgaatcaatgtggcggctcatccatagattttcgctatttcaattttgcccgatcccccaagcaaaaattatacaataaaaaaagcgaggatcgtacattctatcctatctagggcatcgccaaacgcctcggagcaaatagacaacaatccacgctagccagcgtgaatttactgcctaatcttgctccttaaattggcgatttctagatagcaattagaacaaattcacaatattttaatgcggactcttccgcactttatttttcaactcctgcaaatatatgatattatttcataaaatcaaacactttattccttcgtagctatatttacacctattttttattcaaccgagacaactacctggatctcatccaatttcccttgaaactccaagtcctccggaatattcacaatttcaagtctgtatcagttttcgatttcatttcttcgatcttctcttgatataaattcattcgatttacttcattcaccaactcttcgcaagctttatccggcgtatattcctttcccgttaaatcacaataaataggttctccgtctcgataaaaaaggaaataagtcatggcataaagcgtaaacattttataatctttcgtatccgcattcaataatttccccggaagccaagaaaccactttctcccaatcctcaatcatggactccattttccacacgccaccttcttttattgtcatcagtaaaaaagttgttccatccgtccgcttccccaatagacacgctttatcttgaggtagtgataaacattccaagatttgtgcaggagatggagcggcataaaacttctgaacatcagaatgactatttttattcttatccatgcaactacataccaagaataatattataactagatatttactcatatttttcgaaaactttgattgttgattaacttataaaattgcttaacaggagaaatgagtcttctgtgttttctaggctcggaatacactccttttctctttacacatcagtatggcggctcatccataaattattgtatttcaattttgcccaatcctccaagcaaaaattatacaataaaaagcgaggattatcaacgtctatcttatctaaggcatcacccaaaaataaataacaatccacactagttaccgagcatctgatgtcttagcaattttcagataaagatgagagctgactcattatatttccatacaaactcttccgcatcttatctttctatctctacaaatatatgatattatttcacagaatcaaacacttcaatcctttgtagctataatttcgaagattctattttacacgaatccactccaagaaacagaacctttctcaaaacacgcccatattttatatttttcttgaaaaattcggcatacattttttgcagaattcaaaaaatgcactacatttgcatccgcaatcaagcaacacgggcgcttagctcagctggttcagagcatctggtttacacccagagggtcgggggttcgaatccctcagcgcccacaagagtctcataatgagactcttttttgttttgaggttacttttaccctacaaaaattcaagttgaaataggaacggcgcatagtaaaaaagctgtgtttaggcataaagggatagtgtctcaaaaagtgtgtaaatcccaattttttgagacactaccatataaccaatcttaattcaacttagtaatatcaaaaccgtcatattttttcatggtctcttgcaatatttcatatttctttttcatgagaggataagtttccaataacatttctcgttcttgtattgtcgtactaaatataaactccaaccactgcatgatatcaatactcttgttcggagcttgtatccaccaacctccccagtccggatcatcatcataacttgtatttcccgggtcataggaaataaagcccatctcgtgccaatctatatcatccggagtttcaatatcccatccccaatctgtttctccataaaactcttcactcacctcataaaattcatccggaactgtaaagacatttttaattgcagacaaataatcattccaaaacttcgcattaacttctccccgaatatcacgaatatcacgatctgtatattcattcattttcgaacggattccagctattgcgacaaaatttgaacttgcataactatgataagaagggatttggtcttccatgcccaaaaaaaggatcgaatctgccataataatagaatacgggaaatatttctttttaaaactttccggataaacttctataaaaatatctttcaccatatccaatccctttgtcagcaatgcagcttcttgaacgggagcaaccaccttaatattattcttccttttaaaattatatcgataatcctccacttccggatcctttataataatagtttggtaatccttgtaaaat

SEQ ID NO: 33 - DNA, 16991 bp, Butyricimonas faecihominis
atccataacaacatttggattaattgactacatttatctgtttatttaattgcgtggattaacagatatttactatgaatttcattcaacaaaaatactacacggataatctattgaacgctttgcccgatggaattatcaccatgttacccgatggtaaaatttctcatatcaacttacaggcccaaacagagctacatatcaacacgtcttcctcaaagaaatatcaagaagacaatttatacatatccgatctgttatcccttatgcaacttgatcaagacattttaccccggattctcgatgaactcgaaaaagggaaatcaaaaatagacctcatgcagaacacctgcatcaaagagaaagccactcacacgctttttcccgtgagtgggcagttcttttcttttcgtattaatgatgaaacagttgaaattatcttctattttcacaataccacgaatgaactcactcaagaatacatattgaccaccgccttgcgacgttcgaaaatatacccgtggttcctagacatcgatcatggtgttttcgtccttgaccctcgatattttgaatatctaggcatagaacccggccccaacaattcattaaccatggaagagtacacgaacatggttcatcccgacgatcgccaagccctgaatgatgccttcgccatacaattcagcggaaatgtcgtattcgaaaaaccggtccccttccgtctctcacgcggaaacggacaatgggaatggtttgaaggacaatccacttacatcggcaggctatccggattaccctatcgtttagtgggtatctgcatgagtattcaagaacataaaaacatcgaagagacactaacggccgcactaaacaaagcggaagaaagcgatcggttaaaaagtgcctttctggccaacatgagccacgaaatccgtactccgttgaatgccatcgtcggtttttccgacgtactcgtttccaccttgggagaattatccgaggaagaatgtcgaggatatgtcgagctgattaaaaacaatagctcccagctattgatgctaatcagtgatattcttgacctcgccaagattgaatctaacacgatgaacttcattttctcgaaaacatcactcaatgccattttcgaaaacgtcttccaagaacagaaaatgaataatcattcaaatttaaagaacataaaattcgaattgcacacctcatcccaaaccacgtatatcgtgacagaccccatgcgcctgaagcaagttttgggtaatcttacaaacaatgctttcaaattcacccggaaaggctatattcacttgggatttgaagttttggaaggaaagatacaactatacgtggaggacacaggacaaggcatttcacaggaacatatcgaacatattttcgaccgcttttacaagatcgattcattcaaagccggaaccggcttgggactttcaatctgtaaaacaattgtaaaccgtttacaaggagacattacagtccgatctgaaattggcaaaggaacccgctttctggttgacctccccgtaaacatgaatattcatgagaacaaataattccacacggtaggcaccgtataaaaaagcatatactctcgtgccatttcccaatgtacacgagagtgtatgctcgtttttacctcttttcctctatcaattagtcgcttccagtgatttctgccatttccaagcattcgccagcgtttcctcgatcggcgtgacagccttccatcccagctcgttattggccaaagtcgtatcggcccaaaccttctcgatatccccggcacggcgtcccacgaccttgtaattcacttttaccccggttgcccgttcaaaagcgtgaataatttccagcacggaaagcgcctttcccgtaccgatattgaaaaactcgtaatttttcttattcttcccatccaacaagcgacggatagccaccacgtgcgcttgggccagatctaccacgtcaatataatcgcgtaacggagaaccatccggcgtgttataatcgtcaccgaacacgctcaattgctcacgaattccgatagccgtttgtgtcaaataaggaatcaaattattgggtactccattgggcaattccccgataaacgctgtcgggtgagccccgatcgggttaaaatagcgcaatgccagagctttcatgtcaggttccacccgcatcaaatcccgaataatatcttcactcatcaccttcgtgttcccgtaaggagattcagcctcgtgacgaggtgttttttccgttaccggcaacacatcggcctgtccgtacaccgtacaggaagaggaaaacaccaaattcggcaccttaaattcccgcatacaagtcaacacgttcatcaaagagttcaaattattgaaatagtactccaaaggcttgctcaccgactctcccacggccttcaaagcggcaaaatgaatcacggcccgtatatccgaatggcgggcaaagaaatcccgtgtaacctcaccatcagtaaggtctatctcttcaaactcgggacgtatcccagtgatcttttctatcccgtctagcacttccagactcgaattcacgagattgtcagcaataattacatcataaccatttttctgaagttcgaccaccgtgtgggaacctatataccctgtacctcctgtcacaaaaattttcatacgccaataattttatctcaatttataacattctgagtgtctgcaatagacacaacaaagtaaataataataatccgaaatgcctaaaatgagtttgacaaccttacgttttttcttacctttgcgacatgaataaatatgttgaacacattgaagaattgctctatctacatgattgcgtgatcgttccgggattcggagggttcatttgtgactacacgtccgcaaacatcaatgagaaaacggggactattgttcccccgtctaaaaaagtcgtgttcaacaagcacctgaaacaaaatgacggacttctgattgattggatcgcacgtaaagaacagattgattacgagaaagcgcaacgacgtctggctttattttgtgaagagatcaaggtacgcttgaaccagaaacaaaaagtggacttcggtacaatcggaaccttttcggtcgaccgccggttcaacgttctctttgaatccaagaaccacaacttcctgccggacgtgatcggtatggaatccttgcctttggcaactgtcaacgggaaaaagatccgtaaaactcaagatgaactgattaacaccgaatccggtaacctcgttacccgtttattcaaattcggtttgtcggcagccgtcgtggccggaatcgtggtgatctcccaacaggacatcttccaaggaaacggaatgacgaacatgacaaacatgcaaccctccccggtgaaaaacaaaacgatcatcgtggaagaccctgccgtgatctctccgaactatgacttcgtggattacgacccggttatcgatctgcccgggttgtcagtttcacgataagcacaatcaaataagccgggaaaacgataaacaacgcaacccacttcaataataggaagagtaccacaagtattccccagaacctccagttccattttttcttgaaatcataacaagaaatcaagatataaacggggatcatacaagataatgctttcacaccccaaacagcaaaaccgatgatcacggcccccaagaaacaatataaaagagcattcccgctccacgaaaagctggttaacttcaacgagaacatcgggatttcactgatcagcaaaatggccagcaccaaggccaaaagagccaacaaccacggtttaccccacatcgccatgaaaaactcttcctgatgataacgggtaaataccaacatcacccaaaacaaagcgttcgacggggtcggcaaaccgataaacgaatgagtttgtcgcacatccaaattgaacttagccaagcgataagccgagaaggccggaaccagaaacggcacgtacataagcaccccctgccaagaattcaccgcaaacaactccccgccactatatcccaaatcgcgaatcaggaaaaaagccatcacggaaggcatcaccccgaaactaaccatgtcggccaaggaatccagttccttgcccatttcagatttcacatgcagcaaacgagcggcaaaaccatcaaagaaatcaaataccatcgccaaaatcacgagccaagcagcaaggtacagatgcccgtgaaaagcagcataaatagccaccgtgccggacgtaacgttcatacaggtaatcagattaggtatatgtttcttcatggtactactttttatgatctgaacacgaaaatagttctttttacgatagataaactacatttttattacttttgttgcaaattcgttttaaatatggctaaatttctcattatcaggttcagctccatcggagacatcatccaatgcatgaatgtcgtaaacggcatcaagaaccattttcccgatgctgaaattcactggatcgcccgaaaagacatgggttctttccttaacatggacaaacgcatcgaccgggtatggggatatgataagaaaacgggattcaaaggtttattacaaatggcccgtcaactgaaagccgagaaatttgattatatctacgacgcacacagcaacatccgctccaacatcttgaaagccgtgttactcccgcccttttaccatctttttccaagaggaccgcattacacgctacgccacaaggaccgctggaaacgatttttgctttttaaactacggataaacaaattcgacaaaccgttccggggcatcgtttcttaccaaaaaccactagccacatggggaatcacgaattttgaatccgattactgtgattggaattttccggcagaatacgaggaacgttttcaccgtacgcttaccccgaagaccatcacactcattccttccgccaactgggaaatgaaacgttggccggttagtaactggcagcaagtgatccaacttatgcccgactaccgttttatcattctggcaggcccgaccgacacgttctgcgagaccatcaaggctatcgcacccgaaagagtcaacaacctgacaggaaaaaccagtctattggaatcctgttacctcgtgaagcaatccaacctcgtgatcagtggggataccggttttcttcacgctgcggacctgttccacacgaaagccatcgccttgatgggcccgacggccttcggctaccccacgggcaaacaagtcgaagtcatcgaagtcgatcttccctgccgcccctgtaccaaagacggtcatggtaaatgcaaacaatccatctggcaaaaatgtatggtcgacattcttcccaaacgagttgtcaacacagccttaagaattttaaatcttatggattaaatgattcaatgatttccgattaagtgatccctttctatcctttttttaatcacctaatcattaaatcgtcaatcacttaatcatttcaattgtcttgtttcagtaccacatagaacgtcgtaccctcattctccacgctttcaaaagtgatcgagccacccatcgcctctataatcttgtaggacatcgctaagcctagtcccgttcccccggacttcgtcgtgaaattaggctcggaaattcgatcccggatactttccggaattccgcaaccgttatctttaacaagcaaaatgatcttgcctaacaccgttttcagtcgcaccaacacgtgcccttcccgtccttccgggatactctgttccgcattcttcaacaaattcacgatcacccggttcacctgatcccgatcaccatacacggaaacattcggctctatatcacattccatgacatccacgttctcatggaacaactttgcacagccgtttaccaattcactcaggtcgaaccactcgttattcgcctcctgtaacttggcaaaatcagagaaagccgaggcaatcgatgccatgtgatcaatctgttcgatcaacacggctgaaatatccttaaatcgctggcgcacttcctccatatcccccttctgcaacgtgcgctgcataaactgcaaattcaacttcatcggggtcaacgggtttttgatctcgtgagcaatctgccgggccatctcccgccaagcgctctcccgctccgacttcgctaacttcttcacgttcgcctccagtttatcaaccatctcgttatactccttcaccagcataccaatttcatcccgctcgtggtacacaatcttctcgttctttccccccaccctcatctgacgcaatttctcattcaccacttgtagcggtttcgtgatccgttcggccacgatactcgacagaataaaggcaagcaccatcacgatcatggcaatatttaccgctataatcacgatcagcaaaatatccttattcagttcctccccacgggtaaaatacgggatactcaacacgtacctctccccactctccagcaccaatggcatatacaccgccatgtatgccaattccacaattcgctcatcctgtacaaaattaatctgtcccctcttaacaatctgttcaaaagccttcgggttcagcaatgtcccatcaaatcccttctcgaatatcacgggccgggaagtcgccacgagagccccatcccagttatagatattaatatctacccaaagcacctcggacatatctttcaattttttcaatatctggggacacttcgcggcatccacgcaatcattatgttccaactcatccgttatataccgcgacaactcgatcaccttcgaactatgccgacgttcaaaactctcggcattcacgataatactcatgatcgtcatgatcaggaacaacgctccgatcaacgtgatgatattctttttaattctcaacgtgagactcgtctgtcggaaacttccccatcccccgtcaaaccggaagaacatcccgtaagaagtcaagataccactgacaaaaatagcatacaacaaattcaagtagtagagtgcaaacacgtcatcacccaaacttacgatacataccccatcattctccacgggaatcaccatgtgcgagaacccgtccatgttcataatccaggcgtgctcgatcttcccgaaacgttccagagaacggggataactaaaatcccccttggaatccaccaataccccattcttgtactttgcgtaagaatagggataacgggcctccttctcgaccccgatctctctagatagaatttgagcatacccgatcccttcatgacggtttttcgactcgaaacgaatatacacgcaactaccaccccgaggcgtggagaaagaaaaacgcccgaggtactcaaccaccccgtcaaaatcttttatattgaaaaacgacgtgtacccaacacgggttcccaaactatcaattagcttgtcgtaatacttgtcacaaccgtatttttcgtaagtaggagtcaacaatatcgtgtcccgtggatcacatatcatcgccttacaagtataataaaatcccgtcatatccaataactcgcttgaaatataagccgccaataagtccgtatcccccactgtcaccagcgaatccactttctggctttgttttatttcctcgttaacttccaataacttatgctcgaaaatcgggtctctctccttgataatctcgttcgcaaaactcgccctcaccccttgttcccgatgaatctcactactctttgccaagaaaatgatgtaaatacagaccaccacgagcgcgatcatgaaaatactcttctgggcatcctgtttcatcagatacacccccagaataaacaacaggtaaagcgacaacgggaaaagacactccaacggggacagtgagaaattaaagaaataacagagtgccgcacaaaaaacaagcacaccagttactccaaaaaacgcctgactgatagagaacaaattctggaaataacgcacagaactgttgattaaaacgataaatcccatcccggcaataatcaacgtgataaaagccacgattgacgagaaatcgacattgatgaaacgggcaatattcaagctgacctgcgtactctcgattaacgtgttaatcgaaaagtgtaacaaattcgtgtagaaaaacacgcctatcacgaatcctacgaggaatatatatttataacgcaccaaacgaggctcgtcatacttaattttcagcttgttaaaggttataaagaaataatgtgccaaacagaacatcgtgacaaacaaatctcccactgacacgataaaccgtcccccaacctgactagtcgtgaaaataggcaaagcataaagagtttgcggaaccttgtattcaaccatcaaggcacgcatcagcacgataaagcagaaaaaaccgaacacgtgaaacagttgcatccggaacgatcgggccctatccagcgatatttcgtaagcataaaacaacaagaaaagaaacatgatataggggatcaacaagaaataagtgggcacaacatccccatgctccactcgactctctatcttgaacaaaggcctcccgtcacggttgtacacgagttctcccccatcttcccacgtctcccggataatcaccttactcgcgtcatccaaattttcccccaatgacgggttaaaatgacttttcacgtagttactcgaatacgggtaatcctcctttataaacagaagtgcgtaataaaccgtgtccccaacggcatgcttacgaacatcaaaataaagattattaatcttcaccaaatcatttcccgctgacaatatctcgtacaaacgaggcgaaccgattctctcgttactccagtaaaccaacttactccccttaaagccgaccaacacagactgtttacccttccattccggattttgccgttccgcctcgtgatccagcttccgcaattgatcgtcaattcgtttctcctcgaacttcaaccgttcttgaaaaagaaacagtttcttatccacggaccaatcgttcagagaatactcccacaaagaggccacggccagacagaacatggctagtgacagtacgagccaaaacttcttcatgcttttcaccctcgctttattcatgatgataaggttctcctttcaatatagtcattgccctatataattgctccgtgaagattatcctcaccatctggtgagaaaaagtcatcttggatagtgatattttcatgtttgcacgtttatatacttcttccgaaaaaccgtaaggtcccccgatgataaatacaagtcgtttcatacttgtcagcatcttctgtgccaaaaagtccgcaaaagcctttgaagtgtactcgtttcccttttcatccaacaaaatcacataatccaccgcctccaactgccccaacaacaattctccttctcgttctttttgctgtatctcactcatgtttttcgtgttccgcacatccgggatcaccttcatctcgtaaggaatataatatttcaaacgtttctcgtactcggcaatccccgcccgtacaaactccgcatctgtctttcctatcactaacaaacaaactttcacaccacgaattttatcaattatactaataagttcatctacacgcaaatgtaaataaatttacggtatctcccacgaaccttcaaaaaaaagcccctcaatatttgcccgaatttcaataaaacactatatttgcacccgttaaaggctaaccactttaacacacgcaagtgtaggtcctatagctcagctggttagagcacctgactcataatcagggggtccttggttcaagcccaagtgggaccacagaaacagagagagttacgaaagtgactctcttttctttttgtctgttttgagggtgtttggagcaaatgtgggcgtatggtaaaaaagaaacaatggaaaaatctgcgtgtggaaaacaaatttcacacgcagattttccacttgagccacttttacagcaaaccaattcctcgtcacttgacacgaggtgacgaggagtttgacataaaaacaagcattacattcatgtactataaagttgattcctcctgaatgaaccaagcccatcacccgcaatctctatttgaaagtataaaaaatcattactgattgcctttcagtttctacctgccggaaaaattgtttcatccttttcgttaaaaccaccccttccttttccatcttatctttcatggctaacaattctcccggggtatatacagccaccagtttctccccgcactcgccccataaatcatctggataaatcatatcccctctcatcgctacatttttaggcatataaaaagccttctccgtttttttgttatacatcaacttacctgtttcgtaagtaattacaaaccaattctttgtttcatatatttcatctttcgagaaatagcccttttcccttttcaaacgtgccacccaagtgagataatctttatgtcccgggtcaaaatcatccggtacggaacaatgcaccttagtcacaaaacgaggttgcaatttatgcccgtcatattcaaaaatcgtatcacacaacggggccacaaaagaaatcctcccgtcataaatagttatcggatgaatagaaaaatcaaccactcccatcgggaaacggacgtaatgaggacgcaaagtatcaaatttcgtgaactccttatccgaaataaaataacagagcctgttcaggctacacgcaaaatatcccaaataacgatctttttccaagggatacacccgccgcatgtagtgcatgtaatcctcacataccccacttcctttaaaattaccttcaaaatcataggtcacatagcgtttcccccaaagaccgtcatacactccgatctctcgctccaacggatctacccgaacccaaccaatcactccatattgctccttaccgtctccttgactaccgatttgccgcaaaaacttaccggaaatatcaaacaataagatattttccatttggtcccgtatacccctgaccacaaccaaatcatcataaatggccaaattctggatttcgaccccattctgagcgttcatttccaaaggtaccgcttcccacgatttgataaaacgatcccactctttcgcatcattcaattcaaccacgttgtgttcatctaaaataaccggttgattctgggcacacacgctacccacccacaaaaacagaaacaagaaaaaataatttcgcatcactttacctttcatttgttcaacactttttcgattctcatactcaacatggcgtatatttttcggaccgcctcatcctcgtgccgtccggccaacactttcaatcgttctccaagttcctgcactttccatttcacgacaggaacagaaacatcagccaccttctcaaacaaagtgtttacacacgctacctgcatatccatccgggaaaaagagatttcactatctaccttaaaatcacagaataacatggagaacaagtcaccgaaaaacatatccaacgtgtagacgttctccaagcacacctgctccatatcctgcatacgtttcaacacttccggggacaacaatttttgaaatacagttgtcatctgccgaatgtaagttgtctttacatcccaagaacatcccttcgccaaaggagaaatcaaccctctatcaccggcaaataaatactcgcccaataaagccatcgcttcccgctgctcctctaccgacaaggggacattccctcttttctctcccaagcaggagactatttgcaataaatactcaccgtatttatcaattacttgccgattggcatccatgatcgcccaacccgaatcatatcgtttgtccgaataaacgatatttcccaatgcctcgttcaaccggagtaaattattcaaagcgaatcccaacgttttcaacggttccgaagacagatctcccgctctaacctctatcccctgtgatgcgggaaacatatatcccgctgaacatttctgaaacttttcccgcaaagcctcgcgatccgtataggcgtttttgctcgcgggaaactcccgatacccccactcgattgccaaacagtcatagtcaccgatccgaggcataagctcccttgccgccaccttgtctgacttttgaacagcataattatacgggttattatccataatagaacccgtgtacccatgctgcttcaaccaagctacacttttcacctgctccgcggtataagcggcacttcccgccaaattttctttcaaccccaacacgctccccacagcccgaatcaccttgctccgcaaaatttcacccaccacgtcagggtgaaaaaactctttccggatacgatcgtcaacagttccgcactccagcacatacctccacaactccttgggcaaaaagccatgtcctatattaacccgacaagatagaatttctcctgtttttggatgaaacgtgtagcctgttcggattccagcctcatgtaaatcgtaggcaataacggctctctgttcttccaacacggttttcgaatccgccattttcacccgtaaggcatttttaaaaccggctttttcaaaagcggcattccatgccagcaccccctctttaatatacggcacaaactcggcaggacagcaagtatcgatataaaacacaaccggatgggcaggatctaccaatttccctttccgatactctccccggtcgttttccgttaccccaagattccatttccgaataatcgaatcactttctgcccgataaggattctgggaataatccaagaatgaaatcacttggtagccgaaacgcctgtcggcaaaacgctccctcatctcccgttcaggcagtaacgtcacaacacaaccgatttccaacgctaaaaaaccccggggagggatcacgttatccaacaaccgttcgggagaaaatccacacatccggtgtatcgtaaaacttactccatccgaaaattcatgtacgcccaaaattcttgcccgagaagcatcctgttctctaatttgcgaagcggtcaccttaaaccaatcatccccggttttcaacatgtccgtgatatctattatatatcccttttcgtcagctgaataggctactacaggataaatgatatctaccggttgcttatttgatttacacaaggccttgtacaactcgttatttttatccgcaacccgctcggagaacaagcgacgttgaatgtaaatcgaatgatcttctactttctgcaaatacacgacccccatactttccaatggtcgggctaccatatcgaatcctttgttcacttgagcccggatttccaattcacggcccagcaaacgttccggaatctctatatacacctttgcagaatcccggtagacaggaagaacaccggagatcttttccattttcccgtgaaaaaatttctcaaaagccagtggttgctctacggtattttgaccaacaccttttcctatcgtccaacaacagattaccaaacacagcaaacacaacctataccctattttcatactcaatcattaattttgtaaagattcgatactttctaacaataaggcgatccgccttttttcctttccctctaagcctgccatataattccgcccctcttccaagatctttccgatctctgccaacccctccaccaacacccgagaaggaacgtaccccgttttttcaaacaaagccttcaactctttcacgtaagcagactgaacaacataacgggcatccgaaacagcggtattttcccgccactctctaaatatccaccgatgcaattctcccaaatactcatccaaagtatacacttcgcccggcatatattcttccatgcgtgctatcgtcgcaaactttcccactaaagtttccatcgtggtttgataaaaattgttcatcagcacccgcgtatcctccccgagactttttcccaaggaatcccggtacaaccaatcgcaaggtgtcaagacgtaccgcccgaggaacgtcataaccttcgacatataatcacgaccaaccggtttatagaacctcgttgtatccccctcacatttcaacatcccgccaatatcccgaagcacgtgatccacgaataaggaatattgttggatcatcccgtgaaaccgggatttcacgatatgatacgtttgacgatccgtacacttccacatatcagccatggccatcaattgctttaaattctctattcccaaagaattaaactcgacatgatcgtttcccaggtcttccgattgcgccctggcatccaggcccgcctcgaaacgtttggaagaatcacgtaactcctgccttacccattcgttccattcctctcccgtacggtccggtaagtaacggtacccccaatcaatggcgaaacagtcgtattccccgatgcgggcaacccggtttttcaaacggacatgatcttcctccctagccacataattaaaacgcatataatccataatggaagaacccatcccatgtttttccaaaaaagcatcatcccgaagttgttccactgaataaaggctgctacctataaaattatgttccaatcccaacgtatgcccgatttcgtgagaaacaaccatcttaacaagttccccgagcaggctatccggcactatcgtttcccgggcaagtttatcattcgtaccacattgggcaaaataccattgttgcaccagatcccatacgctactgaatattccgacatgactggttataatctcaccggatctcggatcgactgtcgatggcccgtaagcattccgcaccggagaaactttccacgaaataaaagaataacgggaatcatattccgaaaaatcaggattttcctccggggtcggggccagctctccgcggatcgcatttttaaacccgatccgttcaaatgccttctgccaagcgttcaccgcttcgataaaatagggtacccaacgagaaggcgtttcccgatccacgtaaaaaacgatcggtttcacgggctccaccaattctccccgcgcataagcctccgggtctcgaggctccaacctccatcgtttcacacaagagatccgggacaaggcaaaacgactttttgaaaaatcagtttttgcaaaactgaaataccccacgtcactattcttctgacgcctttccaacggctgacggggcaaaagagccaagcaaacgccgatttcccaacttgtcgtatagctattgcctgatccattccctcccaccatggaatactcctccacggaaaaactcctgctggaacgaatcagtatattcccgggaaatccttttatctcgccaatacggttcttttcactttcggccatccccattttcaactcaaaactgaacgggcccaaattgaacaagggattattcatcaacaaccgggacacctccaccaataccgaagaagaagtcttcaccagcacgggcaacaccccgtttaacatgaaatctccccgttgccgggccacatgatgaatccctcctttccccgggtccactcccacccggtcacacagaggcacctgtaataaaacctcgttaccctctttttgaaaacgaacaatcagcggcccaaagagatccccggaatacccataacgtcggtcttcttctcttttcttcaatgcagccgattccaatatagtcgtcgttacaagcatatcacgcccgaataacgaatcgggtatttcccaaaagatccgttccccttgacggtaagtagtaaacattccgggaataaccttcaaagagtcctccgacggacgggaattaaaaaaagcattgatctcttgttgggctaccgagtgaaaatataatccaccacaaaacaacaatataaatcctatttttttccacatacaatactcatttttccgtaacatcccatgtttttattctccaaaataaaccggatcagaatacaacgatgcccgggttgacaccccgtcttctgcagcaacaagctggaataaggtgtaaaacaaacgccatccttttcgctgatgagctttataatccaacacgttttgggcaccgaaagaggctgacacctccatcgtatcaactttgacaccctgttcgttgatctttgtaaagtccgtaccagcgggacgactcatttgtgtaagtgctacagaatgccacacgcgatcccccttttttaatcgctgttctattttaatatccccggaaaggagcaccgtagtccccatcaccccggcttgaatactgacattctcgttattcattccccgggaacacgctacaagatactcgtgcgcttgcccgtctgcaatcaattcaaccactttctcttccatcgctgttccacgccgatcggcccaatgtcgaaccaccaaagtcacaacctcccccggcttactatctaaaacggttgccgtgaaacgaacagtgaatttacccccatcatgcgaaacgtcaaagaccggagacatcaaaaccggagcccaatcctggggtaacgatgcatcagatttcaatacaagccctttggctgatacttgccccatacgcatataccatccctgccccgtcatgtaatcatgcacgaacgcatttattcctaaagacttacaagcatccccgaacaaggaggcatcccctttgaccgtggtttccaaaactccttgaaccccatcccggtcgactatccgttccacccccacgtacgcgataacggagcgtgccacggaattatcctgcgcttcccaactagccacaaaacttctcttttcctgatctacttgataaggcggaaaagttttcaaacgaggcaaatccatcgtgtacccctgagctttggaatgcaatggcaacacaatacacaaggaaaaaacatataacc

SEQ ID NO: 34 - DNA, 16487 bp, Butyricimonas faecihominis
attgaataatatcttcggagcatgaaaatactgatggttttagagaaccagttcccggatgacgaacgggttgagaaagaggcgttatctttgataaaagccggacatgaagtccatttgttgtgtgcaacgctaaaaaaagaacgtgtcggggatgaaaattataaaggaatcaggttacatagagccttgtcgacatctttcctatataataaagcgaaaattgcctgtctgcgcttgcccttctattttatgttttggaagaaacaggtcgggaatttattgtgtgcggagacttttgacgtgattcatatacatgacctacccttagccgaagttggatattgggcaaaaaagaaattcgggataaaatttgttttggatagtcatgagaattatccttatatgttggatatggctccctacacgaaaggaatagccgggaagttgatgtattcttttgatgcttggaaacgctatgagcgggagatgatagccaaggcggatattgttattacggtatgtaaagagatgtccgaccggatgaatgatctggttccacggacatattatcacgtggacaatacgattagtatggagttgtttcctcgtccggaaccacacccgacgacagcaggaaagatacgtttactttatgttgggggaatcacttatcaccggggattacaaaatgtgatcaagggattggcattgataaaggataaatctaagtacagtcttgacatatatggaaaaggggcctatgccggagagataaaagatttggtattagcacttggtttagaagagatggtacatttccccgggtatttgaagtttccggcagaagccgttaagatgtgtgcctattctttgggagtaatatcgaacctgcgttcggtacagaccgactgttcttctccgaataagatataccagtacttttattatggtttacccgtgctggtgagcgatatgaatagtgttgggaatattgtacgagagcatcaagttggagttgtgtataaagataattctccggaagactgtgcccggaaattagagcagctggtaaccttggatttggaagatatggcaactcgggctcacaaattgtgtttggagcaatataattgggatgtttctgttaaacagttaatagcagcttacgaatctattcgttgaagttcccggataatgatatgtccggcttgtccatccccgtacagaggagaagaaaaaacgtcttttgttgtatgtttaagttgcttgtagctgtttaaaatatcttcgtatctccaacccgtaatgatattggctccttgttcaaccagttcaacccattccgtttcagttcggagtgtgatacagtattttttgaaaaaataggcttctttttgtaaaccaccactatccgtggcaacaagagaacagtgttttagcagataaaccatctctaggtagcctacggggtccaccagttgaaggcgggtttgtttaaaattgaaattcaactcttgtaattttttacgggtacggggatgaataggaataacgacaggcatttctcgtgcaatctcttcaagagcagcgatgatagattgtaaacgttcgggagaatccgtgttttcagcccggtgcaaagtagctaaaataaaatgttccggaagtaaaaaatcaggatgttgggctttattggcataaaaaagtgcggcatcttgcatgacatcaccacaattcaataatgtacaaggaaattgtttaaagccttcttggtgtaagtttttaatggcttgctctgtgggacaaaacaatacggaacttatcctatccgtgagaattcggttgatctcttccggcatattcatattgtatgaacgtagtccggcctcgatgtgtgcaacccggatatgtaatttacttgctgccaaggctccggccagcgtggaatttgtatccccgtaaacgatcacccaatccggctgttccgctaataggatagattcaatcttttcgagcatctggcctgtcattgccccatgagtcatcccgttgatattcaaattgtagttaggtatgggtatacacatttcttcaaagaaaatatcagacatattcgtgtcaaaatgttgtcccgtgtgaacgataacttcctgtacatccgggaaattgctgatggctcgactgaccacggctgcttttatgaattgagggcgtgcgcctatgatagtaactattttcatgtggtgaattatgatttcttatttccgtaataattttttgaaaatccttttacttcctttccgagcaaggcattccagcctccccagagtaatccgaagccgtaagcgaagacttggatgagcaaagtaatgatggagaggaaggcaacaatgatgttccggtatctgaaaagtgactgaaagaaagcgaacaagcaaacgaacattaatccgtagtcaacaatattccatacaaaatgtacgggaggatagttttgtcctgtgaaaaaggtgcataattccaaaacgactaatccaacgattaatagggccgggagcaggtgaatcggttttagcgtgtgtggatggcgtctggataaattgatgcgtgcaactccccagttaaagatttggcggaagaacttgggtatacttgtacggcgtttatgatagacataagcatctgcgattagccccactttaaaaccggcattgtatattcgcatggaataatccatatcctgaccatgacgcagtcctcccatacctccaattgtgtcatatacttttctggatattcccatgttgaaacttctgggatagaaacgacccacgtgctttttatttcccctggttcctcctgttccgatgaatgaggtcatggagtaattaatcgctttcagtaggggagaaaaagagggatgacaggtgtccgggcctccgaatgcgtcataatgatgttcgttttgggccttctcaatttcagccagccattgagggggaaacatacaatcggaatctacaaagataaaatactctccttgggctttactcatgccgtaatttctggcagccccgggaccttgattttgttggtatatcgctcgtatttgaagtccgctggcagagtggtattgttcgatgaattccttgaacccgtctttcgaaccgtcatccacgaataataattcaaaaagacaccgattcccttcgagcttttctgcgctttcaaggagttctttcacttcttccagacggttatatacggcaatgatgatagagtatttcatgaataggtattttaatagtaggcttcgatgttatcttctactcgtttgtgtatgaactcctgttcccagatagccagtcccaggatgatccagataaaattgtagtgccaccggagtttcggatgtgccgggtaatccagaatatagcggatatagtcataattgaatattccctgtttctcgatatattcttttgtaagaatcttctcggctgtatcttttaaatcctttttgaattgtagatacgggttcaccgtgaatccccatttctttttcgtgataatcttggggggaagatatggtttcatggcttcccggaaaagatttttagtctggttatttttgatcttcatctccacggggagagtaaagccgaagtctaccaaatcccgatcaaggaaaggaattcgttcctcaaccgaatgggccatggacatccggtcatccgtaagcaaataatcgtttaccattttggattgaaattcggcatataacacttgatccaatccgttctggtggcgtacagattcaaaaatcttgtcaaattccttatgtaccttgaattgttctattttttgctgtttcaagaacgattccgaatagatattcctgtagaacgggttatcgaaatcccacgtgtttcgcaggatgaggtaaaagcgctccacgttcccgatagacagtaacatttgtacgccccggcgatattcgtcgtaacgtaatgatttagaattgttctgaagacggaagatgaaatccgatttccagcgtaacatacgttgtagccattgtggagtatggtgatgccagtttttgaacgggtaaatgaatttatgaatatcatatccggcaaatagttcgtctccgcctagccctccgagaataactttcacggttgggtggacaaaagccgacatattgaatccctgcaatagattaattttaggttcctctgcatgccagattaccttcggcatttgttgcatcggattcatcgataggctcaacgtgtggtgatgcgtgtgaaagtgatcagcgatttgttgggcatcgggaaattcatccgtgggctcattaaaccctagggtaaacgtgttgatctcggggacacccagttcatgcattttctgcacgatcgttgaggaatccagtccgcccgatagatacacgcctactggaacatcactgaccaattggcgtttcacggcctgtttgatcaattcgttcattttctctttcgcctcgttttccgtgatggatcgatcgatattcacagccagctgccagtagcgttttaccgtgaacaggccgttttcaaacacggcaaagtgagccgggggaagacgtttgatgccttcaaaaagagtctcattcccttgcgtgtaacgcaagttcaagtgtatatgtaaagcctttaaatttaatttccgttcatatttcgggtgtaggataatggatttctgttcggaaccgaaaactaatacaccatctttaaggaaatagtgtagaggtttagttccgaaatgatcccgtgcgagaatcaggcggttattgttttgatccagtagggcaaaagcaaaaataccgtttaacttgttgaagaatccggttccgtactcctcgtaaagatgaaccagaacttccgtgtcggtagcggtatagaacacgtgtcccttggatttgagttcttcccggatttcttcgtagttgtatatctccccgttaaaaatgacacagacacttttgtcttcattaaaaataggttgattgccacacgtggagacgtcgataatggacaaacgccggtgtccgagagtgaaatcccggtaggtatatatagattgatcatccggcccccgatgttcaatcgtggtcagcatttccgacatgagttgagtgttatctgtatcccgttcgaatattccggctattccacacatattacaagagtttgtttatacaaaagtattattttttcccgttttattataaacgattcagtttctttaatgccgtgaacttgtggcgatacatttttaaaatattggaaatacggtcatactgatggaatttctcgctaaaaaggcgtaattcctcttttccggtgattcgatagagaattaggagttgctggcgaacaagtctgagataaccgatcgtgcaggggtcatcttgtggataaccggaaagatcgcagcgattgaatcgaggccagaaccccatgtcaaacagaggaagttgacgggtaagaccttctattccttcattaaacagccgaagagcgagcgcatacccgttggggtccttgttttcgggaactgcacgaatataatcgtataaaccgaaaaggcaaaagccatggccatccagtactcgtgtcggacactctgccacgtattcttcgtaaaaggtttcccccttttcccggtctacggaaacccctccgactgttatatccttcgtgaaaggaattaatgcttgagttgcaaccttcaagtaggcatcatcctctgtaagttgccaggctctcaatagcatggatattcccctactttgtgcgaaggctgatttccaaggttgataaacatggtattcgggtttaggcacgtcggttagccaataacaaccgagttctgtatgatctgtccgattgttcataaaccagtctgcaatgcgaagaaaatgagcccttttctcttcggaatgtgtctttaaccacgagtggaatatggctaacccgtactgtccgatagaaataggatagtagtgcagttttgtatcttccacgtcaatataagtcgtgttcagggggactccatttttgtcgaaagagtgaatcagacgattgagcttagctatgtcctcgtcaaatttgatgtaataatagcctagcgtttcagattgattctccatgttaatttcgatcttgcggttcgtgttgaaatctcgcaaaagtttacgtaacatgaaaatagcttttttaatcttcatggtgggctaagatttgggttaaagactgggttaaggactttctcgaatagcggttgactacattgtcctcttttataggagattgtggatcaaaattattcagtaaggaggttagaaattgaaacataccttcttcatcgtcatattcgaatgttttcccggccttacaaacttgaatgatggctgcggcatcaccatcggtaggaccgaggcaaagaataggggttctggagccgatatactcgaaaagcttgcccgtgagattacctttactcccttcgatgttggggataatgagtaatagaacagaagaactcttcatgtatttgatggcattagcgtgggctacgaacgaatggatttctacgaaatctcccagttgttccgagagtttttgagctataccctgatccactttaccaacaaaacgtagtttgagttttcctgatgtggaaagtcttttaactgaatggataaaggaatcaatcgtgtagtcagccgccaaagtccccgtgtaggtaattgtgaaaacatcctcctttggaatagttaggtcgaaatcctcggcatcgaatccgttagcgataacttttattttagaggcttgaatggccgaagattttgctgccagttgctttttgatgtagtcgcttaccgtgattacctgatctgcatccagaagaacatttcgttcatatttccggtcaatcgcttttgcaatgggagttggatacattttattatagtaatagatgtcagtccatgggtctcgaaaatcagcaatccaatgcagatggaaacgcttttttagtttttgtccgaccagatgggttgacataggcggacccgttgtgatgacggtgtctattttttcttcctgaataatttggatggcttggtgataagcgtgtttattccagcctctccgggcatccggtaggaagaaattaccccggataaaacgggcaatcttctgttttagactgggactcccttcattgacgaatccgctatacggggcactttgggctttagtcagttttttataatattcatatataccggaacaatccgttcgatacacgatttgtccggctcgtacatcttgttccagcgtgtggtcttttatgggatattcagccttttccggatcaaccgtgatgatgatcggatcataaccaaattccggaaggtacttcgagaacttcaaccagcgttgaactcccggtcctcctgaaggtggccaataataggtgatgatcagaatctttttcacggtgaaatctctatcagttaaagaatgtacgaatttgttcgatgatgtactcttgctcttccgctttcatttccgtgtgcatcggcagcgatagtacctcttcgcttaattgttcagcaacggggaatgttccttgcccttgtccctttttagcataagcctcttgcaaatgcaaggggataggataataaatcatgctgggaacatcatgttctgccaagaaagatttcaactcatcccgtaggtgattttgaacccggatggtgtattgatggaacacgtgtgtgctattagcagcccgttgtggaaggataattccttttactgttgctaaccctttgtcataatgttcggcggcttgattacgggcggctgaatattcatcaaggtattttagttttacatccaaaatggcagcttgcatggtatccaaacgagagttacatcccacgacactatggtgatatttgatcttttgcccgtgattggcaatcatgcgggcccgttcggctaattcgtgatctcggataaataaggctccaccgtccccgtaacatcctaaatttttggaggggaagaatgaggttgtaccaatatctccaatgcatccggctttttgttggagaccgttactgaacgtgtaagtggccccgatagcttgtgccgtgtcttctaccacgtaaagtttgtgtcggcgggctatatccataagcggttccatgtctgcgcattggccgtacaagtgaacaggaacgattgctttcgtgcggggggtaattttttcttcaatcttggtaacatcaattgtgaaacggtctgcgacacaatccacgaaaataggttccaaccgtaaaagggcaatcacctcggctgtggccacgtaagtatgaacaggtacaatcacctcgtccccgggttgtaacccgagagccattaaagcaatttgtaaggcatccgtgccgttggcacaaggaacaacatgttctacttgattatactccgcaagatgttgggcgaaagtcttcacttgggggccgttaatgaaagccgtggtgtcaagtacttcctgtatggcgttgtttatttcctcccgaatgcgttcatattgtccgtgaaggtcaaccatcgtgattttcattgtgatataaaattagatttattcttctattttttgaactaacccgttttgtaaatgatagcgttgtttgctttccggacattcggctattcccttttcgtcaaaatgaagacgatgcccgtattcactcatccaaccgatttgtttagccggattaccaactaacaaagcgtatgcaggaacagtttttgttacaacggccccggctccgatgaaggcgtaagccccaatgtcatgcccgcacacgatcgtggcattggctccgatggtagcccctttgcccacgtgcgttttggcatattgacttttccggtttactgcactacgaggattggtcacgttcgtgaatacgcatgatggacccaagaaaacatcatcgtcacaagtgactcccgtgtacacggatacattattctgtacttttacttggttcccgagaactacctccggggatatgaccacgttttgcccgatgttacaattctctccgatccggcaattactcataatgtgggagaaatgccatattttagttccttttccgattgttgcgccctcgtctacgatggcggtctcgtgtacgaaataatctttcatatctgaatcattttactggcaaagatagtttttctattaaagtattgaaagaaacgggggtgatgtttttctttcgaggaaataaaaaagccgccttgacgggcggctttttcggtttgtggtttaggtttctagtaaaatttgtatcttgtatcaaccactccggcattcttcactaacgcgggaagaatcaagcggaacttggtgtacagattcgtttgttcgatacttctcttggcagcttcaatttgttcgggagtaactgtttcaacagttttagagtttacaaccacaacataaactccttggttaccgatgatcggtttagaaatttcgttttctttcattgtaacaacttcggcagtcagcacgggttcgataccaactccgggaacttggaatgaactgaaactaacatccgtggcatccattacctctgcattggctttttgtgctacagaaagtaaactttcacttccggaaatagcattggtcaactccttggcaatgatttcgcctttctttttacggataagttcggtgcggatagctgcagaaacagagttcagaggtgcgataccttcttcttgaattccggttaaaaccacaacagagaatttgtctccagcctcaaagatcggagatttctctttggtcgtcaggatgaagcccggtttttcagccatataagcctcacggataatatctcttgcgttatcaatgcctgcaatctgataatcgtttttacctaagtttgcgatacgtttggtttgattattagcagttaaagctgcctcaaaatcttctacggtattgatattgtttgcaaaagtacgtgcgtcgttataaatcttgttgatcgtttgttgagacggggtaatttcttttgcaacgattccgatttgtaccttatcaacaggttttgatctgtctgttacttgcaaaacatggaatccgtaatttgatcttaccactttcacctcgtttttgttagagaagaacgctgaatctgcgatcggttggagcatctgatcttgggtgaaccatccgaaatccccaccatttacagaagtattctgatcggcagaatattgtcttgctaaagcatcgaaatctccgcctttacgaattaaacctgctaaactatcggctaatttctctgattgagccatattgtttgatgcgatcaagatatgacgggctcttactgagtcgggtaatacacggcggtcggcaacacgaacgatgttataagcattatctttcaagtaaggtccgaacacgccatcactcttttccgtgaacaagaattcatccagttcctcgttatccaattctccctttttgtaatatttgggttggaatcttttttcagatgaaaggttagcgaattcaagcacgttctttgcttctgcaaattcgggtttcaaatcattcacccagtcttccgtttctttaatgtcttcggctgaagcggtaatgtcaaagttcacgtaagcgatctgtctagcttcttcgcgttcaaacaaatatttgtgtgaattataataatctttgatctcgttagcagttacctttactgcagagtcgctaacggtgttgtagcttttcatgataaagctgatgtctactgtcgttgctgcactttctgcaagttctttggcttgagcatctgttacaaacaaactttttgctaacagagtattatatttttcttgtttacgagccgtgtttacttgctcttccatgttcaaccaatattccttttgcggggttccggcaggagcttcgatcaattgtttgatgatcagacgggctctttctttgtctacctgtcccgtgttaggatctgcgaataactggctgacggccgggttcatgttactccctaataagaaatcgtataactcgtcaccgctaacgtccaaacctaattcctcgtattccttgttcagaatgatttcagaaacaatttgattccaagtattttcccggatcattctttgttgctcatccgttagggcagataaaccgttcatgcttttgatgaaatcttcattcttcataatcttttgttgatattcttgaatgccgatagtttcacctccaacttctccaactttgtttctggaacgattgataaggctggcgccagagctaagagcatcaccaacaataaatgccatgagggctaatccaatcacgatactaacaagtactccaccgcgatttctaattttttgtaacgttgccatttatattaaaattttatgtttctacacacgaatttattctatttttcgagggtacgaatatataaaatggattggttttatgcaaataaatttcaatccctttcgtttattgccctattccttctttttcgtttccttttttgttgccttcggggccgctttttttgttgtcttttttgtcgtttttttcttactgtcccctccctttgcaatgatttccatggtttcctcaaaggttaatttgtctgcttcttttcctttggggatcttatagttcactttgttgaacgtgatgtaaggcccaaaacgaccgttaagaatttgtaccccattttcaaactcttggatcttcctgtttttctcgatttctcgtttctcgttgattcgttcgatagcggtttcaagagttattgttcccggatcgtcaacgccttttttcaaggaaacgaaaagttgattatgcttgatgtaaggtccaaaacgaccgatgccgacactgacaggtttctcctcgaattcacccagttgacggggaaacttgaacaagtctaaagcttcttccaaggtaatggtttccatcagttgccctttgagcagtccggcataacgtacggattctccttcaccaatctgagccatcggtccaaaacgtccgattcgtacggaaacggtttctcctgtttgtggatctttaccaagttcccgggctcccgtgttccgttcggattctttcaacgttttctccacgttagcatggaaaggttgatagaatgttccgatcatggattgccattcaacctctccttcggcaatgtggtcaagggcatcctcggcatttgccgtgaagttataatccatgatattcgtgaaataattggaaaggaaatctgtcacgaccattccgatatccgagggaaacaatttcttcttttccgcaccgaatatccggctgatcttcttgacttttatatcttgtcctttaaggtctatctggtctagttgacgttctgtaccatcccggctttcccgtaagatatatccccggttctggatcgtggtaatcgtgggtgcgtatgttgacggacgtccgattcccaaggcttccattttcttcacgagactggcctccgtgtagcggggaggatgcgtcgtgtattgttctaaggcttggatcagggaacgttgtaactggtctcctttatgtattgcaggtaataaggccgcttcatcgtcttctttctcgtcatcgaaagattccatgtacactttgaggaaaccatcgaaaatgatcacttcacccacggcttcgaacgtgtgtttttccccggtaatggcgatcgttatggttgttttttccagttcggcctctgccatttgagaggcgagagtccgtttccggattaacgagtaaagttgctgttcattcttgtctccgctgatcgattccttgtccatataggtcgggcggatggcctcgtgggcctcttgcgcccctttcgtcttcgtggcgaaattcctaggtttggaatatttttctcccagcgtgttacagataacggcttttgccgcaccgatagccagttgggataggttcacggagtccgttctcatgtaagtgatgtgtccctgttcgtatagtttctgggccacggccattgtctgcgaaacagaaaatcccaatttgcgggatgcctcctgttgtagcgtggatgtcgtgaacggtggagccggtttacggctacccggtttcgtctcgacattacttactgaaaatgccgccttcttgcaatgttccagaaagttaaccgtctcttcctgcgtggaaaaacgttcggataattctgcctttaagggtaccgaattaccatttgcgtctttggtttcaaatgttccggtaaccttataatatttttgttcaacgaaatggttaatttctcgttctcgttcaacgatgagttttacggcaacggattgaacccgtccggctgacaaggaaggtttcacttttttccataggactggtgacacttcgaatccgaccagtcggtcaagaacccggcgggcctgttgggcatccacgaggtttttatcaatgtcccgggggttattgatcgcatgtaaaatagcatctttcgtgatttcgtgaaaaacaatccgtttcgtgttctccttcttcaaccccagaacttcgaataaatgccaagcaatagcttctccctcgcggtcctcatcggaggctaaccaaaccgttttggcttccttggcaagttgtttcaattcttttacaatcgctttcttgtcgggtgatatttcatattttggttggaaattatgttctatatcaattcctaaatcttttttttcaagatcccggatatgtccgaaactagattttacaacataattctctcctaaaaaacgttcaatagtcttggctttagccggagactcgacaattactaaattttcaatcatatacgattttcttttacatttccgtttccttccgaaacggatttatcgctttctttaagctgttcgtcctaaaattagggtgcaaacttacgtaaaacaattgaaaatgaaaaactctacccattttttagtaaaaaactctctccaaaatagcgaagaggatgttccttggaaacatcctcttcgagcatattattataagtattccggagtttatttccccgtgtttgcttgaactattttttgccaacgggctttttgtgtgtcatttgcttttgccaatgaaccggataaatagtaagctatcatttgagaatcttttcccagtttcgggagttctttctcgcaagctgtcaagatcttgtcaatattttctgtcttcacagccttcgcaatagctaaagaagacagtaaggttttctcgtttgataacttcagggcttttacttcccgtccgatagcgtctaaacgttttacatcggttttttgaccacgtccggcgataaccattaatatttcacggaaaagaccttcactcaaacggttatcgactttttccttgccaatggtttcgttgaatttgctccggttgtcagtcaagaattttgccgcttctgaatctttcgggcttaattcgctgttaccgaaaatgaaccagtaatcttctgataatttttcttcatcggtagaaattttcaataattcgtccacgatggcttttgcgttcggatcgtaattagctaccatcacttgagcgtattgagataaaaatgctttatctctattaccgctattgtattttgcatctaaagctcctaaagctttgttgtcatcgaaagattccttcactctctctatgaatttctcaccttcaccaccaccgacaagtttatgacgaatggtaccgtccggatttacgatcacgaaagtcgggtaggcacgaacaccgaatttttttgctagttcggggccttctcctttttccatatcatattttaaacagatgaagttctgatttaggaaatctcccacgttttcttgtttgaatacggtttctgacatatacttgcaaggaccgcaccaagttgtgtaacagtcaatgaaaagtttgcgtccttgttgtttcgccattttcaaggcatcttcatagcttaactcatagaaatatacaccaacatgcgctgcgaccttgaatttttcaaagaagttggtcatgtaggctttcccgttttccgggctattggcaatgaatttatctcctaatgctacgatacgtccggcttcggctttgttcaccttggaactgatcgagtttaaggcgtttacgatagaccatagttcttcgctcttggtttctgctgcttgttcagcgagagaaataattttatccacgttctggtcaatcgtggcttgagccaactcgatcttgctcatcaattgatctttattctccaaatcgatattggttaattcttggcgaatttgctcaagtgtcttagcgggttctttcgcattacggcgagtagtattatcaatagcttgactataattaccataaaggtaagcatctactttctctttgccgatatttttattgaatgtggcaatgttgtttacgacaagtttgaaattatcagaaccgtaaggactttcttcgagaataggccagaattcttttttcattttatccttgtctttcagtattttattcaactcttcgcctactttttcgctttttgcttgttcataagcatcgttcaacgcaatctggtaagccatgagctgtttcttgttcatctttcctttctcgtacaccttgttcaaataatcgagagaggtcttttcgttcagccctttttcaactcttgcgatgaatccttccagatccccgccgccaaccactttgtgttgtaccgatccatcgggacgaagaatcaagaacgtcgggtaggctctgactccaaattttttacccagttcaggaccttctcctttttccatatcaaatttcacgcaaacaaatttgggattgaaaaattctccggctttttcctgcgggaagatggtttctgacatgtacttgcaaggaccgcaccatgaggtatagcaatccatgaaaacgagtttgttctctgctttggctttagccaatgcttcatcaaacgtgatatgctcgaaattcacgcctccttgacagaatgccgtgaaactaagcatcaaaaatgcaataattgaaataaggcttttcataaattcaacaataaattggtaaataaagttgcaaggtaggaaagaaagcctgacgctgtcattccatggtttaacattaacttatttttaaagtaataatcatgtagaagtgtagggagagggaaagagtgaagagctaccggttgttaaatataggtgtgatcttcacttcttttatatagtaaatgcttatctaggaggtctattttatat

SEQ ID NO: 35 - DNA, 16453 bp, Butyricimonas faecihominis
gtataaataatatctttttattcataacaaatctaattttagtcatgcgtcatatcataatgaaattttaacagagaacgaaaccgtacgagcaaaaggatagctggtacctcgttcttgcttcacgctggaaagatgcaacaaatccgtcatacccaacgtgaaccgacacatactcaagttcagttttttcgtcaaatcggcaggcatatcatatcctaactccaacgaattccacgacaacatattgtaatcctgtacgaacctagaagtcggcttagtactctccacgccatcacgcccagaagtcaacgctttatacttcgcatgatcacccgcttttttccatctgccagtaagtactcgttcgtccacgttatccgtgtaaacattcacattctcaaccttatccactaacgtttggttataacgctgtccgccagcctcgtacataaagttcgcaaataaactgaattgtttgtaaaccacgttaaaaccgaacattccctgtacagtcggttctgacgtacccagcaccacctgatcggatgcactccaacttttcgtctgacgtccctctcgattcaagaaaacttcttgtccatcagcaggattaatacccaaagaacgtacgccccagatggagcttaacgagccaccctcttcatattgaaggaaaggttgtgattgcaaggccttttccgggtcatcccaagcataagactcctcaaacatttttttcactcgttcattatacgctttcaaactctctgaaatcttctcgattcgattgacattgtgagctaaattcgcattaaacacaaccgacaaatcattccgactgaatgcggacaccctcaaatcgaattcatagcctttattggaaatctctccaatattatcgcgataagaagtaaaaccggtagaagtcggcacagtcacatcattaatcaaatctattgtccgcttgttgtagtagctccccttaacatacaacaatcctttaaaaagcgtcacctctcctccaacatccaacgagttagtcgtttcccatgtcaaattcttatttcctagagcctgtaattttgtactgattcccgttttgtaccaattatcggtcgagatcaagtacattgtgcgtgccgcataagccgggaaattcgctttacccgtttgcccataagaaccacgtatcttcaattggtctataaaaccaagatcttggaagaatttatatttgtgtagattcacacctaaacccaatgaccagaaaggagcgaatcgtttatccgcaccaaaagcagaggatccatcaattctcaacgatatgtcagctaaataaatatctttgaatgagtaatttgcagagaaaataaaaccaagtaatctcctagtgctctcagaaaaatccgtcttattgtacatttccttggcgtactccggagatgacaaatcaccggaagggaatcccaagtaagttgcattatcagaatcagacttagtctcttgcatgttaacaccagccaaagcattaatcatgtgattattcaaaaccttattgtacgacaaagtcgcattcaaatcccaagttaacccatcatcgtgagtcaaatacaaagctccagaagccaaattacctacagacaagtgattcaaattttccggctgctgggaaagagggtcataaaaacgcttggattctcccatcgttttcgtcaagctcaactgccctttcaacaacaacccgctaacaatgctccaattcaacgaaaaattattaataaattcatctgtatccgatttgttgaaattcttcaacccagcttcgtacaacggattcgggcgattcatatcaccgcctgtcccccaatatctcatcgttttgacatattgcccgttctcatccttatactcgtcgtaaggcaactgctttgcataatcagaaaaatcgccataaggtgattcctccgaccgaacccgctggtaggatagttggtttttcaacataaacgtcttgtaagtatattgaagtgagaacccggcacttacacggtcacgcaaagatcctttcatcacaccgtcttgattagcgtatagcagctctataccaaaacgtacattctcaccaccaccgtcaacgtacacactatgcttgtggttaaacacggtttgtaacggcttcgacagccaataagtattcacgccttttgtcacgttcgccaatttctcattgtactcctttttcaaattgtaagggtccgtatacgaatcgttctcatccaccacaaagcaacctgccaaacgctctacttccaatttctctctagcattcaacaaattgtaatcagtcaaatccggaacaatcacatctcccacaaaattataatcaacattcaatttaccagcttttggagttaccgtcgtgatcaccaccacgccattagctgcacgagaaccataaagagctgttgctgacgcatctttcaagattgtgattgattcaatccgattcggatccatatcatataatttggaaacattcacctcaaaaccatccataataaaagtcggcaaattcggattgtccaccaagttggatttcgccaatgcatcactttccaactgcttcactccaataccggattcaccacggatatacacctcgggcaacgcattcggatctgatccccaacgattattctccttaattcggaacgagggatcgaatgattgaagagccttgatcacgttcgtctttgacaccttaagcagatcctccttttttaccgtaacggcatttcccgtaaaactagatgaacggatattactaaaacccgtcaccaccacatcttccaatgtctccacatcctccttcatcacgacattaatagtatccttcccggcatacgtaatctcttgggtaaccatacccacgaaagagtacaccaacgtgaacttcttcggggcattcggaatcgtcaacgagtatttcccgtcgtggtccgttgccgttccgatagcaacgcccttcatctgcacggtaaccccgggaagaggatgttttttctcgtcagaaacctttcccgttataacgatcttctttatttccttatcctcttggacatccctaggtcgcacaacaatcatatttccgttaaaaacgtatgtcaaatctgaattcttaaaaacagatatcaacaccgattccacagtttcattgttcacgtccaaagaaatctttcccaattgctttacttgctctatattaaacaagaaataaagcttcgtctgacgttgaacttcatcaaataacttctccacacccacgttcttcattttcaagctcacgcgttcctgttgagccaaactattggctgacaacgaaagcgtaaagcaacaagtgagtaaaaaaaacagtttcataattactaaaattttacgccatggtcttttaaaaaaagactggcacaatcgtttttttttcatacatttgtacttaaagttattaatacctcaacaagaaactacgccaaatagtttttgttgtacttaattacaaacgggaagtacgccaaatactttccgtttttattttgatacaataatcgtctttccttgaacagaaaacgttacccctgttgataaggtaatcgcctccaaaattacactgacatctttataccgttccatataccccgaaaaatgtagctctttcacggaaacagtttgataaaaaacatccacatcataccagttcgacaaaacagtgagaatatcttccaacctctgattttcaaaacggaaaatgccgtccttccaatccgtataaactgctacatttacctctttcacatcaatctttcgacttccttgcttaaactcggccatctgcccaggctttatcatactctcctctcctgatgccaaaatcttgacccccacactccccttaaccaatacggtttgaatgttcccctcctgatgagtgttaacgttaaaagaagtcccatacacccgaatctccacgccttccatttctaccaaaaatggacgttctgcatctttcgttacctcaaaataagcttcccctgataaatacaccttacgctcttttccatcaaatttaacagaatatttaattcgagtagccgaattcaaatataccaatgttccatctgccaacttcaccttatattccccgccacgaggaacttcaagttcattaaaacgaagctcatccatacctttttccacggaagaagtatatactaaacgatctttttctccggtaaccgttatctccttatcttccgaaatcacgccctcttcctcttctttcaaaaacaccttacgcccatcatccaaaacaagtactgcttgtgaacaccccggttgaattcgtgtaacagacgatgtcactacaggaacttgctccatttcatggatcaacctccatgatccgacaactaaaataggaaataataacacggccgcatatttccaccaacgaccaatacctctcggagaaacttttcccacacgtttttcaaaagcatacaatgcctttttatcatctatcttttcataaacaacccgttcctttgaaaataaatcctcttggcaaacttgttcaaaaaatcttctatttcgagccttctcttcacaccatttctctaattcctgccgttcctccttggttatatctccaagcaagtacaactgtaacaagtgaacaattctatcgggacaatgattcttcatttcataatttttgcatcatatacaaccatgacacaaaaacgaggtaccctaaattcatctttttttgaaaaataatcaaaaaagatgcacgacatcttataaagatatgatattcaatacaattaacaaacaatacgacttacctaatcgttcacgcagaaaatacatcgctttctttttctgtgttttcaccgtttccacggaaagttccaatacttgagcaatttcctcatttttcttaccttccaaatgcaatttgaacacctgccgacaacgctccggcaattcatccacggcccgatgcaacgcccggtacatctcctcacgcattaaccgataatcttcgtcctcttcatcctgctcctgcaataaaatctctgcatgccgccgttcaacctcttggtgctttaaataattcaagcaacgatttttgaccgaatcatacaaaaatgcccggaatccatgatatgaattatactttttatcactctcccaaatagcaataaaaacctcctgcacaatatcttccgacacttcctgctgtctcacataacgcatagcatataataccagatagcgatagaatgaaccaaacaactcacggaaagccggcatttgctttctatttatctggtctataaactcttctggttgcatacccatgtatctctaataattgtttgcccacattattttatgacaaagctatgatttttcaatcaaaaaaaacaaaaaatatatcataaattcaaagaaacacaaaacacccccaaaagctcttatcgaactttggggggttcacacaacatcttgacaattccatactacttatttccgctttctcctcatccacaacaccacgccccaaatcagcaatatagcgggtacaattcccatacacgctgtcttcaaataaggcatcgctttccggctcaagtgtatcttattatccgttcccatggggcgacgaacatcaataggcgcctcttcatcagagagccaatagaacgtacctgtaaccaaagtataattggccgtcatcacccgtaaattcctacggatagaaaactcttcattactgatacaatccgcatccccaagaatcataatcctttgctcacgatcgcccaccttccgggaaagagccagtgccaccgggtacatcgcctccacctctccggccgccgtattaagaatcacgctatcattcacgaaatccctcgtctccatctcgttccagcatccggtcgtatctgtccgcaaaatctccgtcaccttaaatccccgatcttccgtgtaggccaatcccgcggccccgttcatcacgatcttcgcattccggccgatcaacatctcctgaaagaaataagacatctctcccgcctccggcgtggcattcacgatcatcaaatccggttgaatatcctgtttcacctgtaccaaaactcccggcaaaaaacgaaccccgaactgctccacaagaggattcataacatcctgtcttcccacctctccggcaatcaccaaattccctccacgggcgatatacctatctaacttttcctgttcccccggctccaaaggctttgtcagatcggcaatcaccacgatctcaatatcatccggaatatccgaacttccggcaagagaaacattctccacgtcaaacccttgattaatcaaagaataacggaaattcttcaattgcgaaaagaaaagataatccttcgcccggtccgaatcaatcgaacgttctccatgtccggtcaagaacccgactttcggtaatttcatggtaaaccgtttaaatgtcacggccatctccgcctcactcgggaacttcatcatatcatcaaacagacgcaggaaagccttttgcccattctcccgttctacgattcgcacaaaacgattcccctcgtccgacaaatccaccttcttcttcaactcttcgggtgccataaacatcttaaaattcaaatcacgcatatccgccaattgctctgctttctcctttgccgtcgtattcggaaatcgcacgtccaaccaaggattattagaaaccgaatcgtaataatacacgtacttcatcttgatctccggcttaaaccgcaaatactgcttaaacctctccaaatccgaatttaccatattgggcatcccgatataataatcccgatccaaaaaattgacatacgtggtaatcgtcattcctccttccaacttgctcatgacctcctgactgttaggcgtcaaggtattccgtttcgtctccgtcgcatcataatagcacatcatcacgggacgagacgtcacgaatcccaacaacatcgcaatcaccaccacgccaagatactttccccaaaccatggaaaaagaaacccgctgtctcgtggactgcaatttcaagatactcaacaacaggaacatggaaatcacgatcacgaaatacaaaatatcttcactacacaacaaaccgctgatcatctcgttcgtacgcccggaaagacacaaccaatacgtgatgtcccgaacaaacgctatatcctgccacacttgattcatgtaattcagtacggccagaataatcaacgtcccgatagccgcaaccacctgataggaagttaggcacgaaacaaaaagtccgatagccgcgtaagcacataacaacaaatacaaccccagcaaaccggataacgcctcagcaaaagcaaaattatccaccacgcaagccgcgtaaccgatatacaggattaacgttcccaacaacaccaacccgtaagccatcatcgccaagaacttacccatgacaatctgagacgaggtcaccggtgaagaatacagcaacttgatcgacccgctactaaactcccggctcatcaaccccatggtcagtaaaggcatataaaggtacaaatactgctgtaccgtgttatacaacccgaacataccccccaacaaattcgccgtcaaaaatccattcccgaaccccatatcttcccggtaaacgaaatccgccatcaaccccgtgaacttcaatccgacttgaacggtaaaggccacaaggatcagccaagctaccggggaataaaacaaagtaaataactctgctttcgctattttcaatattcttctcataatatacttaatttcttttgacctatatcttatcttttcccttcaccattcgccttgccggataatttagcaaacacctcgtccatggaactcttctccaccaccaactcttccaatccccagccccggttcacgctctgctccgccacccttctcgccgtctcccggcatccgtcataacgcaaacggaaccggtgatccgtaaccctctccacgttactcactccctcccaaataaggcttgcctcagcggggggatttgccaacgttaccatgatcgtgttcggctgtatataattatcaaactgatccaacgtacccgaaaagaccagctgaccttgttctatcatcttaatttcttcacaggtagcctgtacctctgaaaggatatgcgtggacaaaagcacggaacgctcctcggcaatctctttaatcaaatgccgcacctccacgatctggttcgggtccagtccattcgtcggctcgtccagcaccacgaacttgggattatgcacgatcgcctgcgcgattcccacacgctgttgataccctcccgataaattccgtaccagccgactgctgaaatgtgaaatcccgcaccgggctttcgcctcgtcaaccgcctttttcacatccatcttatccaccattcgcagatccgcacaatacgtgagatactcatccacagtaaaatccatgtacaagggtggtttctggggcaagaaaccaatattccttttagcctccaccggattctccctaaaattaataccgtcaacgtaaacctccccctgcgtttgtttcaacaccccgcaaataatattcatcgtggtggacttcccagccccgttcgatcccagcaatcccacaaccccccgctgatctatctcgaaattaatatcccggatagcccactgcacattgtaacgatgagacagattttctactcttacaactgatttttccatacaataattttataattcaaacatctattcccttaatgtaaagacaacactccccctgtttataaagtttacaagctccaaaaacctcgtttacagggttcccgtcacttgataaactttacaaactttatggactttataaattcttgatactagtaagtcttgttacctatcttcgccaaatcaatattatactctttcttgaaatgattcaccaaaatatcatacttctccttcaccaacgggtaagtcaaatcactggcccactgggtggacgtccggcaaagaatacttgccaaaaaatacgtcaaatcatccgactgcaacaacgtctttgtctgccaattaacgtaggtacaccattcattcccgtattgagggtttgccacgaatcctcgtttacgtgcgtaatcatcatcattgggatcagagcttgctttcgttgaataatcgctgattttgtaaaactcctccggtatcgatacagccttccgcacctgcaacaaatcaaaaaacaacatctgcaccgtgttcttcaacgccaacttctcggcagccgtcttcttcttcgtgtccgcattcatataaccgaaagccaacgaattatcacccgttttcgcacattctatcgggcgatccatatagctcaacacctgataaatcgtgtctgccataaaaacccggtacggcaaattctttttcaggaactcttccgggtaaaactgcaaccacacctcgcccagcaaatccaacatatctcccgcataagccggatcacccaaagccagcttatagctagtcgaattagccacctgattccaattcaaatccaacagggtaaaatcatacaagaaataagaaccatacttctcgtacaaatccacgatcctaccatctgcctgcggggatttcccttggggtaacacataatcccgttcaagtgcaacatccggtcccagtgccgagtccttagcacacgagcaaaagagaacactcccgataaacatacctattacatatctttttttcatcatgaattcttttaatcgttcctatacatcattctgctttacgctccggggtattcgccgaagcattctgagtcaaagccgggttcacacccaatacggattccggcaatggtagcgtgtacatcgggtccttcgccttcaacacgaaagtctgcaaagtcagcccttctcccggcaaccacgtatgcttaatagaaggcatcccgtaacgacgcaaatccaaccaacgatggccttctctagccaactccaaacgacgttccttgcgaatttcctccaacaacaacacggggtcactaatcgatacatccgaatacccctcgatacgattccgacgcaactcgttcaaatccttcaatgcctccgtcaccttattgtcccacaacacgtaagcctctgcccggttcaagtaagcctccgaaagacgtatcgcctgttttggagcatccccaaggtcccccgatgcagaagtccccgttttttgaagataataatgccctctaagttcatcatatgcataataaagatccacccgtcggtcgttagcaccataaccttcctccaactcttttgccatattcaaaccattctcaacataaaaacccataccctctccaccatacatccaagtcacctccggcgaagaatacctgacacaagcaaaagcaccattcttctcgatcgccgtcaaatctgccaactttccaccaatccggatcgcttccgtggccgattcaaccgcctctttccattttcccgtgtaaagatacacccgtgaaagaagtatctccaccgtcggtcggttaattctgaaatccgtggtcacacgactctccgtcccgaacaaatccgccgcttccgtcaaatcgtccaaaatccgctcgtacactcgctccaccgttacacggggcacgctaacctcttccaccgaagaagagagtttcaaaggaacacctgccgcctgtgggttctccgtgtaaggctctccataaagattcaccaaccagaaatacaacaacgccctcaccgacaaagcctccgcttttatatgatttatctcctgttgcgtcccgatagcctcatcgatataatccaacacggcattacaccccttgatccgctcatacatcaaataataaggagtagacgccagttccgggctcataatcgatccctcgtacctttccgcatcactctgccacgtgaaaaccggaaaaacccctttagccaaatcgctaccggccatactatttctcaaatccgagtcaacatcatcatccatatatccggtcagggccaagggatgggaattaatgggagaaggataacccgatcccaacaacaattcactaaaatcttttgttgttttaggaatcacctcatcctgagacttggagtccaaaaaatcggaacaagacgtcgtcaggattcccaacgcacatattatcaataaaattctttctttcattttcatatcgtttatcggtttcactcgttaaaaggtcacgttcaaagaaagagacgtcgtccgtcgtgcaggccaatccttcgtctccgggtccaaccccttccatgccttatcaaaagcaatcataaacgggttactcatgctccaactgatactcgcgtacttcaagtgaagaacccttaaaatactttcacccacgctatacgtaagcgatatttgacggcaacggatcaaatccgtgtcggccactcgcaaatccgactggctgtacatggcataaggagtcatcgaactcgttcccgacaacacgggtaacataacatagccaaacgaacttgcactattataattcggtaccgccgggatattcgtctgatctcccgccttccgccaacgtttcttcaactggcgcgaaacattctcctgcggccccggaacacctttcaacgtaccggtatacaactctggcaagcgatcctgccctccaaactgcatcgcaaactgcatggtaaacgacaagcgtttatacctcacctgcgtgttgaaacctcccgtgaaatcagaatcaaaattcccgctacgcaccaagaactccgtgaaatcattcgtcttctcaatatccatgttatggaacaaaggttcaccattctcctgacttaactccttatatcggaaagaatagaatgaattatacgactttccattcaagaccgccgaaccgtccaagaaatcttccaacttgttcactcgttcattatccgaaatctcattcgtcacttttcccgtgttcacggagaatgaccaagtccaatcttgtgtgcgaactggaataaaattaaccgtcacctcgtaccccttgttatccatttccgttccgaaaattctggaattcaacatcccgttctcccccggaacctgccgggaagcgataacatcactctttttcccgtaagcattgaacaccacgttcatccgccccttcaaaaaagaaagatccacgctggcattccaagatttcgttttctcccaacccagcttctcgtaaggcaaatactttatattcaacgtatactggttataaaattgactcaatccaccgtcactggcgatcaaataaggagacacctcctccaccgaatttccttggtaaccgtaagacccggatatatccaaagattccatccaattccagttccgggcaaacgactcgctacccactctccacttcgccccgatagaccaagtcggttcgaaacgatcgttcttatcctgtccgaaacgattggacgcatccaaacgggcattaaaattcacgacataccggttatcaaaagaatataccgccgtcagaaactcgctgacataattattctcccggttcgtcacggatgacgcggtcctcatggtattcaaaagaggattctgttgtgccacggcattatacaccgtggtataggtcgtcgggaccgacgcgaaagcctctccccggtaacgcaaataaccataacgtgtatttctcgaaccggtcgccgtgttggaagaaacttcaaatcccacctgtaacgtcacgctatgcacttccttgaataatttattaaataccagactattccggaccgaccacgtgtttgtcgtggcattttctgtcaccagtaaaccaccaaaaggtaactgcgtcatcttctcttcattactattcgccgtcacctcacccacctcgtaaccccgaagagaggtaatataattggaatattccgtggcatacgacttcacctccgaggaactcaccgtgtaagaaaccaacccttgatactccaaataaggcaaaatcttccacgaaacatcaagactcgaagacaccatcttcgaccggttctcgttccccgtgttatttatctcattcaagatattatacccgtaccagctcttcccagaaatagccgtactggaacctccccatttctcgtgatagtacaacgtgccatcctcgttacgtagcggaatcgtccgcgccgtgttatacgcgtaactaaacgggctcacgccgtaagcgaaaccgaacatctcccggtaactaccgttcaggttcaagctaatcctcaggttcgggatcaactgtaacaccgtgttcgaactaccggtaaacgtcttcccttcatttcccttggcctcgcctttttcctcggtaataccgatagaagctcgactggctattttctccgatcccccggtaatactcaaattatgcttgtgattaaaagaattacgaaacaaaagatcaaaccaatccgtgttattgtttgccatcttgttatactccgtctccaactgctcgtgagtaatctccttgttcgtcagcttctgaaccaacccggcatacccgataggcaatatggcactgggatagcgcacccgatcctcgtacatctccttggaaaactccatcaattcccgtgaattcatctggttgtataacccgtaacgcggacgctgaccaatactgaaacttcccgaataggaaaaggatgcggaccctgactgcgcctttttcgtgttgatcacgatcacgccgttcgccgccttcgaaccgtagatgacagttgccgacgcatccttcaacacggtcaacgactctatatccgagggattcaaccaagaaatcgcattagcggcaatatcccgtaggttatccaaatcactggaaagagaggcatccgtctcgctgatcggaagcgggtctcgctggatgaccccatccaccacccataccgggtcctgactacctaacaacgttgatgttccccggattctgatcttaggagtcgaaccgaccattccggaagttatccgtaccgccattcccggaatcaccccctgcaacatctggtcaattgtactttcccccgggatcataatatctctcgcatacaccttgttaatcgctcccacgtacttactcttgtccaaggtcatgtaaccggtgacaaccacgtcgtccaacgtctccacgtcctccttcatcaccacgtcgatcgtgtctttcccagcataaacgatctcttgtgaaaccatcccaacaaaagaaaaaactaaagaaaacttctccggggcattcggaatagacaattgataccttccctccccgtttgtcgctgttccaactgaaaatcctttcaactgaacggtcactcccggtagcggttgtttcttctcgtccgtcacctttcctacaagacgaatcactttcgcctgttgtaatgaagcctcccgcacgataaacaccccaccttcctcgaaaaactcaaaacgggtatctttcaaaatttgcttcaatgcctccgcgatctccatatcggtaatcttcatctcccgacacggcacacgtttcatcttcccggcatcatacaaaatccgaactcccgtttgatccttcacttgttttagcacctcgttcaacgtcgtttccgctttcaccgaaaggctcacccgttgggtaaacgcactcgccgaggtgaaaaacaacaccacaaaaagtaaagctagtttcatgacttgtaacatttttctgacacaatgtggtcgtacccacacgttaggtggattttttttcataactttgtttcagtttaaagggtttataaactctaaatacaaaggatttgattctatagtttggtcgctggcgaatcgaatccttttattttactttccgcacataaataactttattttgaatttcaaattttacatccgtacccaattcaaacaaccgcaataaaggctgtatatccgaatatttatccaatgttcccgataactccagttttttcaattcctcggattcaaacttcacctgaaaatcgtaccaacgggccaacgtcaacatgatctgatccaaatactgttcctcgaaacagaacagattatctttccaagccgtgtacaaccgggtattcacctttcgaaccacgggtaaatcggaaccttccgtacaaaccaactgttctcccggcttgatcagcaccccctttcgagaatctttcaaataacaaatactccccttttccagcgtcgccgccatcgttcgctcatcataaaccgaaacattaaacgctgttcccaacacttttatatcacccatcgaagtctccaccacgaaaggatgagcggcatcctcggtcacgtcaaaataagcctcccctttcagatacacttttcgctctccccccgcaaaatgaaccgggaaacgtaattccgtctctgaattcagccacacttgagttccatcggccaaagtcaaatgaaattcacccccgcgtggtatcgtcataacgtgatattcctgcaccttttccgttgccacggaatccacttttattccataaactacccccatcgaatccacttccaccacgccctcttttgtctcgattttcgcccgcaaagcatcattcaaaacaagctcccgaccatccgccaaatgcaaaatcgccttgtttgttcccggttgaagagccgaaattactcctagtgtcaagtccggtacgttcttcttctgagaaagatttcccttatataaaacaacgatccccacgatcaataccaaaacagcggcaacgcttcccactcgaatcataacccgacgtgaatttctccgtcgtaatttcctaaaagccgcctccgcatcgaaacgcccttgttccagtcctttcccccgcagataatccggatcagacaatcgttccgtaacacggcgaacgataatattttcctcatcaagagacgaagaggaaaaatcttcctccaaataagtcctgactcttttggaccattcatatatttgactccatcttttcatttttttcatgtgtctttcataaatagaacacatgaccccaaaaaacgggtgacaaatatttttgaaaaaaataaataaatatttattcccatcccgtttgccctttacaaagactctcgaggatgggaatttcaattttttacccggatcaatcgtaattgattctataataagtcataagttattgccgattctatcccaaaaagataattataacatgatcactacc

SEQ ID NO: 36 - DNA, 16079 bp, Butyricimonas faecihominis
catatatgtagcaatgaaaaaatatttattatcaatactttgtggcattcttctgctccctgggtgtaattaccttgatatggtgccggagaaagacattgaaacgattgaatcgctttttgagcagcgcacgaaagtagagctttggtggaaagggctttatgccgagttgaacaatatatttgccgattttagagtgaatacggcttatcttggagcggatgaatttgtgacgtgtcaggcgttgcataactctaccatgtacaatcttgacgggttaaagattgcagatggccttcagatgtctcagaatccttacgggtcaatctggtacaggatgtatgttgttatccgaaactgtaatattttcctcgaaaatgtggatcatacgtataatatgagtgaggaagatcgtaactggtggaaggcagatgtgaaagcggtgaaagcgtatgtttatttcgaattggtgcgtcgttacgggcctatttgtttaatcccacagaatatgccggtagatttgccggtgaaagattatcaattacctcgtcaacacgtggactcttgtttcaaggaaatcattaatttgttggatgagtccatggaatacgtgccaaaacatagtcaaagaatatctaattacggccatacgttcagcctcgaagcggtgtatgcactgaaagcaaaagtgttgctttatgctgcctctcctctttttaacgggaatgcattttattccgattttaggaacaaaaacggggaattgctttttaattccacttacgatcgaaataaatggttattagctgcggaagccgctgataaggcagctgaaatgtgtgaagaaggcggacgggctttaatctcgggagcaaccgggaaaaagaccgatttgttgaataagatggctgatatagagaatatgtcgttctctcgctttagcaattctgaatacctgttggaatggaaatatccatctccattttatcaatttattttgccgcggttagtcggtgatgatgataattttgactctcaggcgttaggctgtctttctccttccatgaagatggtggaaatgtactacacggcaaatgggttacctattgatgctgatattacatggagttatagcaatcgctataaattggcttccgagagtagccccgtgtacgagggtgtcattccgatgaatatcgatgtggtgaatcttcatcttcgtcgtgaacctcggttctatgcttgtattgcgggagataggatgtattggcaacgagggacgaatacggtagataaggactataattttcttgtaaaggcacataaaggagaagagccatgggggacgcaatatgactttattgtcagcaattcatggcagaatatcaacggttactggttaaagaaacatttgttttcgtggtttaatactttgggatacgctaacaatctgcaaggaaatgaaacggcagctatcatccgtttggctgaagtttacttgatgcaggcggaggcttggaatgaatacttggatcaaccggatagcaaggtgtatgatccgctggataaggttcgtgaacgtgccggaattctacccgtgagagaggcttggggaagttattccaacaacccggtaaaagtaaccacgaaagtcggaatgcgggatattattcatcaggagtatagcgttgagttcgctttcgagggacatcggtactgggatcttcgccgctggttgacagcccatcagacaatgaatgaaaaacaatatggctggaatgttatcgggaccacggatcaggccttttataactatgaaacgggaccggttgtggtatatagcagtaataaatttattgccccgcgggattatcttgatccgtttgatgcagaagagattctgatttccggaatggtacagaacccgggatggggaggtaaataaatgatggatttacgtttgtaaattttaatccttaaaaaagatagaatgatgaaaaataccattttcttattattatttgtgttcgctttgtttgcctgcgaggacgatgattcggttttcgaaccattgacggaaggactggagatcaaatttactccggttgcgggcggggcgatgatgcattatcgcctgccgaataatagcgacatctttgccatgaatatccgttacaaggactggcaaggattggatgttttgaaagcctgtggatatagtggtgactcggttttgctggatggttttaccagaagtcaggaggggataaaggctcagatctcttttgttaatcaaaataacgaagaatcgggagcaatggactatcaattttcaacattggacagtgcgccttggtctttcttcgatgatttgacggtaagatcctcctggaatggttttcaggtgatctataagagtccttcggtgattaccggtatggttcatgttttttacttgggaacaaatccgttgacacagaaggaagatacgattctgatgagcagtttcccgattactcaacagggagatacgcttaattttatacagaaacaggaaagatcaagtaacacggtcattgttcggacggaagattttcacggtttccgtgtaagacaggaaatttatccggacattgatgccttccgggcggagcaatggaagatgtctgcaagtgactttaatgatttcggcttgtcgagggagagtgctaaggctaagacgggagtggaatatctttttgacggggaattgaaaggtttggagcgcttgatcgcttccgcttatgaagacaaagattcgcgtcaggggacggaagtttatggagcttatcttgccggtccttatgcttatggaaagccgatgattctcgatttgagagaacagaaaattccggcatggattcgtatttattgtctttatccgatacttgctcaatatgcggttggtcaggctacttggggaaatgtgtggattggttcttacgaagacaaggtgccgtgcaaaatttcggtatatggcaatagtacctccccggatccggatgacgaaggatgggtttacttggggcaattggatcagaatcccaaacgcgaggcggtaaccaaaagatggtcgcatcttacaacagatctaatgtcggctcctaaagacgtgaatgatttggaaacgaaggacccgatttacgtggatattcaatttcctcctgtaaacaacaagtatcgttatttgaaagtgctggtactcgacacgtttgacacgtcaaaagaagacgggataaatcgtaatttacaagagtattttacgttacaggaactggaagtttatgtgaaaaaggattaagttatgagaaagagaaaatacatcataaatctatttgcggctgccgcgttgttggtgggatgtggtgagagcctggaagacacgtatagtgattatgccggagacggaaagatccgttacgtggcaaaatgtacagaggttcatgccactccgggctgggaacgtttgcttgtggaatggataaacgggacggatgcaaccgttgataaaatcaaggtgatatggtcatgtgaagacctgaaggattcggtattacttcccagtacggccgagtcctacgagctgaaaaatttgacgaacgggacttaccgttttgacgtgagtgccatagatttttcgggtaacgagtctttggtggaaaccacctatggccgtccttacacgagagagcacgagatcatgctggccttcacgagaggtgttgtgaaaccgtacttcctgaaaaacaaattgattttcttttctgatcaatggaatgagaatattgatgagattaaattgcaatacaaggatacacggggtgatattcaatattatacgtttgacaaggaaacgagttacaatgcttttatcacgatcgacgatgtgagcatgaacccgacggatacgatttatgtgcttcggaaaggaagggtggaaggctgtccggatcagattgagtttgatccgctggcattgagccacacgaagatcttcagttcgggatttgtaaatgccatcgaacgtcgttatggttattcaaacaagacgaaagaacaggaagtggaatttgagaaatttgtagagggggtgacagagttggagtttgattacgatatggaaacttttgaggatgtgttgtattgtccgaatttgaaaaagctgatatttgcgaaaaatcggtatttggattcgaagtatacttattcgacagaaaatgattatcccaaattacggagtgatataggaaggagtcttcaagttttggataaggccagcgaaccggatgtgttgggattgaaaatcgaatggtatggtggttggaatattccttatttcgaatccgaagaacccccatatatggaatacatgggatactccccgcttcccgagatggaattgattgcaccggaagccttgaaaacgtatgacaacgggagtaaggttaattgttctccttcggatctttatgccgacttggatgctttgttggatgataattatcaaacaacatggaccaccacgtctaatacggttcctcgtaagtacgagatggctatggaattgctggaggaaacagagattagcgggataaagatcgcgcaacccttgtatcacccgatgatggatcgacggatgcaatacatcatgccttctcagatttccattcaagtgtccacggacggaggtcattggcagaatgtcacttattttgaaaccaatgaactgggacgcggatcgggagaagttactttgttgaaattcccggaaggttcccggcgggtacgctacatcaagtttaccttacaggatggaacggacccgggtggaaactgtgcgattgctttgggggatattcttctctttaagttgaagtagaggacggtatctcgatatgctcgcttgagcaattttgatgaatcattaaaaagggggagtctggaaagttgttttttaactccctccccccttcggggtactccctctataaacagagggagagctgagttgcttaccgtctttggtaagagttaccagctcctcctctgttcatagaggaggtggccgaaggccggaggagtttgtttcgcgacagatagaacttttcggatggcccctgcaaatagatcgatatgctaaaaatcaatcattttaccaaactcttttttagcgggatactcttgttgtgtttttccggggctttcgctcaagagcaggaggatcgtctcctgcaactgatgaaacgggagctggcgtatagcatggagcaactgaaaaaacaggaaagtgtcccctattacatgaacttgcgggcgatggacgaccgcacgataacagtcgtgagttcattcggggccgtgactacctctaacgagaatcgtatgaggacattggtgccacaagttcggttgggcagtccagatttggataatttcaagtataatatgcagggagggtttgccggacctaacgcgcaaggagcgcgaggggtcgttttgcctttggatgatgatgccacggatgcgatccgggaagcgatttggcgggaaacgttgaaacgttacgagttcgcccgtaatatgtacgatcaggcgaaaacccgggccacggtgagcgtggcagacgaggataaagccccgtgtttctctgatgctcccatggaacgttattacgaggctcccttggctgccgggagacagaaaatggatattaagcgggcttgggaacagcgcctgaacgaggtttccgccgtgttcaaaacttgccccgagttaagcgagggatcagccagttttagttttcaggtattgcgcacctatttcgtgaatagcgaggggagcgtggtggtacaaaaccggattgctacccgggtgatgttgatggcctctttgaaagcggctgacgggatggaactgcccttgaacagagactattttgcttacacgcccgatgacttaccggataatgatcggatgatcgcggatgcacgggacatgatcaaacgcttgctggcgttgcgcgatgccccggtggctgatccttacacgggacccgccatcctgtccggtcctgccagtggggtgttctttcacgagatctttggccatcggttggaaggccatcgcttgaaatcgggcggtcaaaccttcaagaagatggtgggagagcaagtgttgcctgttgaatttcaagtgtattgcgcgcctttgttgaaaagctatgccgataccgatttgtacggtcattacgtgtatgatgacgagggagtgaaagctcgccgggtggataacgtggtgaatggcgtgttgaaagagttcttgatgagccgggttccgctggatggtttcccgtcaagtaatggccacggtcgtacttccggcgggggagaccccgtttcccggcaatccaacttgatcatagagaccactcatccctacacggaggatgaacttcgggccatgttggtggcagaggctcaaaagcaggggaaggagtacggttactatttccggaccgtgacaagcggtttcacgtacacgggtgagggcggaagtctgaactccttcaacgtgactcccttggaagtgtaccgggtgttcgtggacggtcgcccggatcagttggtgcggggggtggacctgatcggaaccccgttatccatgttctccaatatcgcggctgccggagacaagcccagcgttttcacgggtgtttgcggcgcggagtcgggatgggtgcccgtgacggcatcctctcccacgatattcgtgagtaagatcgaaacgcaacgtcgggcgcaggctcgtgatattgccccgatcctgccttccccgaaaccggaagtggtgaaagagaataatccggatgatgttatttttgccgcgatgcgctccgaacaggaacgtaacaaggcagctttagttcttcctaacgggccgaaaccttattatatttcgtacacgatagcccgctatcgtcattttcaaatggcggcctcgttgggaggattaatgctttcgaacgtgtccccgtggcaaatgagtggcggcacgcaggtgttgcttggtgattaccagagaaacagtgacgtgcagtatcaggaacagatcgctcccgcgcaattgccttcggaggtggactatgacgtgattcgccgcgggttgtgggagtcgtccgatatgatgtacaagtacgctttgggtatgatggcgcagaaaatgaattacctgcaacagaacccacttccctcggaagaggcggcgttggcagatatgcaaccgctcccggcggttacccgtgtacaagagcgtccggaggcctacaagattgatcagggtgttttggaacggctcgtgaccgaggtgtctgccgtgttcaacgaatacaaggagatttataattccagcgtggcgatcaacgggatggaggtggatatgtaccgcctgacgacggaaggggtacaattgaaagagccgggtggatacgtgagtgtcacggtttctgcggaagtccgaggtgacgacggttcgaacttgggggattcgttctctctttccctgttgaatccggcagagattccttcggtggaggagttgaaagagcgggtgaaagcgtttgccgagggattgatgcaattgaaagcggctcctcccgtggcggaatattacaatggcccgatcctgttcgagggtggtgccgtggcaaccatcttggccaataacttgctttatcgcggcgggttgattgcggcccgttctctcatgcctatggggcggggattggcggatcagttcggtcagaagatcatggacgagcgcctgacggtgaagaactacacgaacaagaaggaatataacggaaccccgctatacggttattacgaggtggacggggacggtgtcacgccggaagcggaaatggtgctggtggaaaagggcgtgttcaagaaaatgctgaacggacggatccccgcgttgaaggctccggagaccacgggtagttcccgtttcatcatgtcaccgcaaagcccgacgttagtgacgggaacgggaacgatccacgtgcaggcggaaaagggcgttgctcacgagaagatgaaaaagttgttgatcaaggcggcgaaagcggccgggcaatcttgtgcttacatcgtgagaggtatttccgggtcggcacttgtcgtgtaccgggtggacttgaaggacgggaaagagacccgtgtccggaccacgggtttccgtatgccggagctgacaaaattgttgaggctggttgccatctcctcgaaggaagaggtaatgaattacttgccgaacgcttacccggcctcgatgatttaccccgcggggatgatcgtggacggcatggtgatcgagaaggctaacccgaagacggagaaggaaccggcgttgaaactcccaagacagcgggattagaacatgaatatcggaagtgctgaaagtcccgttcgttacggcgggcgggctttcagtcacttctctacaacaaaaagcggaaaagatgaaaaggattttatttacagtatgtatgttattaggttgtgtcctgttcatgatggcacagaataagggctacaaaattgagggacgtttggccaacacggtcaatggtaagttgctgttggttgtcaaaatggataaaggaacgattgatattagcgaagctgatgttacgaatggggttttcgaatttacaggtcggatgcctgagatgacattggtttatctgatgccggtaaaaaagaatgccgtgctggcttctttcatgctggaaaacgctaactacacgatcacgatgggcgcaaacgaattgattgtggagagcgacggggaagcgcagaaagtatggaaagaattttatgatttagataagtatctgaaacaaagccaacaacagttggatatgcaagcccgggcaaatcccccgcaattacagagattgcaacaggagtttaaaaaaatagtggcgaaagtcgaggctgacgagttggccttaataaagaagcataacgactctcccgtgtctgcatttgtgatcgcttcgaagttaccgcagagtctggatgaggtgaaattagccgaacgttatgatgctctgagtgaaaaggcgaaagcaacttcctacggcaaacagattgcagctgatctggaaatgatgaaaaaagtcgctgtgggggaaatcgctcccaacttcagcgccccgttggcggatggcggtgtactttcactgcacgagacgaaagctaaagtgaaagtcgttgatttttgggcttcttggtgtggtccctgccgggcagagaacgtgaacctgataaagatctataagcgttatcgcccgaaagggttggagatcatcagtgtttccattgatgataacaggcaggcttggttgtcggcaatcggtcaggatggcagcgattggaaaaacgtgtccgacttgaaaggcgggcaatctgagattgctaccgcatatagcgtgaagggaattccctgcacctttatcctcgatggtgaaaaccgtattgtggctaaaaatctccggggaaaagacttggagaagaagatcgacgagatgctgaaaaagaagaaatagcaagtgtgaggagtacgttgaatcgggaccgcctctaaactcatccaaggggcggtcctttttttaacctttaaaatttgcgattatgaagaaagaattacttgtactctgggtaacgggtatcttgatttttttatcatcatgcgcctcgctacataaaagtttgtcgaaaaaggagatgaccaatgctgttcatgcaaaaatagatagccgggaatatcgaattgatatgatacctaggccttttaccagtgagggtggtacgctgtatgttccgggttatattcaagtgtgtggggattcagtcatttcttgcatgacctatgataatccttatccgggtacgtttccccctaaaggttacgtggagaacatgaaaggcgtgaaatatgaaattttggactaccagcaaacggaaacccggagagggcgtcgggtcgtcagtttttggttcaaaataaaatacgacgagtatgacccttacacattggcaagatttaaagatcggattgttccgatgcgttacagatttgaatttggcaattcgaccaaagtgcgtgttctccagtttgaatatctgatgtttggaacgttgtccttgtagaagggtaatgtggataatttgttattaaccaataatttatgagtgatgaaaaaattgaagtttgttccatggatatttttagcttgttttcgtgtttttgttccgatggaagtttccgggcagagcatggttcttatcgagagggatactttccggatgtattccaatcctttaaacgcagattcaacattggcggccaaggtgtacgatcgggtatattctcctccttatattcgggatgcgtcagcgtattatgggtggtggcgtttgcaggaggattccttatttttggagaagatcgaagatacctatggtacgatgcgttctgatgatcatgaagtcgtgtttatggatttaggcggtatttttgatgattatgtgcaagatggaaaagtttttgcctcgtggtttagcggggagctggatgtggtaggaggaaaatgtatttatgagggtgctttgggatttcgatcggattacgaggatgaatggatataccgggtagaaaacggacgaatcatgtctaaagcgacgtatcgtaacgagctgagagaatcaacgttctcctatgtagaggccgggaatttaatcacgatgttatttaacggggattgttttccggaattggcgaataaatatttgcttgccaaagtgcaggtgacaccccggcctgacgggacgatagatagtctcggccttgccgtgcgagtggtgtcgaataaatccgctatcggacaagtaagagacgatgacggacaatgggtagagaatgattactccaatccttacatacaagaattgaaagagtgcgtgcagcttgtgcctgaatgggagtacgtgaagttacgcggtcgggtacatgcgccgttgatggaagtgagagcatgggagggcaagggatgtaaggctatctgttcggctactttttgggttaacaaggatttcgatgagattaccgtgaacggtaagacttacgagttggagaattaccctttccaatataacacgaatctttacgcccggattcgtcccctgttgcggggtgagttcacgcgtttccgtttgcggggatatatcgggtactgggaaatccgggacgataaactctacttactctcgctccgacgggcgaattcatgggaaataatccctcttgatgtcgtttttcccgggaatggcgataacccggtggaggcaacgtggtacacgggtaagttgcgtttgtcggatgtgcgaagtgctgaaagcgactactgtccccgtcacggtcgtggggaaattttttacaaggtgaaaaagggaaaagtcatcaagcggatgaaagtcgttcctgtaaaaaagaaaaaagggaagatttcccgttgggggaactatcattttgatttggaatagttttaagtgacattttgacttaggcaatgtctgtttggtcttttgttttccgggtttatttgcgaatgtcaataatcgctacagccgccggggcagattttacgaggtgtaaaatcaatcatttatggaaaacaaaaagaccaacacgttaatacattcaagcgaaccccgttacggcgagggacatatatttctttggtgggagaattattgccggcggcttttgtacgcggacattctttacgtcgagggatcgggcagttacagcgagtttcacgcgatcgacgggagtcgggtgacgatttcttatcgtttgggggtgatggaacgctctttgccggacgacacgtttatccgggtacaccagagtttcatcttgaactggcattacatcgatacatttgtgggtaacagcgttaaaatcggtgaccgatggttcccgattgggcgggcctatcgtccccgcctattgcaagtgctgcacttccctgaacttccccggcaaaacagtaaacaggagttataattatcatctttaatcatcaatcggcctggtgaatcggccatcggcggctttactatctcttgaaatttccagtatatcatagtagtgatgccatgtataaaggaaggtaaatcacctttctgagaaatttggcactataaatatacacctttctaacgtataaatgttaatgtttccgatttaaatttaatttttatcgtcgataaatcttttctttatctttaaaatgtctcttgtgagggtatattgatctgcatgagatgtaagtttcttggtttgtattaactcccaagtattgttgcttgatattctatcgggtaatatccattcttctgccgttgagaatccaatgtagttagggattaatgacgtatcattttcgaatcaaagacgaatcaaagacgttcagtgggtgtctttgatgcgggagaaaggggagattgtctcctctttaccggggatgtttgacggttgttcatcgctttgttctacggtctgttcagggattttcttttatcgggagagttgtgtgttcacgagtgagggatttggatttatagcgaatatgaaacgtaaaaggttatttgtgaaaacatcctgtcgcttgtgaattagagttttatgtcgaagatgcaggctctatctttgcatcagaaaacaaagaaaactttaaaaacgaacgagtgatggcaataacagaagagaatattcgaggaaagatcgggaattcgattttctaccgggtgggatcggtgacacgggtgaggagtgtggcggcacggtatgcggatgcgaacacgtcaaaacagagggaaagccgttcccgcttgagggtggcaatacgtttttaccgacgtttggcggagacggaattacgaaaggtgtggtatttggcaacaaagggaacggggaaaagcgggtataatttatttttgaagttgaacatgatgatttttaagcctgacgggaagattggggattttgcccggttgcagttgacggtcggtcggttacaaaaagtgaatcatctcgtggtgcgtgttgatgagggggatgtggtttctgtggcgtgggaacgggaggaagatcttccttctgcgggaaaagaggataagttcatggttgccgtgctttatgccgatcgttcgttttccccggagttagtcaagacgagcggggagacaaggggtgacgggaaagccactttccgtttgcagcgtaaacggggaacggcagcccatttgtattgtttctttcgggaaaaggatgggaaggcttattcgccgagccaacacgtaagaatttaatgattttagatttatgattttagattccagccgcacggggccttactgattttagattttaaatttaaaaattcagggattgggtgatttccggttgaaggattactttatgaaccttataaactttcaaactttataaacgaacaaaagacgaggcgtttagctgttccgggcgtgtcgttacgagggagacgcgggcgatgataaaagggaacgggtaactttaataataaaaacatggcaaaaagagagacaagtaaaagagaagaaacggcgaacgtgcccgtgcaagtgcttgaggaattaagaaaattgcgggaagaggttcgactggcaatcgaggcggcatcaaatgcttcctacaggttgatggatgccgaggagttgtgccgggcgatgcaaatatccaggcaaacattacggcgttacgagaaacaactccttatcccggagaggaaggtgggtaacaagaagttttacctcgcggcagaggtgaagaattgtatcgtcacggctttacgactttggaaggagtgaagaacgtggtcggggcggttggcgaggtgatcgaccgcctgacactcccggcgagggagaagcgacaactgcaagtggacttgctgggattgctggcggaacacgagaaggagatggcccggtcccgttcggcagccgtggtggaagaggcccgggggaactggttgcagcgatcgtggcggccactggtgatgctggtgttcgccttgatcgtcctcgtggggacgttcacgacgctgcccatcctttccgatacttcccgcttttgggatttgctggaaatcggcctaggcggttacgtggtgggaaggagcggggaaaaaatggcggaggcgatttttaaggtaaaagctaaaaagtaaaaactaaaagttggaaaaagtaaaaggtaaaaacttgattaattaaatttttattcatgggaatttcaattttcaattctccattttcaattgtcaaccatcgtttgatgggtggcggggtggttcacctggtgagcgcgaagaacacccggcgtttggaggggccggacatgatcgtgctgcactacacggcgggaacgagtgccgagagttccgcacttttcctgacccgcccggacgtttcggcctcggctcacgtggtgatcggtcgggagggggaggtgttccagctggttcctttcaacatcgaggcgtggcacgcggggaagagctggtacgccgggcgtggcgggttgaaccgttactcgatcgggatagagctggataacctcgggaaactccggttcgctgggaatctatttattgcggagtgtggccgggtggtaccgccagaagaggtttacacggactgttccggtgatcgcccgacgtactggcattgctacacggcaaggcaggtccgggtgttacgggaggtctgtagcctgctggaagagacttacccgatccgtgacgtggtgggtcactcggtgatcacgccgagaaagatcgacccgggtccggcgttggaattcgcctttagcgaatttcaagataaaaactagaagttaggaactaaaaatttaccttccgggggcagggcccgccccgggcatgtaaagttcattttcaattttcaatttttaattttcaattgtaaagttatggcagaatttaactcgtatttactgggaaaagcaagaaaatcagtgggaaacatcacgttgtgttacacgagagggaagaacatcgccaaggcgaaggtgttctcccggaaggacaacccgacgccggagatcctggcccaacgggcgagaatgaaagcgctggtgcagttatcccggcagttgttgccggtgatccggaaaggctttgccgggatcggtaagggttcggcagcgaacgctttcgtgaaggtgaacatgtcccgggtatcggtggacgagaagaacgtggcaaccgtggatctcgaccgcttgctctgcgcttccggtatgttgtacccgccgaaagtggaagtgacttactcggaagagaacaagatgtattctttcatgcaggagatgcaggacgaggaaaacggttacgccttcagcgatgacgtggtgtacgccatgttgtacgagacggtacttggacgagcccgcctggtgacgttgcgagtccgtggggagaacggtaacacgagttacgctctcccggaggagtggagtcacgagaacgtgaaactgtattgtttcgccacgttgaagaacgggaagagcgcttcggatagccaggtgatgacgctgtaaattttatggttcccgatcgagtgatttcgcgagaggaacgagttttcacgtttccggcataggatccatgtcggaggcgtgaatcccattctaaattctaaactttaaattttaaactatcaaaatgggtaattattttttgatcggaatgttttcgacgttgagttttaacgccgtgttgtcgcagatggcggacaacttgttggcaggagttttcagtatcgttggtggggtgatcagttcgctggcggtggcgtgggtgaaacgacgatgggagaggaggggatagcccctcacttttgggg

SEQ ID NO: 37 - DNA, 15799 bp, Butyricimonas faecihominis
cttattaacccgatataaatatatttcaacatacacttcttcctttaattgtttgtattcaattcagatgcaacaggccaatcttccggtatctccacaccggggaacgtcatgtatcccttatccgcttcattcgtattttccggatcttgaggcatctgcgtcggatctccggcctctataatcgcattcaggtaattggcgaaataaacattcgctattaatattttattgccaatactactttttatttcattatccgaactaaaccaatcggtagcctcaaatcccatttcctgattaaagaaattaaattttgcctcagagaaatatcccaaaaaagattccatccacatggacggtttagttagtttactcgtaaacatcaacacgtgacgagtaacatcgatagtatccttgtccacaattttctggggtatattttgcaggaaatattcattggaaaccaagcgcaactcgatagaaaccgtagcatctcccaagccttcccggtaaatatgaataggaatttccccgtacacgctgtccttaggcaagatatactcagattgtaactcgtcataattcgttccggccacagccgtcgcactctcaattttcaccttaaatgcacggtcacggtcaaccatatcccctaaagccctgacagacaatctaacaatcgtatccggcacattatacatggcaaaagaaaagaccgttgtatccatatacacgttagacacaccagaagtcaccttcgggtaacagaaataaatgctatccgaacctttatacaaatccaatttgtcttcttcacaactccagcaaagcaaaacaattcctaaaaatatcaatatttgtttcataatccattcttcttaatctcgtctgttatcagtttcactctcaggtaatggaataatataattgggtttcttggagccattagggccggaaacagaagtaataccattacgttttaagtagtaataatattgtccttctccataaaattccttctcccactcctgccgtaacgttgtttgaacatccgtccccaccattcctgactgataccctctaatcatacgcaatttctccaaccaagaagaagccaccgcatcatcatttgttgtcgccgcggcaatcaagtaaagctcgctcaatcgtaacattgactgaatttcatataaataaggatcacttctattttccgtttgttctgcatacttcacaaataccatcaaaccggaagtctgccgcccggtagccacctcccaagaatgcttacgataatcattcggttcatcataaagtttatttatataactctcggttgacaataaaatattatcatcttccaaatcggaactaaataactctttatacatagtcgtacgtttcatgttatgtaaggcaaataactcctcacagaagaaaacccgatcttttaccgcgactgtttgcgaaaccggagtaaaggccgtattaaaattattcgcctcgttagtcttcggatctttgccttccaacaaggttgttgcaatccggtatgcttcatctgcatattcatctcctaaataccagcacatacgggcttttaacgcccacacggcataataattcaaacgcaggttacgataatcccaaaaatcttcatctttgacaataccctctgtcaaaatcacatcctcagacaaaagcacgatagccgaatcaatatccgcgaataaatgttcaaccaactcgtctgccggaagaataggctgcgtgacatccgtcaccatattgtaataagggatggaggattctttcttattcgcctcagagtacaccggcccgaaaattcgaaacatatcaaaatgcaacaaagtacgaatagccaaagcctctcccatcgacattctgtaattggcttgtgacatcaaatcttgatgttcgggtaccttttccagaaactcattacaatccgctatcaatttataagccgccttccaaatcgcttcaaaggttcccttcggtccgtcattcgtgtaattatattcatttaaatcgtaatacgtatgcccgctggacaacttataccgttgccccaacacatcaatagcaccacctcccaaattctccgcatacaggtcattcgatgcaagactcaaatacaagccgttcaacgctcgctgtatcccgttctccgtggaataaagctgatcttctgccatcgagtcgtaaggtttcacatccaaccagctattacagcccccgaagaataaacctcccgccagaattgtcaatataataatcgtttttctcataatttcattttttactcgtgcttaaaatgtcatgttcacagaaaaagaaacagtccgtgcaaatggataagaagtaccccgctctgccttaatggtagagcaacggaaaacatcattcatattggcacgtatcgtcatattctttaaaaacacttttttcaaccatttctgttccccgaattcataggctaaagatatggactcaccgctaagcgtgttctctttctgaacatagcgggaagtcatcggggcagtttcattatcactaaccgttgaagtgattttcttatattgagcatgatcccccggtttttgccaacgatcatacaaggcacgcttatcctgattataagtggtcatttccgttgtcttcagattttcaatgcggttatataattccgtgttaaaatagtcggcatcaatccggtaacggaaataagcactaatagaaaaacctttataatagaggttggtaccgaacacaccttccagcaaaggttccgtgtttcccaccaccatctcgtcatttatatcataatcgaaagtataactcccgtcctttttaatgtaaatctccgatcctgtcatagggtctataccggcagaacgaaccgcccatatatcagtcgggctacctccatcccggtaacgtgtcaaggaagtagatttcaactcgtcattcagcaattccaaactcgcgccgatgttacgatacgtctgtttctggtgccgcccgttcaaagagaatgaccagttaagacgatcctccgccttttccataacagttccgacaacattgaaactaactcctttcgtacgctgcgctcccagattcgtgatataagaatcacgccccgtggaagaggcaattgaagtagttaccaacatggggtctgtatctttccaatagacatccgtattgatcttcaaacgattattcaacacagtcaaatccaatcccaaattataatccatcgttttctgccatttcagatcgggattcccgaaaccggaaacattagctcccatcccgaaagcattttgcaggttcgtattatacacgtaagtcgtataggccttataggcagagaagttctgatttcccggattaccaactgaaaaacgcaatttcaaccagttcacccaatccccgataaaagcctcattatgaatattccaagccaccccgacagaccaactatccgtgaagcgcttattcgtcccgaataccgaagatccgtctttacgataattcacgtccaacagataccgattgttgtaagcatagtttaagttcagatagatactcgtgctacgggtagtcgattcactatacgacggtttactttccgtggcatactcattggcaaaagcgggattcggaacgttatcatccgggaaaccgatggccgtaaaagcatcattgatcaaacgtgtagaagaaaagttccatcctaacacggcattcacctgatgtacatcccccaacaattttccatacgtcacggtcacgtccccgtcatatccccagcgatcggttgttgatttcgtgtaagaaccccgttccgtcttttccgtttcgtcaaaatcagtatggaaaggagacttaaacttttcgcttttattattacctttcgtcagactgattcttccccgtgccatgatcccatccatgggacgccattccatctggaaattattacgaaaagagatctctttcgcatcgtccaaataattcaagctggcattgtacaaaggattttctactttaatcgaccaaaaacctccatccacggaagactcttctagatacttcggtacggaaccctcgtaatctttcgggtaatagggatttgtctgtacatacaccgaaaaactttgcggtgcattctgactttccgtgtaatccaacgtgaatttattatcaaaactgaatttacctttccggtaacgcaaatcaatattgaaactcaaaacatcacgtccggattgtttcatcaccccctgcgttccgttataactcaacccgactccatacaacatagcatcatctcccccttcgacatacatattgtgcttatgagaaaaccccgtcctgactggttcactcaaccaataagtatccaccccgctctgcacgtttttcaaccgctggttgtaaagattcattcgatcgaccagatattcttcattcgaggtcttcgtgtaatagcccgtcagccactcaaattccaacttctccgcggcattcatcatattgtagtcgctgagatccggcatctgaaccgtgagatctccattataagacagacgcaaggttcccggggcaggacgcttagtttcaacgaccaccactccattagcggcacgagaaccgtaaattgccgtggaggcagcatctttcaaaattgtaacagaagccacccgctccatgttcaaatcgacaatcgtctgtaaatctacttcaaaaccatccaagataaacaagggttgattcgggtcaacggcataatcctctttcagattgacaatactcgttttaccgcgaatatcaatatcgggcaatttgttcgggtcggaaccgaactcgttgttcggggtaatatgaaaagaagggtccagcgttttcaaactctgcaaaatattttgcgatcccatcattttcaaatcctctttcttatatgtcgtcgcggaaccggtaaaactttcggatttacgttcgaaaataccggtcaccaccacctcgtccatttgggtagtttcctcttccaacacaatttttagctccgcctgcccggagaatgtcacttcagtcgttttcattccgatgaaagaaaattgcagaaccgtaccggccgtattaggaaaagaaagagtgaattttccatccatatctgtcgaagttcccaacgtcgtacctttcagtaaaacggtcacccccggcaaaggtaatccttgaacatccacaacgacccctttcgcaacccgttgctgcacggggtccggtttcgtttcttgcggacggataacaaccgtgttatcaacaatccggaacgtgaaattctttcccaagacttgccgcaaagcctcatccaaggaaacattctggcaacgaaccgaaactttccccacggcattaatttcttgattgttgtagaaaaagtccagtttcgtctgtttctttatcgcgtcaagcgcttctttacaagttgcattacttagatcgagactaatactatccgtttgagcataagtgtcggcacttaatctcaaaacaccaaagaggattaaaaaaacggttaatttcataaacctccatgttttcaataaaaaattcatacatttgtagttatgggtttaacaattaccggacgcctactgcaatttgtgtccggccgattaaaacacacttacggtaatcgcactaacggttaccgttttcatattataaattacgaaatactttcacctgttgtccctccaccttgaacctgacattagtcgtctcctcgattaatcccaacacctgttccagctcgttatatcgtttcataaccccggtaaagcgataatatttcgccaccgtatcatcaaaacgaatctccacatcataccagcgctccaattgatgggcaatagcctctaaagacatatcgctaaacacgaaacgccccttcttccaagcaataatatcatcaacatttacttgtccggtcgtgatcaccccttccttcaaaacagcctgttcccccgctacaagaatacattcctgacgagtatccggataggacacccgaactttcccttcagccaaagtcgtacgcaaacaatcgtcatcccgataagcattgatattaaattcggttcccaaagcctccacctgcatatcgttcaccatcacccggaaaggtttcgtggcatctttcgccacttggaaataagcctctcctttaaggaaaaccttgcgttccgtaccgacaaaatcaaccgggtaacgtaattccgattccgaattcaaccatacccgcgtcccgtcggacaattgcacctgatactccgtggaacggggaacactcaacgtgttaaagatctcttcctccaactgcacgttctccgcctgataaatcatctgttgcccggcactcaccaaaatcccggttccgctctcttgaattaccgaatcgccactccattgttgcacctgaagcactcgcccgtcattcaaggtaagcgatacttgatgacgttttcccacgttctccgacatcggaacgacctcgttggaatgatgaccataaaaccagataccgacagtcaggggcatcacgatggctgccgccaccacccatcttcgcaccagctctcttctccgagaatgtttcaacgtccggcaaacctgttcccacatacgatccttatccggtggagtggcctttttccggcactcatccatacggaccagtagagagaataattccttatccactttttccttgttactacccgacaagaaatcatccaacttcttatgtaactgttctttctccattttcaaaacccgtctttacattcttattgcattctttcaaacacactaatgacaggtaacagaaaaaaaagggtgaaaaaagaaggatcttttttcacatatatcctaagaaaataagtaatgcaatgatttccaaatccttttcattgaattcggtccgcaatttactataagcactttttaattgcgttttgaccgtattaacagaaacatccaatctttccgccacttccttatacttcaacccctcaatacaggccagaataaatatctcccggcacttctccggcaacgagtcaacaaacacgttcaagcgttcccgcatgatattcaactcttcttcatcttccggaacttcttcctccatgatctcccaccgctgactttcctcgtaatgatgcttcactttcaaatgctccaaataattttggcaacgatgatccacggccttacacagatagccgggaacagaatccgttatctttaaatttttccgcaattgccagaaacgaatgaaaacctcctgcacgatgtcctccgcaaccaaattatcctttacaaaaccaaacgcacgataatacaacatatccgtgtactctcgaaaaaagtactccaaagcggaggtatctccccgttgcattttttcgaaaaggatcaactcatctggcataagacaataggcattatttcaatacaaactcactgttatgcaaaaaaaggtttttattccatatcgaaaaagcgaaaaaatcataaataacaacaataataacacacgcaacacccaaaaatcgtcacactctcgtttctacaggacacaatcaaagacggacagttggggaaattcaacctttaattattccagaacacacaacgtatcccccagccgtccgtcagtaaaaattattattaatcttcttgttgctggcgtttcacctcggcaagcacctctttcatgtccaagcctgccgcctcggcaatccctttaccacaacgttcgtccgcttggtaaaagcgtgccgccacccgcacttttatattcacgggtaccccttccatcgccgtggctacattcgtgtgtatccgcattttctcgtcttccggcaccaaacgatacaagtcacccggttgcgtgtagtaatccttatcttgttgataatgactgcccatcccccggatatcaaaaggcggttgattataagcatggttatctaccggaccgccgaaactattcggctcgtagttcaccgctccgccaccgttaccatccactcgcatggcaccatcccggtggtaattgtgcatcgggcaacgaggcgcatttaccgggatggaatccgcgttaatccccagacgatagcgatgagcatccccgtaagcaaacagacgtccctgcaacatcttgtccggcgaaaaactgattcccggtaccacgttagccgggttgaaagcggattgctccacgtcggcaaagtaattttccggattccggttcaactcgatcactcccacctcgatcaacgggtaatccttatggctccacacttttgtcaaatcgaacgggttaaaacgatacgtctccgcgtccttttccggcatgatctgcacgcacattttccatttcgggaaatctcccttctcgatactctcgaacaaatcccgctgggaatgttcccggtctttcgccacgatcttttccgcctcctcgttcgtgaagttcgcgattccctgcatacagcgtaaatggaatttcacccagcaacgttcgtcatactcgttataaaaactaaacgtatgacttccgaaaccgtgcatatgacggaaatcttgggggatcccccggtcactcatcagaatcatgacctgatgcaacgtctccggagacaagctccagaaatcccacatcgccgtgttactcctcaggttcgtcttcggatcccgcttttgcgtgtgaataaaatcgggaaacttcaaggggtcccggataaagaaaacaggcgtgttattcccgaccagatcccagtttccctcgtcagtatagaatttcatggcaaatccccggacatctcgttccgtgtcggcagcaccccgctccccggcaaccgtggagaaacgcatgaacacgtcggtcttcttgccaaccttggcaaaaatacttgctttcgtgtaacgggttatatcgttcgtcaccgtgaacgtaccaaacgccccgcttcccttagcatgcacgatacgttccggaatccgctcccggttaaaatgagccaatttctcgatcagccaaacgttttgcaagagagccggcccatgaggtcccgctgtctggatgttttggttatcaccgaccggagcgccggcctcggtggtaagtttctgtttcttttccatggttaataaggtatattcgttatcatctatatcccgattataccttattaaccattaaaaagttttacaaacgaatcaaaatttctattccattttcggtttacggatgtagtgcggcatttcaaaaggaatctccaaagaaaattccaccaaccccataaactcgccattctcgtaccacggggtctggtaaatcaattttttcacgccgtttttctcgatcgtgtaagcattcgtggcgtgttcttccatcaactgcaccaacttcgtccgggcaggctccgggtgacaatccaacacgttctgcccaacaagatcgccgtgattcgttttttgggatttatcgttcatttgaagaatcttaccttctttatcgcaaaccgtgatggccacgttcaattctttcatgtaatccatagctgtcattttttaattgatccacaaaactacaatttttcatcgtgccgctctcccattttcacgaattaatagccatgatccacatttttcttcaaattttcttgcaaatattttgcagttctcctgaaaacccctatatttgcatcgcttttgagaaaattccttagtagctcagttggttagagcggcggactgttaatccgtaggtcgtaggttcaagtcctacctgaggagccaagaagctgaaagccagtagaaatactggcttttttcatgctcgcaagtttcgaatttcatgcaaaagctcaagctatctattacataaacacttgtttaaaaacgacttaactacttcatccaaaatcatagacatattcagacagacaaggtattaaaataccatatttgctatcatttacacttcatttgctatcaactggtcaccaaagtggtcaccttctctaaaaaaagtggtcaccttttttcgaaggataaactattgttttaaaggctattaatctacatttattagcaacaaataaaagtaaatcatacctgattccccacctcaaaccgggttgaaagtgaaaaaaggatctcaattgcttatctattgcctcattattgcattccacccccagaacacggtgtatgttatttttccttatatcctgttaaaatggcggcgataatcgggcgataaggcggcgacaatggggcgacagcgcctaactgtcacccaacagtcgcccaacaaccagacaattcccatgatcaaccttggaaatacccctttaaaaccaatattatacccaatttttctattccaataaaaaccagcgtgcaggatgatccccacacactggttttccaataatattcgacgattattatacccttccaatcatttcttcaacaattgctcccgaataatctgttcatacttttcgggagtagccccggtttcaatgatcggtttaccgcccaccgggataaaaaacaaggtcggtagagccaccacgttaaacatactgcataactctttttccttgtcagcattgattttcaggaataaaacccgatccttgtacttctccgccatctcctccatttccggaatcaagcacatacaagggtcgcaccatgtcgcccaaaaatcaataaccacacattcagagaattatgcctaaattaaattttccttgaaaaaagtgatacctcaactacccctgtttgcccgagaaattgttataaatatgtaaaaggcaagaaaaaatgaacgataagtttaattttaggatagcagaattattagcggcacttttcaccggttcccactcagaacaagacgttggagagttgcgaaattggattcaagaaaacgaacggcgtagtaagtttacgaccaagattctcaatgaagataatttcgaatataacgaaaaaatgcttgcaaagtttcccagcgaggagagatggcagagggttaaagtcctcttggataaaacgggaaaatcgaaaaagttgcgtctgtggatggtccggtacactgccgcagtcgtgcttttgctcgtggccgtagtctcatccttgtggttgaacaaggatgaggtcgaagaacaatgtccattgccaagagtgcttgcaagcggaacgaccggtgcccgcttgacaacagggaacggcaaggcgatcgacatcacgcagaatgcccacttgcaattacacgaagaagatggcacttcgatcacgacggattccctaggtatggtttacgaagcctcggattcggtggttgaacaggaaatatggaacacaatggaaacaatgacaggcagggaatacatgctagtgctggcagatggtactcggattttcatgaatgccgagacacaagtgacattcccggcaagtttcaaggggtgtgaacgacgcattcgtttgtcgggcgaggcctatttcgaggtggcaaaagatccaatgcatcctttcattgtcgagacggagggagcggaagtacgggtattgggaacttcctttaacgtgcgggcttatgaaggcgagcaagagatggtgacgacactggtcgaggggaaggttgccgtgtccgacagcctaacaaaacgggaaattcatcctggagagcaggccgtgtgtatgcttgccgagggacgtatagacgtacgacaggtggaagtgtcattatacacggcgtggaaatccggtaagttcatattccacaatgagcctttggagaagatcatgacttatctgtctcattggtacggttttgaatgccgctttttggacaacaaggcaagggaggtacggataggagcaagccttaaccgttacgaggatgctacacccatcctttcgatgttgcaaaagaccaacctcgtccatgtcacgcaagttgataacgtgttatatatttcgagtgcaaaataaaaaagatgcgttcgtgttggccacacataacgcatcgaggttaatatcaaagttcgttatactttaattattcaaagttatgaaaaaaaatgacacgtccatttcttctaagcgaagaaaatggcgaaaatctttattagttatgaatttgaaagtgatgttgctactgtacacttgcttgtacataccaacgtctgtctatgcacaggaagtccgtctgacagtaaagatggagaacgccaccttagagcaggtaatttggcacattcaacaggagactgatttcgtgttcatgtacggatcaaatgacgttgccgaggtgaaaggactgaatgtgaacatgaagaataaaaccattagcgaaattttagatcattgtttgaaaagtacgcatttacgttatgaaattcaaaacaacgcaattgtcatccgcaagcaggacgagaaagacaaggaacgagtggtaatcaaaggtatggtgaaagacacgaggggagaaccattgcccggagtgacaattttggaaaaaggaacttccgtgggagttgcaaccgacagggagggacgtttcacatttacaacggtcaagagcgaccagatcgtgctagtgttctctttcgtgggaatgaagacaaaggagatagcttggaagggacaagaagacttaaacgtcgtactagaggaagaagcacaatccatggatgaagtggttgtcacaggttaccagagaatgaaaaaatcaaacatggccggttccgtgagtacggtaaaggcagaggatttggtcttaacgggtactcaatctttagaggcggctttacaggggaaattaacaggggttgacattcaaaaccagagcggattggtaggtacccggcaaaaggtgcgtgtacgaggtacctccacgcttttgggtagccaagagccagtgtgggtagttgatggtataattcaaacggatccgcttcccttcaaggccaccgatttgtccatggcgagcacggatccggataatatcgacatgattcgcaacttcgtgggtagctcgatctcttggttgaacccagcggacattaaggatattacggtattgaaggacgcctcggccacggccatttatggagtgaaagcagctaatggcgttattgtcattaacacgaaacgaggagagaagggacgtatgtccatcaattattccggtagcttttcgattggctccaaagtaacctatgataaattagatttgatgaattccaaagaacgtgtagacgtgtctcgagagattttcacgagaggactgtgtggcacgcaaccgttattgaaagtgggctatcaagacttgcttcgacagtatctggaggacaagatttcccacgaaacattcaatgcaggcgtgaagaagttggaggtggtaaacaccgattggttcgatttattgtacgagaatccgttcagctatgccaacacccttagtatgtctggtggtaacgagaagatcacgtactacgcatccttcggtgtatccaacaataacggtacggctaaaggtaatgattcgaaaagctaccaagggagcgttaacgtgacgactactttttggaactgtctggatttctccgcccgagtgaacgggaacgtgcagaagacccgcgcctaccactcctgcgtggagccatatacctacgcatccacgactagtagagtgatacaagctttcgatgacgaaggggaattatactactatcaccataataatggttacaaatacaacgtgttgaacgagttggcggaatccggaaacgagaacacgaccagttctttaaacacgaacgtgagcttgaattggaacatcatgaaaggcctccgttacgagatgttgcttggttacaactactcctcttcccacggagaatcctgggcaacggagcgaaccaattacatcacttacatgcgtaaatacgagttcggtcaatacaatgcccaagacgaggcatacaaagccagctacctaccacatggtggtgtattaaacttacaggaaacccgcaacgaaagctacacgtggcgtaaccagttatcctacgtgaagaacttcggccgacatttgctgactgccacgttgggccacgagatcagcagttccacgtatggagggtttaccggtacattttacggatatttgcccgatcgcgggaaaacgattaaaaatccaccgttgaacatcgaatcgcatgaacagctttatcccaacacaaattatgcccaaggttcatatagcattatagataataagaccaatcaagtgtctgtgtatggggcactcagctacacattcgacgagcgttatgtattcaacgccagtttgcgttctgacgcgtccaaccgtttcggacaagacaaaaattcccgtttcttaccagtgtggtcgttcgggttgcgctggaatatgggtcgggaacacttcttcgaggggcaaaatttcttgaacgagtgcagtttccggttgacctatggataccaaggtaatgccagtgaagccgcttgttccgatttgattgctaggataccatcggacaacgaaggtggtattgttatgggagaatacgtgctgaatatcaaaagtctaccgaatccgcaacttagatgggagaagacggccacgttgaatgccgggatcgatttcgctttttggaaaaataagatcaacggttcgtttgagtattaccataaaaagacgactgatgccattgtcgaaaagacagtgccgttagagaatggtgtggtgagcatgccaatgaacggtggtacgctggaaaactcgggatgggaattgagtttcagttttgcccctattcgcacgaagaatttcatgtggtcggtgagcttgaacacgtcacaaaacttcaacaaggtgacggacgccttggaatccaataaaaattggacacaggcgacaaccggtagggtaaacaaggaaggctatgccatgtccagtttctgggcgttcgagatggaaggggtagatccgaaaacgggcgtacccgtgtacaacctgccagacgtggatagtccggaggctcaggctgacgcaacagtgtatatgaaatatatgggtaaattgaacccagatttcacttccgggttgagcatgattttccgttacaagaacttgtcattgtcttcgtctttctatctttctctaggtggaaagaaattcctagcaccgatgttctcctcggatatgtacaacgacacaccgaacgaatataataatttgcccaaagagtgggtgggacgttggcggaaaccgggcgacgtgacgaacattccttctttgccgtttagaaattgcggctctatcgacctgccgaacggcaaagcgtacctgtatcagatgtataattacacgacggaccgagtcgtgaacgcttcctatttgaggtgcaatagtatttcgctgtcttacaatttgtccagcggactgattcgaaagtttgcccaaaatgtgggattctcgtttaacgtaaccaacccgttcacgatcgtgagcagtgatttcaagggtaaagatccggaggttgcctcaggttctcaaccgttagctaggaattattcctttagcatgagtttaagtttctaatgattaaacagataaatcgtatgagaaatatactat

SEQ ID NO: 38 - DNA, 15738 bp, Butyricimonas faecihominis
gaagaagactaagattgtggctactatatctgacaaaagatgtgaggtagagtttttagagaagttatatcgtgccgggatgaacgtggtacggttgaatacagctcatcaggatatggagcaggcattgaaggtggtggagaatgttcggaaagtttcggataatatcgccatcttgatcgacacgaaagggccggaggtgagaacaatgcttatggatgaaccgatgcacgtggaccggggagaaacgatttacctgacaggtgacccggatctgaagatggaagggaaattaattcacgtgtcctatccttattttgcagaagatataaaagtgggtgacaaggtgctggtggacgatggggatgtggagctagtcgttgtggagaaaaaggatcattatttggaaatgatggtgacaaacgaggctgttatcaagaatcgtaagagcgtgaatgtgccgggagcttccttgaaattgaaatctttgagtgataaggaccgggcgtttattgattttgcaatagataataatctggattttatagctcactccttcgtgcgtaataaagaggatgttatggcgatacaggctattctggatgctcggggaagtaagatcaaggtcattgccaagatcgagaatcaagagggtgtggataatattgacgagattctggattacgcttacggggtgatggttgcccgcggagatttagggatcgagatcgaggcggagaaaatccctaagattcaacgatatattgttaaaaaatgtattgagagtaagaagcccgtgattattgccacgcagatgttacacacgatgattgagcatcctaggccgactcgtgcggaaattagtgatattgcgaatgccgtttacatgggtacggatgcgatcatgttaagcggggaaacggcttacggggcatatcccgaggaggcggtaaccgtgatgcgtgaggtggcagaggagaacgagggaacggttccgccggatgcggggagaagtctggttcgtataaataacgagattacggcagcgttggctcgttcggcagtgaaaactgcattgatgttaccgattaaggcgattgtggtcgacacgctttccggacgtacagcccgttatctgtcggctttccggagtgacttgcctgtttacgcccggtgctataatgaacgggttatgcgagaattggctctctcgttcggggtgtatccctattatactgaaaaaccgatgtcccgggatgagtttatgaatgatctgccggaaatgttgatgcagaatggcattaaggctgatgactacgtggtggttgtcgggggaagtttcgggcatggtaaaggagcctcgtttattgaggtatgtaagattggggaaatccgctaggttaattttaaattttagattttaaatttgagaattcaatctcaaatttaaaatctaaaactttatcaatgtttgtctttcaagatgtcccggatttcagtcaatagtacttcttctttcgacggggcgggaggagctgccggagccggggtttcttcttttttcgttctcaatttattcatgaattttatggcgataaagattgagaatgcaatgatcaaaaagtcgatcgttgtttgaataaagttaccatagttgagggtgacggcttcgaccatttttcccgtagcctcgttcatgtgggctttttgtaacacgatgtgtaaattggaaaaattcatgccaccaataagcattccgatagggggcatgatgatgtcactaaccaatgatgatacgatttttccgaatgcaccaccgataatgataccgacagccatatctaccacattccctttcagggcaaaagctttaaattcatctaagagtttcatgttctgattcgttttataatttaagtgtttgaacgtttaaacatttaaaatgttctaaatttctgcggcaaaattacattaattctcgtaactttgtaagcgtttaactattgtcaatggaaaaggaaagtcgggaaaagcaaatatatagggttacaattgttggttcaattgctaatttctttttgttagtgtttaagttcgtggcgggaatatttggacaaagtagtgccatgattgcggatgccgtgcattctttgtcagatttcgtgacggatattatcgtgctggttttcgtgaaagtttctgctaaaccgaaggatgcggggcatgattacgggcatggaaaatatgaaacgctggcaacggcaattatcggtatcgttttgttaatggttggaacagggattttctggaacgggttgaatcagatacttgctttttatcggggagaagaattgggtagtcccgatttaatagctttggttgcggctcttgtttcgatcgtggtgaaagaaatcctgtaccgttattcggttatcgttgggcgtaaggtgcaaagccaagccgtcgtggcgaatgcttggcatcatcgttcggatgcattctcgtctatcggtacagctttggggattgccggggcgatttttctggggaaagactggcgggtacttgacccgattgcagccgttgtagtgagtgtttttattgtgaaagtatctattcaacttttgatcccttgtttgaatgatttattggaacgatctttgccggaagagatcgaaaaggagatcatcacgataataaatgaagactcgcaaataaaagaccctcataatttgagaacccgtcggatcgggaatgattttgcgatagagatacatatccgtttgcagccagagatgaccgtccgggaagctcatgtggttgctaccgggattgaggatcgtttgagggctaaatacggatcacgtactcacgtggccgtgcatgtggaacctgtgaaaagtgaatagatatagatgagaagaacggtgtggtattacacgatagcgtgcgtgttgttgatattggtcggggcttgtaaggaaaaagaaaagagtaaaaagccttttgtttattttaaaaattaccagagaacttttaatgatttaaatgacaggcatctgtcatccgccaagcgattgggaattactccattgaaatcctcggaggatttgggtaaggctgaccggaatttaaaagagattaaatcctgcaaattgtttcaggtggataaattaacacattctgagccttatcttgtaccggaggcctgtgatttattggctgatattgcccggaattttaaagactccctgtatcagaaaggcctgccttcccatagtattatcgtgacaagtgtgttacgaacggggtccagcgtgaagaaattgcggaagagtaatggaaatgccagtgccaattccgctcacgtgtacgggactacttttgacgtggcatatacgcgtttcaaaaaagacgggcgtaaaaactccccggaggaaaagttgaaaagtgtgttagccgacgtgttgcaggatttgcgtttgcaaaagaaatgttacgttcgttacgagtttaagcaaggttgttttcatattacagcgagataacataatcgtaagattgtttatactttattctgtatcacgttattctttatttttttatttttgcggcgataaagaaaaacgtgtatgaagaagagtcttattgctttagcttttggtacacttggtcttggaatagccgagtttgtgatgatgggaatattgcctgatgtggctcgtgacttaggaatcagtatcgctacagccggtcatttgatttcggcctatgctttgggagtttgtatcggggctcccatgttgattttggcacgcaggtatcagttaaagtatatcttgatgtttttggtgggagtaatgatgctgggaaatatttgtgcagctttagctcctaattactgggtgatgcttgtggcccgtttcatttcgggattaccgcacggggcttatttcggggtggcatctattgtcgccgagaagttagcggataaggggagagggtcagaggcggtatctatcatgattgcgggaatgacgatcgctaatttgttcggtgtaccgctggggacggctttaagtgcctcgatttcatggcgtttgactttcttgctcgttgggtgttggggcgttatcattctttattatatgtggcgttgggtgccacgggtagaaaatttgccggataccggtttgagggggcagttctgttttttgaaatctccggcaccttggttgattctgggggcaacgttgttgggtaatgggggaacctttgcttggtatagctacgtgactcccttactaacgaatattgccggattcccggctcgtatgaccacgttccttatggtgcttgccggttttggaatggtggtgggaaatctggccgggggacgtttgtccgatcggttttccccgggacgagtggctgcttttgcacaaggaatgatctgtgttgcattgctttttatttttttcttcgctcatatatcttggttggcagtggggttgatgtgtttgtgtacagccggcctgtttgcagtttcgagtccacagcaggtgttgctgattcgttattcaaaaggaggggagatgttgggtgcggctagtgtacaggtggcatttaatttgggaaatgcgatcggtgcttatgttgggggattacctttgcaagctggaatgagttactcttacccagcactagtaggtgcgccttttgcatttgtcgggtgtcttttgttggtaacttttttccgaaaatatgaacgtcgtacgatttgatctgatatagtccggtaatagaatcaatctggcttgttccaccatctctctggtgtctcgttgatgtccggattgtatctgaaggtaaagtttgggaaaagttaacctcccgcatcggtaacttatcgaatacttatcgaagagttacgggtgagatacaggtgaaacacataagagacagcggagtatgtattattaaaaagaatcattatctttgtcggccgaaaaaaatgcattccacgagagtggcgtgctggcaggttaggtaataattaaaatgacaaaaatataatgggtttacaatgtggaatagtcggtttaccaaacgtggggaaatcgacgttatttaattgtttgagtaatgcgaaggcgcaatcggcaaatttccctttttgcacgatcgaaccgaacgtgggagtgattaccgtgccggacgaacgactgaataaattggtcgagttggtgcaacctcaaaatgtggtacctgccgtggtggagatcgtggatattgctgggttagtgaaaggtgcgagtaaaggtgaaggtttaggaaataaatttttgtctaatatccgggaaacggatgctattattcacgtgttacgttgttttgatgataataatatcgtacacgtggatggtaatgttgatccgatccgtgacaaagagacgattgatacagagttgcagttgaaagacttggaaacggtggaaagccgtttggcaaaagaggagaagaaggcacagaccgggggtgatgcgaaggcgaaacgtctggtcgaggtgttgcatttatataaagatgcgttggtgcagggaaaatccgctcgttccgtgcaattaaacgatttacagcaggaggccgcgaaagagttgatgttgctgacgaataaacctattttgtacgtttgtaacgtggatgaggcttctgttgtgacgggaaataaatacgtggatgccgtgcgggaagccgtgaaggacgagggagcagaagtattggtgatcggtgccgctattgaggcggatattgccgagttggacacgtacgaggagaaacaattgtttttgcaggatttgggactggaggaagccggggtgaataaattaattcgtacggcttacaagttgttgaatttgcgtacttattttacggcaggtccgaaggaggtgagggcgtggacttttaagaacgggatgaaagccccgcagacggctgggattattcacacggatttcgaaaaagggtttattcgtgcggaagtgattaaatacgaggattttatagccttgggatccgaggcaaaatgcaaggaagccgggaagatgtcggtggaaggaaaagagtacgtggtgcaggatggggatatgatgaacttccgttttaacgtgtaatgagggcatagttttatcctggataaagatgatattaaaaaaactttttggatttgatcccagcgtgatgaaggtaaagacagagatcatggctggggtcactacttttttaacgatgtcgtatattcttgccgtgaatccggatattctttcagcggcatcgatggaccggggagccgtgttcacggctacagctttggcagcatcttttgccacgttggtaatggctattttggcgaaattaccttttgccctggctccgggtatggggttgaacgctttttttgcctttacgttagtgcagggcatgggatattcctgggagagtgccttggctgccgtttttattgaggggctagtgtttatcctgttgacggtgtttaatatacgggagttgatcgtgaatgctattcccgaaacgttgagacatgccatatccgttggaattggtttgtttattgcttttttaggattacaaaaggccgggttgatcgtggctaatcctgcaacatttgtttctttaggcgagtttactccatcgacgttgttagcggtgggaggaattattatcgggggagtgttggttgcacggaaagtgaagggggctcttttctatgcgatcgtggcggtcacgttattaagtattcctttggggattacccggataccggaaggtttttctttagtatcgatgcctcattctctggagccggtctttttcaagctggattttcattctttgttgtccccgaatatgttgattgcgattttctcgctcgtgttcatggatatttttgatactttaggaacattggtcggtacggcaaataaagtgggaatggtgaaacctgacgggagtatcccgaagttgaaacctgcgatgatggcggatgccgtgggaacaacggtcggggctttgctcggaacgtcaaccaccacgacttacgctgagagtactgccggtattgccgagggtgggcgttccggtttgacagctgctgttgttagcggattgttcattgtcgctctgttctttgccccgttctttttgttggttccgggtatcgctacggcaggggtattggtgatcgtggggagttttatgtttgatgcggtgaagaaaatacgttttgatgatatgaccgaggcttttcctgctttcgtgactattattatgatgccgttgacttactcgattgccgagggtatcgtgttggggctgttgacttacgtgtcgcttaaattgtttgcgggtaaatatcgagagttaaatctcacgatgtatatactctcgatattgtgtattttgaaatacgtgtttgtctaggttattcaatatcttccagttcccggtttgccacgtagcctcgccatttttcaatgagctgttgaatgtcctgtggtatttcggaattgaaatccatccattcgcctgttcccgggtgttcaaaaccaagggttttggcatgtaatgcttgtcggggacagagggcgaaacaattttgcacgaattgtttatacttcgtgaaagtggtgcctttcagtatttcattaccaccatattccggatcattgaataacggatgtctgattgatttgaaatgagcccggatttggtgggtacgtccggtttccagcacgcattccacgacattcacgtagcccaagcgttccagcacgtgatagtgagtcacggcgtgtttgccgtagtcgctaccttccgggaatacacccatgattttccggttagagatactccttccgatgttaccaataatcgttccgttgtcattttccaagtttccccagcatacggccacgtatttccgactagaggttttatgaaaaaattgggaagataatttggttttagcttcttccgttttggcaatgactagcaggccggaagtgtccttgtctatccggtgaaccaacccgggacggggatcgttttctttgaataacggatttcctttcaagtgccatgccaaagcgttcacgagagtccccgtgtaatgcccgtaggagggatgtaccaccatgcccggttctttgttaataaccagcaggtagtcgtcctcgtacacgatgtttagaggtatatcttccggtatgacccgtatttcccgtttcgggtgggggagcattaaggtgacgatgtctttgggttttacccggtaattggattttaccggtttattattgacctgtacacattgggcctctgcagcttcctgtatttttgtacgggatacgttgggtaaccgatcgaccagaaaccgatcgatgcgcagtaaattttggccgggatcaacttccagacggaaatgttcatacatttcttgctcttgttccggttcgtcctcgcccaattcttctaaatcttctacttcttcttctatcatggttgtagctcctcaatggacagggagtccaatgccattattttttctttatctttcgtgaggtagagcgtgatgtctccccccatcttcatcgtcatgttctcttcgaattcaggctcttgctggtatataattgccgtggattggtccgcctcggttttgaccgtgttgtcaggtaggatttcacccacgtttaagaatgcccgcaatagcatggcttttgcctctgccagtgttttccctactaacgatgggatggctacttggtcattggacgtgttcccgttcccgagtacaatatccaccgtatcccctttttgtatcaaactattgggttcgatgatgtttccctcgtatttgaaatcaagtactaggtttttgaagttggaaggaacgtattcgattcttccaacgttgagtcccaagttcttcaatcgttgcaaggattgacggaaggccacgttgcgaaggttcgggaaaatgattttttccggggcattggcgttgatggtcagttgaatggcccggttgttcttcacgtgagcattcggtgacgggaattgttctacgatagttcccggtttggcattgttgtcatagatagaatcgatgacaaggatttgcaaattcttctctttggcgaaaggttccgcctcgtcgggagtgagtccccggagttcgggaacagtaatataataaccatgattcgtgtatttctccaatcgattcaacacgatatacccgatcaggaacaacaggatgcaggctacggctatgttgatcaataacacgatgatatgtccttttttaaagaaacccatagagtgtgtaacgtttgtaaatttataaaacttgccgtgttcatcactactgaacacgggcagtgttggtattgaaataccttaactttgcaaaaatagcagagatttttcaattatcactactattttactatttttgctttgaaaataagaagtgataaagatggtaagattcattttagtattcctgttgctgggtttgacgggttatgtcggggcgcaggaaatcaagatagagaaatcgacagagaaaatcgtgtatcagggaaagtcctattatctccatacggtgaaagccaaggaaacgcttttttccatatgtaaggcttacggtgcctccgtggatgaagtgaaggctttgaatgataagaaagataatactctttcgatcggggacgtgttgagaatacctgtgatcgaaccttttaaatctattgatgataagttttattatcaccggatgaaaccgaaagagacgctatattctctttcccggaagtttaatatcaagatgaaacgaattctgaaagataatccggagtacgacgtgagccgaccgatcgcggaaggcgctgtcgtgaaattggcattaaggcagattgatcggaccgtgttggaggctgaattacgctgggaaaaacgtcaggcgaaagaggttcaacaagctcggcgtgaagagatggaaaaacacgaggaaagtcatccgaatactttcccgcctgcccgcgattcattggaaggaatggtgcagcaggttgtgggtgataccgtgtttattattcccgaagttgctcatgaacaacgccacgtgaaagttgctcttatgttgcctttgtacgtgaaggaaaacaagttgcccttatctgaggaggaaattccggtggacacgctgggtgtgaatatacggaacgagcgttggcgtttatcttctcgcacggaacctttcctgcaattttatcagggggtattgatggccgtggatagtttgaaacggctgggatacacgatcgatttgcatatttatgacacggaacgtgatcccaataccgtgcaacgtttagtaggggaattgaatttgttatctccggatttgattattggtcccgtgtatgcgaacacgtataaggcggttgccgaacagctaggaaaccggacaattccgatgattttcccactttcttcacggggaggagatttagtccgtttcccgaatttcgtgcagttgaatacctctacggtttctctggtagaagagatggcggactggattgttgcgaacgatacgcaggctcatctaataaatatcattccggatggaggggggcgtaccggggaagagagtcgtttgactgatctggtacggactcgcttacaggcgaacgggatggaaggtatgacgatttgtcaatggcgtcctcaaatgcatttggattcattacgcaagatcatgaggccgggagtggaaaatatgatcttgtttccaactataaatgaggcggcagccagtcggacgttgcccgtgttgtctgcactggcagatcaattccggatcacggtaattggtttccccgattggttgaaatttacttctatcgacgaggaagtgttgtttaaattgaacgtgaagatgatggcgaatagttacgtggattatcaaggtgatgtggctaaagagttttccgcgaaacaccgggattatttttattcggagccaaataatgtggtgaaccgggcgtttgacattgttatgtgctttatccccttggtcgacatggaacgtggaaacaccttgaacgtgttgcgggaaaaggatataagcggggcatttacccgtttccggttccatcccgtgagtggattgggaggcttggagaatcggggattatacttgattaactatggtcggaatttcgaaattatcgtgaaaccgatagtcaaataattcagattctttcacggtgatagcataaaaaaacgactgtaatgatacggttttatcctgtgtagtttgaaataaatcaattttaggggtttgcgggtaacctttggttggatattgtcgttgtcctgcataattagttgttattacatcttgaatagaatgaaaatcggggagtacggcattttttttgatatgattaataggaattgaaatttactaaattaacctgttatggcagaaactacgacatacattactgtacaacaaaaatatagatctttattaaagtcatgtaagaacttgatttcaaccgaggatattcgtctcgtgcgaaaagctttcgacacggcaatgagcagcgaggcaaatttacgagcggttaccgagaaagatattcatcgtttgctggataccggattaattatcacttccgagatcgggttagggaggacttctattatttgtttgatgttgcaccgggcaatagagtccggaacgttgaaattggaacagataaaaacggcatttggagaaaaggtggctcagatattagccggtttacgggatataagccatatctacgctactcaccgggtggtggattccgaaaatttccggaaattactactgagttttgctgaagatgtacgggtgcagttgatttttctggcggaaaaattgtatgatttacgacacgccgagactttacttccggaacaacaacgggagttagcccgggaaaccagttatatctacattccttttgcccatcgtttaggtttgtataatatcaaatcggagatggaggacctcgctttgcgttacggggagcctgaggtgtacaaggagatttctttaaagctggaaggaacacgggaggcccgtgaaaaatatatcaacgagtttattgcccctatcgtggaagaattcaataaccggggaattaaattcaaggtgaaatggcgtaccaagacgatcgcttcgatcttgaacaagatgcggaagaaacaggtggagttcgaggaaatctatgacatattcgcggttcgttttatactggatagcagggggccggaagagaaggccgattgctggagggcatattcgatcgttgccgacaagtacacgcctaacccgcagcgattgcgggattggatttcagtgcctaaatccaatggttatgaatcattgcagaccaccgttcttggacctaataaccgatgggtggaagtgcagattcgtacggaacggatggatgagattgcagaaaaaggatttgcggctcactggaagtacaaggggggaacggcggataaggctatagaggagtggctgactgagttacgcgagatattggagagttcggaagtcggagccgtggatatgctggacgatattaaaattaacctgcaagataaggaggtacacgtgtttaccccggcgggtgatttgaagactttaccggcgggtgcgacgttacttgactttgcttatgctatccacacggccgtgggatcccgttgtgtaggaggaaaggtaaaccaacgtaacgagaccttgcgctatgtgttgaagaacggggatcaggtatccatcctaacttcgaataatcaacagccgaatgccgactggctgaatattgccacgacttcgaaagctcgtaacaagattcgtcagtttctcaccgaagattctcgggctcaggccacgctgggtaaggaaatgttggctcgacggtttaagaattggaagttagagttgacggacgaggtgattcatcgtttgcaacaacattataaatacaagtttgctattgatctttaccaggcgattgccgaggaaaagttggatatggcggagatcaaggagttcattactcgcccgaaagaggaggaacgtacggttactaccccaagagaagaggtgcaggttactccgtcccgcccgattagtgaagacgtgttgttgatcgaccggaacgtggataacgtggtgtacaagttcgcccgttgctgtaacccggtattcggggatgatattctgggattcgtttctattggtgaggggatcaagattcaccgaacccagtgtaagaatgctcttgatttgcagcgtcgctacccgtaccgaatcgtgcaggcggcttggacgaatgccggggcaacttcttaccagacggtgttgagtatcgtgggacgtgaagatgcaggaatggtgaccaagattaccgaggtgatagcgaaggacccgaagatcacgttacggggattgtccattaattcgagtgagggattatttgacgggcaaatcaccgtgttggttagtgatacggaacatttgtcacaactgatttcccggttgaaacgtatacagggtgtcatgcgggtatatcgtcatgattctgtgaaagagtagttttatgttgatttttcgtatatttgtatagttctaaatgatgggttaacacgtgattgtaatatgtcggaacaggatgaggtaaaatggttacagggattaagagttggggatgaccgggcttttaaagtcctgtttgaaaagtattatgcctcactctgtgcatttgccactaatttcgtgaatgacccggacgtggcggaagatattgtacaggagatatttttcaaattatacacggataaaccgacttttgatgtcgtggtggccttgaaatcttatttgtacctggtcaccaagaatcaatgtctgaattatttaaaacatgctcggatcgagcaggagtatatgtctttcttgaaggaacgggaaacaacgacattcttttttaaccagatcgtggagcaggagttactggccttgttgtcagaggctattcaggatttaccggaacagacgggacaagtgttccaactggtgatggaaggtttcgataatgcggaaattgcggagaaactgaatctctccatagattcggtaaagtcacataaaaagcgtggaaaacaattgttgaagagtcggttaggagatataacggttatccttttattcctgtcgaattgttaaatttacaagaaagtgtcattcaagtgacactttttttatacttgattgtttttaagtcgtaaaagaaatcaagatgaaagaagcatttgaaatagcacgaattattcagaagagtttgaaagggcaactttcagaatcagaggaaagacaattatctgattggcgaaaggtttctggagagaatgaacgtgcttttcaacgaatgatttcagaagatttttacacggttgggatggagaagttggaaacgtatgattaccgggtggcctacgggcgtttcttgcaaaggaaataccaacaacgtcgtaaaagaaaatttctgataaacgtggttcgggtagctgctgttgcgttaccgtttataattgcacttgttctttatgtcgggttgaatcgagatgaagaacaaacgttacgtccttctttggcaacaaatatccttccggggacgagtaaagccgtgttgacactggcgaacggacaaatgattcctttaggcaaggaggctgcggatagtacgattataacggatgggacacaaattaatgcttcggggtctggggtaacatacgctagtggtggagaaagtgaatcgatcgtttataataaattggaaatccctcgcgggggagagttttgtttgacactttcagatggaacaagggtgtggttgaactcggaaacttctatccagtatccggtagccttcggggcaaaggaacggcgggttttcgtgcaaggagaggcttattttgaagttgcgaaggatgcgaagaaaccttttactgtacagtttatgagttcgtcggtaacggtgttgggaacttcctttaatatccgggcctatccggaagagaaacagtcgcaagctactcttgcagaaggttccgtgagaatatacagccccggtagttcaatgctgttgaaaccgggagaacaggcggaagtgaacgctttgtcgggagagatggtaaagagggaggttgaagtaaagagttttacgagttggaaagacgggcgtttcgtgtttgaacaacaaccgttggaagatataatgagaacattggaacgatggtacgatattcgagtgatatttaaggatgagggggcgaaacgaatttctctgtcgggaaatatgaagcgatatggtgatttctcccaagtaatgaaaatgttacagatgacgggagatgtgcgatttgaattacatggaaatgatgtatatataactacagagtgaaaccctcgatggccacgagggaaggcaagtgtgtaaaacaaactaaattaattaattacattatgaagaagaaccgcaataagtctcttccgggaggtttatggttaataaa

SEQ ID NO: 39 - DNA, 15727 bp, Butyricimonas faecihominis
tatatgctttaaaaggttatataaaatctattttatcaccgggtatacgcccgctctaaattttattcaaaaattaatgtgcaaagataataaataaagtgcaaagaagaaagtaaaaggggagctctccctcgttatttacatttcccctgctttttgttaaaattttatcaccctaaattcaatcttatttttatacaactgaaacacaatcgcataaccttatttagaacaaacctgttaaaaaatataatccgtattcttttgaaatcccaaggaatttctgcttctttgtagcagaataggagaaagagataatgaaaaaaagatgggtcatcaacaccccacccgagtgggaaaaaattgacaaactatccaaagaacttaactgcagtcatgttatcgcgaacttgcttttgcaacgcggtgtggacactgcagaagaggcccatgctttcttcaatccaaccctcaacatgctccatgacccgtttttgatgaaggatatggataaagccgttctccggttggaaaaagcaatcagcaccgaggaaaaagtcatgatttacggcgattacgacgtagacggtaccacggcggttgctttactctataaatacctaaaaaataaatgcgagtatcctgaatattacatcccggacagatacacggaaggctacggagtttccatcttggctatcgattatgcggctcgcaacgggatttcactcatgatcgtgactgactgtggcgtgaaagccgtggagaaagtccgttatgcgaaatccaaaggcgtggatgtcatcatctgtgaccatcacaccccgggcgacgaacttccggatgccgttgccgtcctcgacccgcaacggaaagattgtcactacccctaccggtggttaagcggttgcggggtcagtttcaaactggcacaggcatatagcatgaaacacaacttgccgatggcagacctgtacaaattgttggatttggtttgcgtcagtattgccagtgacattgttccgatcacgggagagaatcgtatcctcgcccatttcggtttattgcaattaaatagaaaacccagcctaggattaaaaacgatattaagtttttccggaataggtaaagacctgacaataaatgacattgtttttcgcataggccccaaaatcaatgcggcagggcgagttgaatcgggaaacaaatcagtagaactcctgatagccgatgatgagaccagagccacggaagtcgctgcaagcattaacaactttaacgaccaacgcaagaaactggatcacgacatcaccgaagaagcccttgagtacatcaaccagtcccactacgatcaatcccaaaaagcaaccgtactttacaacccgaactggcacaaaggtgtcatcgggatcgtggcttctcgtctaacggaatattattaccgaccgaccgtgatcctgacagagtccaacggtttggcaaccggatccgctcgttcagtggaaggatttgacctgtattacgccatttcacaatgtagcgaattcttggaaaattacgggggacacaaatacgcggcaggactgacattaaggcttgaaaacattgaacctttcaaggctaaattccagaaaatcgtgagtgaaacgatcacggaagagatgttgacaccccagatcaatattgatgcccaaatcaaattaaacgacatcaccccggatctttacgccatgattcagaagttcgccccgtttggccccaacaacacgattcccgtgttcatgactgaaaacgtgacgaatttcattggttcaaaacaagtgggacgtaacaacgaacacctaaaactggtggtcgtggatgacacgagagtctgcaacgaccggagtggtatagctttcggcatgggagaggcattttcccgtatcagtaaaggtgaatattttgatatttgctacacccttcaagaaaacgaattcatggggaaaagcgacattcaaatgatgattcgagatttaaaattcaaagaggaataaaacatgcaatctttatcttccaaactattggaaaaagcagtagaacaatttgcttcccttccgggaatcggacgcaaaacagctttacgttacgtgctacacatgctgcgccaaagccccgaagaggtaaagcaatttacagacagtatcactgctttgaaagaatccatcaaagaatgccaatactgccacaacatttcagacagtgacacttgtgagatttgttccgaccccaaacgggatacccaaacgatatgtgtcgtggaaaacatcaaggacatcatgtcccttgaagccaccggtcaataccacgggctttaccacgttttaggggggattatctcgcccatggacggcataggtccttctgaccttcacattaattctctactggaacgagtggtcaatccttccgtgaaggaggttattttcgccttgcgagccaccatagaaggagacaccacgggatattacatcttcaaaaaactccctcgccgggatgaaatcacggtcagcacccttgccaaaggtatcgccataggtaatgacctcgaatataccgatgaactcacactgggacgctccctagtaaaccgggtaaaattcagtctaaatggatgattttcctacatattaaaaagaatccgtccggagttccggacggattctttttaaattacactttgaactacatgataattatttcaccaattgttccaactgcattcgtaatttaggatccgagggacgtttggcattcgcatccacaattttcccctcttcgtccacgatcacgatgcgagggaccccatgaatcaagtatttctttaccaaatccgatttaaaacctcccggcacgttcaactgcaactcggcacccttcttatctttaaccatctttctccacaaagccatcaactcatcacctgtatccactgacatcgaaataaatacgatattctcccctttcatatcatcagccaatttctccatataaggcatttccgcacgacaaggaatacatcccgtgaaccaaaaatccaacacctgcacctttcccttgaaatcggcagaagtatactcttttcccttcacgtcaaccgccttaaattccggagccatctgccctcttgcgatagttttatgggtttctttagactcttggtaacgagactccaaagccggcaatgccgccaacgcctccggatgggttatatattgacgaaccccttccagataaaccgggaaatcatcagaatatcctttctgtaatgtaagattcaacaattccaccaagaacatagaacgaaccttctcatccccgatcttctgcgcgtaaatttccatgtatctttccggagaaacctcaatccatcccttcttttccatctgttcgaatgtccccagcatcatgttaaaccatttcggtatctgcacgagagacgaatccgaaaagttcacctctttcatgaaatcataaaaattatctgccagttcaatcttcaactgaggagcaaacatcgcagtattcgcaggtccattcaatctttgcaagtaaaaatcacaacgatacttcaatttttgcagccgaataaagtcctgatccaaaccggaagtttccaaatttccaatcaagcgattcacctcctccgtgttcagtctcacccactctgccgagtaaagcggaacatcctcaggtacagaacctaaatatacattttcagacaaaaacgtattctcggcaacatggtctcccgcaaacacaacaccatccgcaccttcttgtatctccacccgtgctcccggagtcaaataaaccaaataaaatttcttgttcacccctacataacggaaataactcggtacattcaaatccacctcataagcataatttcccaaagaatccggttccattttcgtatatccggccgtagacccttccggaataaaaaagaagtttccttcaatcgtattcttaaactccactctcgccttcgtagacgattccgtcttatcctgacatccagttccggcaaaagccagaaccgttaatatcaaaaatacacaacatattttattcatatgggacatcatttcgtattttgaaccaaattactcgtttccatcgcttgctgtgggaaaggccacactaacagaggtgaatccggacgcaaagaatacgttttagtttctccggcctcattcacataagtctttgtcaacgtttcattaaattctgtacagaaacgtctcatatcaaagaatccgttataagtcaaaactaattctctctttctctcctcacgaactagtttaaatgcctcatcggcatcagcagcggttaactctgccgttccaggaaacacccgattccgatacaaatcattcagatatttcattgcgttatctttatcatcctttcttgcatagcattcggctatcatcaggtaaacttctgacaaacgcatacctcccgggttccacttcacattcgtactaccaaacataattgccccagtttctgccgtaggacgtggaggcatataatatccccaacaagtgatataacgtaaatcattattcttgtcatacaaatcgagcatttctttccgagcatactgcggatacggatctgtattagtatgtccaaactgatataataaatgttccggattcgaatcctcaagttttgcagcggtcatccacatacttggcattgttggaaggaaaggatatgttgcaagcgcctcattatacatctcattcatatcccaaagtttatgataacttgactttaaagcattcaacccggactccaaggctaggtcgatctctcctttatacagacgcaccttagcttgtaaagcatatccgaacccctttgtcggacgatatgaattcaaagcctgttccggcagatcagctaaagcctcctctatatcctgttctataaattcataaacttccttaaccgtatattgcttactttcagactccaaatcaaactttttatggataataatacccatatcggttgccgcagtctctttcttataaggctttgcaaaagtgttcaccaagaaaaagtaattatacgcccgcattattttagcctgagcaattcccaactttttatccgtatccggtccctctgcatcattcatatgttctactacaacattgtacgacgcaattctggaataacaatcagaatataactctgcaatatcaccatctaccatataattataacgatcaacactctcatcccaaaagaacccgatagaatacatcggatacaagtaagattccaactctgcctttttataataggtaacttcatttgccatataccagaaagaagtcatggaaaatttcggattagccgcttcaatcaatcccaaataatcatctgtcgaattcaataccgcttctcccttaggtaccacatccaaatagttatcacaggacacaagtcccatcaccaaagataaccatataacaactatatattttttcatacgtccactcaattaaaagttaatattcaaaccaagactataggtcggcatcaacaactccgtacgagttcccgcatttgcattgaatgattccggatcaatgccttccccgttacttgcccaatagaaaggattatccacttgagcccgaagactaacattttgcaaattcaccttcttaatcaaatctttgggtaaagaataggtaattccgatattacgacatttgataaaagaagcactcaacacgtgtacatcagcatatttccaaagataattacgatcctgatttgctccgaaggctcccattgccggaatatccgtgtttttatttgtctcagtccatcggttcgccatatctttatgcattctgcccgtaatatctacgtaagttgaataaagaggcgttacatcatttctcaaagaatgtcccgtgtaatacacaaacttcgtaaagaattccaagctcttccatcttaaattgatcgtcaaagctccgttccatttcggagttaattgtccggcgtttaccaagactgcgatatcacgtacaggctcgttcgattttacctctccattctggtcgtatacagaaggatctccagtctttgtcaaacctgcatagcgataagcgtacaccgaattataggaatctccctttaaataattacttcccggatactgcaacatatcaatggcattagaaggcacgtaacccacttttttaatcacattcttattattcgccgcagtcaacgtcgtgttcaaagcccaatccttcttctttaaccaatcgtatgacacggaaatttccaaaccggtatttctcatggctccattatttactctggccgtctcgaaacctaatgatgggtccaacgtcttattagccaacaaatccgagctgtagcgacgatagaactccaatgatccgctcaatcttccgattaacgcaaaatccatacccacattaaacgtggatgttttttcccaacgtaacatcttattaggagcttgcgtgatcaaagttatactagcctgcgtgtacagcgagtttgcataagttcccagcaagtaaggagaagaagactgatccacgttacccgtgattccataagttgtacgcaatttcaacatatccagccaagcgatatcattcaagaatgattccctagtcatcaaccaacttgcacccacggaccataaaggacgatagcgatatttcgggtccgtaccgaaaaggtctgcctgatccactcggatacttgcattcagactatatttagaatcgtaagtataccccgcattggcataagctgaaacataacggtgtttcgtattcgtcacattcaacaattcagactttttctgaagagcatctgtcaactgtccttgtacaccattcgtcatcaatgtttcccagttcacttgcttataagtcaactttctatcatcataaccgtaacgttcactttgagattcaccccattcatcttgacgaatttcagctccggcaagaaccgtcaaatcatgcttgtcggcaattgtcgtttggtaattcaactgcgcccggaaattaaagaactccgaatcggaatgcttttcagccatatgtcctccttgaggaatattataaataaagttattgttagacttagatgcgtaacgattcaccatgtcccgcataatataagaatccgcctcatcatattgcttagcatctgacttagtacgttcatactggaattttactcctaaatccaatcctttatacaacttgaaatcagcattcgtaaacaaacgcacatacacactcttcgtggttagcatgtttttatacatctcctctttcaaattatatcccataaactccaacccctctgtttcattaatatccatggcacgataataattttccttgtattgataaaccgcatccccctcatcagacaccacgcactcgtacggcatcgcatcaaaccaagatacgcctgattgagatacttctgtcttagtaaggtaaacattagatccgtacgtcaatgtaaaccaatccgctaatttcaactcgtttttcagataaatactatattgattagccgaatttgatcttaaatattgtccgttatcttcataacgaagtgaaaaatacaaattagacttttcccctccttttaataacgacaaattatagttttggctcaaagctgtgtgagtcaatattttttgtgcttcccgacgatagtcattatccctcattgcatttatcgcctgatttacctcggcttctgtcatattgccgtcaagcatttcccgataataacgctcgatacgagtatatgctttaggagcattagaggcatccttattagtaaaataagcactaggatcagttccgtattccgtataattaaacaaaaagtcttgttcgaaatcaataatatcactcgtggaagcataatccatataactcattttaggaattggctttatataaaagctagccgacaaatcaatactcactttatccccttttccttttttcgtcgtgatcacgatcactccgttagaagcacgtaccccgtataatgaagtggccgcagcatccttcaacacggttatcgtttccacatcatccgggttgatggaactcaaagattgattcatcacgattccatccaccaccagcaatggggttgaactcacggcaaaagatgaagccccccgaatctccaactcatctccataagtagacaaaccgggagtcaaaccttcaatcttggaaaccaaactcgtactttgtactttgcctaaatcttccgctttcaaaattgtcacggaacccgttgaacgttcacgagaaatcgtctggtaaccggtagccaccacttctcccagcatctcaacctcttcctccatcgtcacgtccaataatttatccgaaccatcatacaacaattccttcgtcttcattccaacaaatgaaaataccaaggtaacgttcttttctgttaatttgaactcgaatctcccatccacatcggttgcagccccaaacgtcgtacctttctgaatcaccgctacaccgggtagaggcatccccgtctcatctttcaccactcctcgaaccgtataaaccttcttctcatcattactcttataagaaataacaattaactccccctcttggctatatttgaaaggcatgccctttaacaaaatatccaaacattcctccacactcttattttccaactttgcagacaccttatagctgttcaagtcatcataattgaagacaaacttacaattagccgcttcactcaaacttttcaacgctttcgacaattccacattttcaaagtccaggttcaccacccgattttgtgtcacaccggatgcaatacttgtgaaaaaacacaagcaaaacacgaattgtatcaaaaacattttcacaattcttctactaacgttcctgtcaatggaacgcttcttactcaaaagtatcgccataaatgatagtttttggttataaattaaaatgattacttgtttatcttattacttcggaaacgaccaatgtctttccattcacctttattccaacccgattcgtcttcatcaacaaatcagtgatcacagagatttcgctgtcccggctcgcccacaattcaaatcgatagtccctggccttgtttcctacatatactacatcaaaaccataccaacgtttcaaatcatccataatagattccagcgattcattttcataatagaaatacccgtctttccaagctatataccgattcacgtttaccttcgtgatctccggcacgctctcgacaaagcgggcattttctcccgggtttaaagtatactccgaaccgtcctccgttttcttcaccgaaacccggccctgtaccaatgtcacgtgaacatcctcctcttcgtaggaacgtacattaaattccgtcccgtatacttttgtatatatatcggaagaaacaacaataaaaggatgttgctcatcgtgtgccacggagaaataaccttctcctttcaagaatacctcccggctttcacccgcaaaagaagtcggataacgcaattccgattcagaatttagccatacaatcgttccatcgttcaaggtcaatttgtactctgcccctttaggtacccgaagcgtgtgataactgaccactgccctctcggttaatttgtaattaatccccctcaaactatcatactccacgctgacaccttcacccaattctcgactttcactcccggatgcccccaacacaagttcctctccggattccgtgatcaacaccgcctgattccttccgggcgcaatgtgttctgccaccggaatcacctcttgctttttcgacgacaacgaattttccagtaaccaccagctagcggaaataagtataaccacagccgcagccacagacaaccaagtcattcgtcgagaccgacctccggatttcatctttcgagtaaaattccaatattccccttcaacatccaactgatcacccacggctagtcgaagccccccttccaagtacctccgacactcctcgtacaactccttgttacgggattctgccaaccattcctgcacccgaacttcctgcaacaattcaggatgattcagtaactcgatgacaaaatttaagcgatcttcttctttctcgaatttcataacttcacgttcattttactattacacgtaaagcatggcaaatgatgtgggtcaaaaaacaatattttttatttttttaagaaaaacgcatataacaacatcaattcgagatctgatgttttctctcttaatatactgatagcctccgttatatgccaccgaaccgtgttaatcgaaattcccagttcatcccccgcctccttgtattttttccgctcgatgaaacattttttgaacacgacagcagtctgtttaggcatattttcaataatatgcatcactttttcgatgagttgttcatactccacgtattcctcctcctcttcgggaaaggtctttttataggccaaaaacttctcttttgttttctccttcctcaaaaaatcaagagaacgggaacgaaccagagaatataaaaagggacgcagagaaaccgaagaatccaatttttcaaaattcttccacacgtattcataaacatccgttacgatgtctttcgcttcttcttcatcccggacaaagcttaaagcatgaacatacaactctttatagtgagttttatacaaaaactcaaacgtgtccctcttttctttatccactattatctttcaatttgatccatacttttggcatcgatcctttttcctcatatgtccgttcaaagataaatatttttattttaatcataatcttattcaacaaaccttctttccacaaaaaataaatcactcttccaccacattttatttacatcacattcccggttacaaaacagatcagggggaaataaggccacacgcacagatcatagacgtttcgtcctcgttcgataatcgctctccttgaacgtctttacaccgccggggacacgcttatctgaaatctgtatgcccttatttccccccattcttgcggagacctcttcccacactctagccgtagaccgatctcatgcccaacaaagtcttattaattattcgataaactcctccggccttcggccacctcctctataaacagaggaggagttggtgatacttcccgaaaacagggagtatttcaactctccctctgtttatagagggagtaccccgaaggggggagggagttaaaaacagagccaccttcactcgttatcgccgctcacgatacacgacatcctttatttttgcaaaaccactgtattccgcccttttcgtcacactattattcaccccatccaccgggtagaaccctagcttcccaccattgttatccggggctgccgtattgtacgaacccaccatcaactcatactgccgagccataaactcgtcggactggttattcaaatcattcaatgaacattgcctgtacaagttaaatttcaacatcgtaaccgtctcgttttcccctaaagcaatcgtattcatcgggtaagtcgtgtttgttcctaagttatgcaaatacaccttgttccccacggcataaaacatataagggaatagagaatgaaaagcaaaaatcgtcgccttgtcaaaatcgggtgcattcaaattctcgtatttcgcctcctgcacgaaaccgttattcgacatattgatcccgtaaatacaacgtttcccttcggcatcctgcaaaatagaatataccaaaccaccggaataccgggtactttccatgtacaccaattccatccccgtcttgaaactaaacaaaccgtcttccgtgtctgcaaccggggtcaaaatctgcatggcatcagcgacataaccatacttccagcccacgaaacgtttattatccgtgtcatacagtaaagccgcacgtccatttcccggacgagccatacttactcccacgtaaggagccaccttatattccggagtctttcccctttccgacgtgttgatcggatattcaaaagcgggaccagaataatccctcacctgtgcataagcgtttccggcatccgtcacgcagagattagctaaagcaccagctatacttgtaccatttaccgccgtgtaatacacgacatattcatttaccggaggaatgataaaatcaacattaccaatttctaaagactcatccgttttaaacgtttcccgatccagcatatacgttccctctgccgacatcacgtaaatcaaatcggcaggattcgcatatcgattaggataaaacccaattcccttggcatgtttcaactccggtaatcctagtgaagtcaacaaatcataagccggaatcacccgttctgccgagatcaccgaaatcatatccatccgaacacgctcttcctccccttcatcacaaagcaccatccatccctcatacgtcggagaagacactttaatatcaaatgtcttagacgtctgaacaccagaacgcttgtccgtcacggagaaccatgcaatatacgtgtctgccgcaaaagctgccaacgtgtccaaatccaatgagcccgaaggattcagatcgacccagtgttgcccggataccaatacgccacctaacttcttctcgatcttgtaactaaattcaaaattagcattctccttaccgatctctccctctagcgaagaaacgactttcgggttcacaacaatatggtcggaatttcccaacacctccaccacttcgggaatgttctcaatggttatttccgccacctcgtgatagtcgtaattccccttatcgtcaaaacaactacaaaaggaaaaaacaaacaaaaacagtataataggatttattctcataaccttatgtttttaatattattcataccgggaatagtcaaccgagtaagaaggagcaagttgcatataacttccgtccgaatccaattccggagttccggcatctgcctgttcctgtaaatatttctgtaccgtagtagtaaaaaaattgaatcgtccatactgaattttcgctccggcatacccggcgttatcccaatctgcagcactcaacccgcaaacagaattaacaacaagaaattttttcggagtccaattcccaaagaaaccatccccgaacatggaccaataccacggctctgtgtacatctcacttaatgaaaaaacaaactcatccccgtgaatcatcacccccgtggccgaataagcattcgtattcttatactccgggaaataacatttgaaatactcgttatcctccagacgaattgccagacgcaccgctttctccatcatatcatccgtacgaaagaaacggacacgcacgtaagccgtactttttcccgcaggtacaactaccgtatccaaattcacttcgtaatgtttcccctcgatagctgtcgtaccctcttgatccaccaccactttaaaagggcgatcgtaatcaaccaccttccccatcgtccgaattgtcgcggaaagcaccacactcttcaccgaggccttggcagaggcgaatgaataagccaccgaatccccgtaatattccgtggtactattataaatataactggtcacccgttgaaaataaattccgctatcatccgtagtaaagaccgaaatatcttgcttttcacaagcacagaaaacaagcgtcaagcttgaaacaaacaatataattttccatttcataatcttacaatttaacgattatcaacttctccggaaggcaagggtaacacgtaacgttcttccttagctccatacgtattggtatcatacccattctcgtcactgttaatattaatatacagccgtttgtacatgaaaaatatctgtccctctccgataaactcccgcaaatattccgaacgcaagcgtttcatgaaatcatcctccgaaacaaccgtcaattcgggtaatcctctacgggtacgcatctggttcagccatccataccgatctgacaacacgggttcacattctgccgcaatataatacacctcgctcaaccgaatcaacgacatgaagactgcatagaaatattccgattcctttgttccgctaggcttatctatccccttgtatttgatcaaagaatgcccgctctcccccacgccggaagcaacttgccaccacgtttggaaacggtaatcctgtgtctctcctgcgaaaagactcgtccccacgaaatcttttctagggtgcaagtaattattccccgcttgctcggcactgaaataatttgtataaatgtccacccggtcttttttgtaaatcccggtcaacacttcagtggagaacacccggtcgggattactttggtttgccaacaacttattcgggtccaccgccgggaaatgttcattcactttcgagtccgccaacagtttccgagccgcaaccaatgcgttcgcttgttcccccacgtacaagtacactctagccttcaacgccaacacggcataataattcattcgtaactggcgataacgtagatacacctcctcgtctttttcaagagaagccatcggtccattctctattaccgggtcactatccgccagtaactcctctgcctcatccaaatcccgcaaaatcttttcatgcagcacggaatctgccgtcatcaacggtaaagcaaccactttcgacgattcattataaggaatagcctccgcctccggatgcaatttatagaccggaccaaataaccgcaacatatcaaaatgcaggaaagcacgtaccgccaacatctcccctttcaacacccgatactcctgttcctgtaacacaccctcactctcgtcaatattctccaacaccacgttacaattcaaaatcgtgttgtaagccgtggtccatgtactttccaacgtttttttcacgttctcgtccgtgtaagcaaaggtactcaacgctgtcaagtacgtgttcaccggaagaggctggtaacgtttcgagatcacgtccaccagctcgtaggaaagattcttcccgtaaagagccggggatgccatcttgttatatatcccgttcaccgcggtataaaaaccgcctctcgtggcgaataattgtttctccgattgcttgtctttcggctgcacgtccagaaaactcgaacaccctacaccacacacgagtacaaccccgatccaaatgatattccataatttcataaccattcatctttaaaaattaaacgaaagtcctgcctccatactccgggcaaaaggataggcaattcctcgctcggaccggatggtcgatgcccggaacacgtcacgcatggatgcttgaatcttcaaactacttaaccctaattttttgatccatccgtcatagaactcgtatcccacgtagatagattccaaggtcaacacgttctcttcctgcacgaaacgggaagacatcggggtcgtctccgcactggcaatatccttgaaatgcacgatgtcccccacttcctgccaacgctcgtacaacgcccgcttgtcctgattcttgttcagatcatttctcgaaatattttccaccttgttataaaga

SEQ ID NO: 40 - DNA, 15565 bp, Butyricimonas faecihominis
gacttgtgtttagataattatttaccatcctttttttaatgtatcatttattgaacgtttaatgatattacaccatttgttgtaataccattttacctgtatggattgagtgatatttccccgggcgggaagtgcgataaaatcttggaatgggcgagaaagagatgataaaagcgatacttgaaggtgaccagaaagcctttaagctattggttgacacctatcagttgatggttgtcaacacttgtcatgctttcgtacacgatcggaatgaagcggaagatattgcccaagacgtttttatccaagtctttgaatctctaggtaagtttagatttgaaagtaaattatccacgtggttataccggatagcagtgaacaggtctattaatcactgcaaatctcccaggggacgagccataaaagtcgatattgaatcatggaaacaacaagaggtggcacaatcggttgaaatgccacaacaacagttattggaagaacaggaacaactggaattattacaccgggctatcgaccgacttcctgaaaatcaacgcacggcgctaattttaaataagtatgaagaactttcatacaaggaaattgcagaggtcatgggggttactctctcctccgtggaatcacttcttttccgtgcgaaaaataatcttgagaaaatattcaacacgaaataaaagacattgtcatgaaaaagataaataaaaaatatttgatttactgggtgaacattattctgctaatgttgaatacggcactcctcgtattcttttgttttacccccgaaaaaacaatatataagaatgaagattccaccatttctaatgaattccttcgcaaagaattggatttcacggatgaacaatataaactcattaatgaattggattcaatcgtcttgagaaggcatcaaaccgttttaaaactactctgtcaaagacgctatcagatgttgaacgaactggcaaagcccaacccttccttggaagagctcaacaaaatagccacgtccgtgggacatttgcataaagcattaaaaacacaaacggctcgtcatttactcaatataaaaaaggtatgcaccccggaacaatcaaaaaaactcgagaaaatgttcatcgatttattggagatcaacaaacattgtgcggaatgtgcagaaaaatgcacggatcaagaaaaatgtaaaagatgtcctaagttccatcattacaagaacatagaatccgattcactagaaataaacagggattctataaaaaatattacgaaataatgaaaaaaagtatcttgccagcgcaagtttttaaaataaagtctgtcatataaccaaagagagagaaaatcatgaaagttgaagagatcatcgaaaaggacaaggtaagggaagtgcgtgaggacttttataacgggatcatgaaaaagatggcccggaataaaatggatgatgccggtcccgtgatccgcaaaagacacctaggcatgagcattgccgcgggaattgcactaggcattctggtgggcagtatacaccaccacatgcacaagaccgatcggcaagtggcgatgcaggagtggctaggaaagtataatattaacgacactaaacttgaatgtattgaggacagactttttaattaaaaacagctaaacctacaagatcttactatgagtttgaaaaaattgttttttttaagcacggtcatctttttgatcgggcatatgaacctgtttgcccaatctgaaaaggtcagcctatccggaacgatacaagacgcaaaatccggtgaaacactacccttcgtcgtggtcaatatcaaggacttaaatctatggaccacgtctgacattaacggaaagttttcttttaaagacgtaaaaaaaggagaatatactctaaccgcatcctgtctcggctacaaagattatgaaatgaaaattaatctgagtaaaaatattgaaaaatacatcctaaaattagaggaacaaaccctagctctaaaagaggtcaccgtgaccgctacagccgggaacaagttaaacagttcttcctctattaaaaaagcagcattggaacacgtgcaggcttccagtatcgtggacgtgatgcaattgttacccggctcgctgaccgtcaatccaaacttgaacgacatctcgagactgactatccgtgacgtcacggggaaagacgccaccaatgctttcgggacagccgtaatcgttgacggggcaagaatgtcaaatgacgccaatatgcaaatggcctccacggccctatcaacccaaggaataagcacgtcggcaggaaccggtattgacgcccgccagatagctgtcgataacatcgagtctatcgaggtaatccggggaatcgcttctgccgaatacggggacttgaactcgggagccgtgatcgttaaaacaaaggcaggaaaatcacctttggaggttcgtttcaagacagacccaaaaatcaaacaggtctacgccggtaaaggttttgccttgggagaaaataaaggatttctaaatattgacgctgattacgtgcaatcacagaatgacattcgtaccccggcaaagtcttacaaccgattgaccgcgcaaatcggttattccaacgtgttcaacccgcagggaagagcctttagcctaaacgctaaatttaaaggtctgaccacactggacaaacaaaaaagtgacccggacaagcaatccgaagaaaagacaaaagttgaaaatcaggaaatcagcttgaatatatacggtaactggatgataaacaaggcgtggctaaccagtctgaaatacaccgtagccggttccttgggaaaacaatataactgggaccacgaacaacatacaaccgtcggggccgccaacacaaattccatggaatccggggaacacgtggcaggtttcctcccctacgaatattacagtgacttgaagatcgaaggaaaacccgtttacgcacaagccaaattaacggctaatatctccggcaaatacgggattttctacaataacttcatgttaggtggcgagtggagtacgaaaggaaatgaaggtaaagggaaaagtttcgacccgaacaacccgccgactcaaaatatacgcccccgttcattcaaagatattccctatatcaatgaatacagcggcttcgttgaggacaaagtaaaaattgaaatgggtaaaagatcattagaactttctgccggaagtcggttcaccaaaattgacaccaaaggagctgattttgacgtgatcgtagacccgcgttttaatgcccgactaacattatttgaaaatatctggaacaagaaaggctggcaaagcctgagcattcgtgccggatggggaatccagcataaaatgccgacacttgcctacttgtacccggacccggcttatatcgacaaagctagtttctcattcaaagacgatgccaatgaccataaattagccgtgattaccacgaatgtgttcgaaacggacaacgatcgcctgaaaatcccgaaaagtaacaacttcgagatcggcgtggacttcaaggtactcaatgtcaatgccagcctagcctacttcaaggaaaaattgaccaatggatacaatcaagccggttatgcagttccttaccaataccgggaatacaactacagttccagcctgaccaacccggaatacgtgaacggggaagtcgtggaaaacgggacacccgtgggttaccgcaccttgcaaacgttcggggttttccaacgcccggacaacgggatcacaaccgacaaatggggtatcgaatactcccttgatttcggaaagatcgacgtgatcaaaacatcgattctcgtggacggagcatttttccataccaaatcattcgacaatagtcttaaaatgagttatgaatcccgatacataaataatgaaccttatccttatgttggattatacgtgggcggaaacactgtcggaaacgggaatctctatcaacgtttgaacacgaacctacgtctcgtaacccacatcccccaattgcgtcttgttttcacgttaggagcccaatgcgtgtggatggataaatcaaaagccttatccaaataccaaggacaatgtctggcctacatgaaggatgacgacggaaacatcgtcgaaggaaatgtggaaaaagacaaaacctataacaagtatattaatccggtagcatacatggaccgggatggagccatccacccgttcacggaaacggaagcaaacgatccggtattccaacacatgatcaaaagcggtaaatccacctatttcgtggaggattcccttgacccgtacttcatgttgaatctgcgcatgacgaaagaaatcggaaggtttgcctctctttctttctatgcaaacaatttcacgaacgcaaaaccttggagatattacaaatccagtggttctgactttagagtaaacagcgacatcagctttggtgccgaaatcagtctgaaattttaacggataaaaaaggaataaagatgaaaacatatcatatacttacgcttctggtcatattccttttcacgggatgtctgaaagaagaaaaaatgagtatcggagccctaatcaaggtgaatatgccggaaggttttgaaaacaccagcccggaagggattgacgtgaaattatacagcacgacatcaggtctgacctacacgagcaaatgtgatgcctctggtatcgccacgttcaacgtggaatacggtttttacgaggctgttgcccaacaccgggaaaggggagaaaacacgatcgacatctttaacgggagaatggagcgaattgtactgagtgaagggacaaaagatggggatacttacacgataaacctgactcatgccaaattacaacaattaatcatcaaagagatttactacgcctcctgtaaaaaagatgatggtaaaaattatggaaaagatgcttatatgtcaatctacaacaattccgacgagatcgcctatctggacagtctttgtatcggaaccgtaaaccctgtcacgagtaccagtcccagtaacttcaccaaaccggacggaagtttatgggatgaaattccgctattcatgatggcatggcaattccccggaacaggcacagactaccccttacaacccggggaagaaacgattatcgcacttaatgccatcaatcacgtggatattgcctcgcaatccgtggatctttccaaagttggttttgcattttgggacccgctgttgacaggagcatccgttcccgcaccgggagttgaaccattaaaaatgatatggagaaatagtggtaatgcatttaccatcagcttgacaggcccggctatggtcattttcaaaattccaacatccgaagcaatcagcgcacaagcctatgctgaagatcccggaaatattcaacaagatccggtaaaaccttccgcaacaatgaaatttttgatgattcacaaggattgggtaatcgacggtgttgaatgcgtgacaagtgccagtaaagcaaataagcgaatccctaataacatcgatgcaggattcacttatataccgacaagttacctagggaattccgtttgccgaaaagtggatgaagttgtcgatggcaggaccatatacatggactccaacaattccagcgaggatttcgaagtagttccgaatacattaaaaaacagatagacgaactgtatctaaaaatgaagattatgaaattcaaaaaaatatatacacttggtctgggtctactcatcgccgggatgtcggccgtaaatgcccaaacccaagacaacgagaagattttttaccggatggatcgggtcaaagcgaacaatccttggacgaagtctttaaactacgctggattaacgttcaacgaaaatcaggatttcaccatcgtagaaatcgactttcaatatggaaaaggtagttttagaaatgtgaatgcccccacggcatccaataaaacaaacttgcaaacagaatccttccgaagattgaataaagtattcttttacgggaaattcagttttgactacatgaaccgcctgaaaatgggatggtgtaacgttatcaacccgtatcgctctccaatattctttgcagacagcatgccgggacgtcagaccatggaaacttacattctggaaggcggcatcggctacatgatcggaaaacactggagcatcggggctaaaatcgattacctgaccgccagtaacgccaagaagaaagacgcccgtaacaagaacacgtacatgaacttgaaagtatacccgggagtagtttaccgatccaaatatttgaacttgggactgaatttcatttatcagaaggagactgaaaacattgatatcaggacaatcggaacaggccggacaccggaacttctttccgtcgagggattgtggttctacacgtcagaacaggtgagttcaaccgtaagcatcatccgggacattcgggatgaagcgctaggaggtgccgcacaagtggaattccatacccaccggacccgattctttaaccaattctccatgctggaaaaaaagcaggagattttcaaagcgaactataacaaagagcgcggaggtgaaatgaaacaacgtgcgtacaattacaccggagcatttaatgtcagcggagaaaagtacagccactacattaacctgcaagccaatttctcaaatatgctaggctacgagaatatccagcaaaaagaagtcataaaccaaaatagcacttggacacaattcggaaaaaagaataaatcttccatcgaatcctccgtttatgacgtaaactataacctgtttcgcaatcgcaccgcatataacagttgctggaatgcacaaattggcgccaaaggcttttatgcagaaagagaataccggctatatccagctaaattccaacaaatattgagaaacaccgaaggttatctttcattcgagaagaatttccttttcaaaaaagggatgttggattgcggcataaacggggcctacaccatcgggggaggcacgatgttaaaaatgaaacaagaagccgaaaccggcttgccgaatatcgacgcatacccgcaacgaaaagatttactggaacaggaattcgagtatatcacatcggataaaatagccggaggagtaaacgttcgctacacttatttcctcaacaaggagaaagggatgaacctgtacgctatcggtaatgtcaattataaaaagtccaccagcggcctgtatgacggtaaagactggacaacgttgcaagccacgataggactatcattctaggggatcaaaaacaacaaatatcaaaaaagaaatgagcaagattaagaaaaatttatggagacatgtactgcaattgggtgtaattgcagtcattgccggattcattctgaaagtatttttcgggggtgcgccagccgacgtcgaggcctactgcccgttcgggggactgcaatctctcgtaacctacttgaattcaaacacactggcatgtagcatgtcgatcgtacagatcatgatgggggtaaccctagcaatcggtgttattcttttcagtaaactgttctgcggttacctctgtcccttgggcacggtaacagaatggatggccgttttgcgcaaaaagatgaagataaacatcaacatcaccacaggttcgattgtcgacaaaatcttaagagcgatcaagtatatcctgttattctggatattctacatgacgatctcaagcagcgaactattctgtaagaactttgacccgtactatgctatcgcaaccggattcaaaggcgaacttaccgcatggatggcgttgatttccatcgtctgcctattcctaggtaacttattcatcaatatgttctggtgtaaatacatctgcccgctcggagcgttgagcaacgtgttcaaattcacgctcacgttcctaggcttattgatactttcattaattctaggctatttcggcctaccgatgcaatggtattggttactcggtgcaagctgcgtgatcggttatatcttcgaaattgtgtaccacgaaagcaaggtattcccgttactccacattactcgggatgacgagaaatgtaaccattgcggtttgtgtagcaaaaaatgcccacaacaaattgacgtggcgaacctgaaagtcgtgaaagacatcgattgtaccttatgtggtgaatgtatgggatcatgtaataaaaatgctttacagataaaccgtaaaccggcattccgatggttacccgcaattctagtcgttgttctcttcttcgtcgggctgtggatgggtacccattgggaattgccgaccatagatgaacgttggggagacccggcaaaattggaacacttggaatccttcgaacgcgacggcatgagaaccgtgaaatgtttcggcagctccaaagcatttgccgcacgaatgaaaaacgtcccgggagtttacggggtaacgacctacgtgaatcgattcgccgtcgtggtttattatgatccgagtgaaacgagtaaagaaaaagtagagaacgccatgtttaccccggtaaaacggaaactgaatactcctcctgccggagtgaaacaagtaaaaatagtcaccttgggtgttgaaaaactatttgaccaaatggacgtgacgttcctaggaaacatcatccgtgaaaaagaaggtttctatggaatacaaaccgaatacgactgcccggtaagagtgaaattattcatggacatcaataaaccaatcgacaaaaaagaattaagaagtatcgtcgaaacccgtgaattcgagatgccggtgcatggtggtggagttaagaagatcgaatgtgactacgaactggtaaacatctcgaatcaagtggacacgatcggtcgtcaggcattccttgaaatgatgttcccggcaaccaaatctcgttttcaaattgccttgaagaaatacggggaagacgctgccacggcagtttacgagatgccctatccgggattggataaaccgttagttcagcgccaagtaccctatttgggaagcttcctttccacgcaagatggagtgatggaattcgccacggctctgaacggtgacattccggttatccggatcacatacgtgaaagaggttctggacgatgataaaatctgggaaattcttcaaaccccgaaatggaaaatccattacacgaacgggacaaccaaagaaattgatgctactctaacctttaaaacaccgggtaaaaccgttgaataaacaaccgtttccaaggggctttcaaaaagtcaattttaaaaactacccccaccagctcccccttgcacagggggagagctgattaccaagcgttttctccccctgtgcaagggggagttagtggggggtagttgataaatacaaatacgacttttaacatatcctccacgggaaacttgaaatcattttttacgatgcttttatcttgtcagagtaatccgtttggattaccccgcgagacttatacccatacaaattgtaaatcaccatgataaaaaacatcatctacaccatattactcaccctgatcatcagtcccttggtggctcaggacatcggtacaggccaaacaattccgatggatcccgatatacggatcgggaagttggataacgggctgacctattacattcgtcattccaagaatcctaaaaacaggggagaattttatatcgttcataacgtgggggcaatgcaagaagaggacaaccagaacggcttggcccatttccttgaacacatggcctttaacggaacaaagcatttcccgaagaaaaccatgttggaataccttgccagcatcggtgtacgattcggcaccaacgtgaacgctttcacgtccagaaacgtaacggcatacaatatctccgaagttcccttaattcgggaaacgatcatcgacaccgtgttgttgatgcttcacgattggtccagttacatcacctgcgactcggctgaaatcgaggcagaaagaggagttatccgggaagagtggagaacccgggacatcccccgtatgcgcctgtcggaacaactgaaccccgtgatgtacaaccattcgaagtatgccgaacgtaacgtgatcggtgacataaatatcatcatgaacttcaaacgtcagaccttgttggatttttaccacaaatggtacaggcccgacttgcaggccgtgatcgtgatcggtgattttgacgtgaacatgatggaaaataaaatcaagaaaattctatcaccactacctaaagcacaacatccggtacaaaaagaagtgtattcggtccccgacaaccgggagcctctcgttggcatctcgaccgatccggatgccggtgccatggtagtcagactcatgtataaactggatcttccttccccaagtgaaagacaaacggtgaaggcctacaaaaccgacttggaaagaagctttgtgtcggaattattcaaaaaaagaatcatcaacaaagctgcacaaggcaatccttatatccgtcagggatcagtaaactacacggacttaacgcccgacaaaaagatggtattcatcatgggagccgtgaaagacaataaagtcaatgaagccttgaacgaactggctatcgaagtggaaagaataaaaaagcacgggtttaccccggaggagttcaacgaactacaagccaacatgcttaaatcagttaaactccaaatgaaccagagaaagaatcttaaaagcgtagatatggtgaaagcctgtttggcacatttcaccacaggcgccccaatcccgccgaatgatttcttagaaaagatgtcagtctccacgctacaaaatctgaccttagaggaactgaaccgtacagccctagagatgttctccgatgacaatatactcatcacgatactcggtccccgacgagaaagtatcagttatcccggcgaacatgagttaatcgctaccgtccggaacgccaaaaaccaaaacatcacgccttatgttcaccggactctaaaagacacccggttaatcacgaagacaccgcaatccgggaacattttagaagagaagaagaatgacacgatgggtactgttgaatggactctttcaaacggcgcaaaggtcatcataaaatcatacccgaacaaaaaagacattgttgacatcaaaggattcagcgaaggaggaacctccactctgccggaaaaagaacttgccaatggattcatggccaacaatttctgccaactcataggagtgaagaatttctcccgggccgatttaaaacaaatcaatgtcgggaaagtcatctccctcacgccggaaatcggggagtattacgaaacattgagcgggtatgcagccaaacgagacctagaaaccttgatgcaaatgatccatctttatgtcacggaaccgaactttgaccaacaagagtttaaccatcaaattgaaaaaataaaaagtacactaaataatcgcaagggcctcccaaaagccgagtatagtcaagaagttcaaggcgtgaaatacaaccatcacccgaggaaaacaagcctaacccttgaaaaagtaaacacgatcaccttcgaaaagacaaaacaaatataccaagaacgttttgccaatgccggagacttcacgttcattttcacgggagacattgacttagaaaaattaaaaccactcgtggaaacgtacatcgcctctctaccgacaacaggggtaaagcaggaatacaaagataaccacgtgcgttacgccaagggaaaaatcatccggcatatcgagaaagagttgacaaccgacaaagcttcaatcagtgtgctttacacggcaaaactcccctactccgccgaaaacaaaattctctcggctgccttccgctatattctccgggacagatacatgaaatccatccgtgaggaaaaagggggagcatacagcgtcagcgtgaatgccacggaagaggctgtcccgacaaaccagatcacgatagaggtgaatttcgacacggcccccttcatggccgacgaaatgctggagattgtccagaaagaaatcgatgatctcgtcaaaaatggcccctcatcttccgaattggaaaacgcacaacgttatttcaacaaactttacaagacaaacatttccaccaattcttattggctggaaactttatcagactattaccgatacggaattgacaatttcacgaattacgaaaacacgatgagtggcctaacaccatcagatattcgtaaattcgccaaaaccgtgtttggacagaaaaataaaatggaattcgtattattaccaaaaaaataacgggatgaagaaaacaacatttatcaaaagcattattgccgccctcttaattgcaggtagcacgtttacagcaaaagctgacaaaggtatgtggctgatccatcttatggcccaaaccaattacgaggcaatgaaagccaaaggggttgaactctcggcagaagaaatatatagtgaaaccgctccttctttaaaggatgccatcgtggccctagatttcggaagctgcacgggaagtatgatctccaaaaacggcttgatgatcacgaatcaccattgcgcttacgacgacatccagaagttgagtagtcttgaacacgattacttgaaaaatggtttttggtcaaagaatcaaggtgaagaaatccgtattccgggcaaaacggtcatgttcctagatcgggtgatcgacgtcacggacgagtacagggaagtactgaaaagtttcgagaaagacgacgaggcagctccttatacttcaagaagagccaactccgtgatcgaaaagaaatacgcgaagaaagggtacgaagcctcatgcgcggccatgttacgaggtaacaaatattatttgttctactataaagtgtacgaggatgtgcgccttgtggcggctcctcccacttgcttcggggcattcgggaaagacacggataactggtcgtggccacagcataaaggagattttgccatgtaccgggtgtacggtgacaaggatggaaacccggccaaatactctccggacaaccagccgatcacgccgaaatacgtgttacccgtgtcagtagccgggattaaggaaggtgactacgccatggtattgggctacccggggtcaactgcccgctacacgccatctttcggggtaagcgagaaaattaacatcacgaatccagccatgatcaaggttcgggacacgaaattagctatcctgagggaagccatgaatgccgacgagaagatcaacctccaatacgcttccaaatacttcatgaacagcaactactggaaatacgccatcggtgaatgtgaatacacaaaaaaatatgatgttgtcggccttaaaacagccgaagaggcgaaactaaccgcatggattaacgcagatcccacccgcaaggctaaatatggtaacctaatagaggaattacgagcttgctatgcattctccgctccctatatggccaccgccatcttccaccgggaggctatcataaacggggcagacttaacccgtctcgccatgcgctttaaaggattcgaaagtgccatggaaaaacaaggatgttgtgtcctacacaaagactgcgcacaatgcaagaacctgagacatttctgcgaacaatatttcaaggactatgacgagcaggttgaccgcaaggtcttcactgccatgatcgagttatacgtgaataatatcgacccgaaattcttcccggaagaaattggtaacctcgtaaaaaaattcaaaggtgactaccagaaactgacggactatgtttacaaaaattccgtactaacaacgaaagaacgcttgtttgcttggttagacaagggtgttgaccaaaaaacaatcgacaaagacccggcatacctgatcacgaaatccgcccaaacgaaaaactacgaactgcgtgattatttaaaagacaataaccaaaaaataggtgctttacgcacgctttacatggaggctcttgtcgagatgaacaagggtaccgtgcttcccccggatgcgaactcgacaatgcgaatcacctacggaactgttggcggttactcccctaaagacggagtgacttacgattaccgttcttccatcgatggttacaaggaaaaatacgtggaaaatgacccggaatttgacttgaacccggactgctgggctgccattcaaaaaggagactggggacgttatgccgataaagacggaaaactttataccggattcgccacggatctcgacatcacaggaggaaattccggcagtccggtgatcaatgccaagggcgaattgatcggtttggcatacgacggcaactgggaatccatggccggagacctttattacaatccgaaatataataaatgtgtatgcgttgacattcgttttgtactgtggattatagacaaatacgcgggggcgtcaaatttactaaacgaaattagcattgttgaataataaaaaattactatatttgtttggtcaaggagtgagtaatcttgatacgaaaagcacactacgattatttaatgtttttaatcaatcggtcactgaagcacgcaccaaaaagtgatcttagtttgattccttgacatagcggtctccgaacgggaccgcttttttcgtatttcacttaccacactctcgccagtattgcagtatactctcttgggtgtctcgttagttagtccattacaagtccagtaaagatccgtgacaaattctccgcgttcgctcgttgatttcccgttaacttcccgttgacttcccgttaacttactaacgagactcccaagagggtacgacgcgagtaaccgacaaatatatagattgtccgaaaaacaagaccatcaaaggtaacccgcaaaccaaggcaaggttctaacatattattcactgacttccaactcacaacgatttaacatcaaaaataatccaaaacatacacgttcattaaaaataatttctatctttgtcccgcatttggaaagatgcaggagtggctgaactggcacgcctggaaagcgtgtaaacctctaaagggtttcgggggttcgaatccccctctttccgctaggaaatattgaatttcagagagttggaagttaattctaactctcttttgttttaatagcatggtctgttttagggtgtttttaatgtcggttttcgactgaaagttaaaccaagagttaaaacgaaaacgaagttgttattcccaacgtttttgttttgtcttcaacaatcactatctttacagaaagaagaatgacaacatgaatttaatagaattaaatatggataaaataattgccttgtgcaagaagtacaaggttcgtaaattattcgtgtttggttctatcctcacgaatcgtttcaacaaagagagtgatgttgattttatagttaatttcgacaaagcacaagtaacagattattttaata

SEQ ID NO: 41 - DNA, 15468 bp, Butyricimonas faecihominis
gaaatcatcaatatatattacttcttcgggtgtgatctctttaccataggtacggatttctacccgtaaaagtttggctccttccggggcggtgaatgatttgccgttgaacacgttgatccagccgttcgtttgttttaggtaactttgggcttgtatgggtttgttgtgttctgccgggagtgcagtgcttttggttttacgccagtaacagtaatatttccacggaaaagagggagaaggggcatttacgtgcatttttatctcgtagcgtttgccggtttcaatttctacatcttggtacaggtaagttttaccttgtaggtaggccgcttgtccggaacgggcttgggttcccgtgatcttgagggcgacactgtctttcccgtctttataaaaatgccaatggtcgggttctttttccgggttactccattcctcgaaatccccgttccgtaataagctttccccgtttccttgtatcccgccttcggttaattccgggaaattacattccacgtgaatggtttgattcgtgtcgatagctaccgagaaggggataatttttcgctttggtgtgttgtcttcatcgtaggtaacagaaagtgtggtttccccctttttggcggggaaggtccgaatcattacttttccttgatgatccacgggtttcgtgatcgtgccgaaggtgttcgtggttgatccggaaaaactgaccgaggacgggatgaaagacaattctaggtttaggttggatatttcctttggaattgcgtggagagagacctgtaatgttcctgttctccggaagagccggatcgggggaagggcatttttattttctgtgatactgacacattgtagagctgtggagatgtcactggcctcttggtaagtgttttcttcatgtggtaggcaaaggaacaagttttcaagtgtttctccggtttccggaataaccatgtttcccttgggagcgttggccacgagggctaatctgtatctgcccagagggagagtagcgtgaagtgtgttttcatgaatgtccgatgatgtaaacgtttcatgacgggcgatacgattatctcggtcaatggcaaacaggtgcaaatggtgtatggaaaattccatggaagtgttacattcaagcgggattcgtatctcctgcccttccatgactttgcttttctgacatgaaaaaagtacaaactgcgttaccagtaaaaatattatttttctcattgtgtttttgaatttgtaactggtaaacctgcaacttgtaacttttagcaaggtaaagtcttgttaaaaaatggaaatcccgatgttcgtggtaaaccgttcgagtgtttcgattcccatatacgagttcccgtgttcattcagttcgggactccacacggcgatactgagtttgctcgggatgatggctaccacgcctcctccgacaccgcttttgcccggcattcctacacggaaagcgaactccccggattcgtcgtagaaaccgcaggtcagcatgagtgcgctaaggcgtttcgagcggctcacggtgaggatattctcgttgttgtgtgggttggtcccgtggttggctaggaacaggaatgattttgcaagatcctcgcacgtcatggcaatactgcattgattgcagtacacgtcgatcagcgagtccacgtcgttatcgatgttaccgaaacttttcatgaagtgtcctagggcttgattccggctagcgtgttcaaattcggactgggccaccgttttatcatagtaaatgtcgtcgtttccggccacgcttctcacgaattgcaggatggcttctttcggtcggtggtaaagattcatcactttatccgtaaccacgagagccccggcgttgataaacggattacgcgggattccctgttcgtgttccaactgaaccagcgagttaaacggggttccggaaggttcccggcccacgtatttccacaggtctccccccatgtggcgaacgaccatggagagagtaaagactttcgaaatactttggatggaaaatttggtttggtagtctcccgtgccgacgatctgaccgtcgagagtggctatggcaatcccgtattgacgcgggttgatatttgccaaggcagggatgtaatcagctactttaccttgtccgaagaggggttttacctcgttatatatgttgtcaataacttccttgtaatccattgcaaacgttttaaacgggggcaaagataagaaagtaaatgattcatcggtacgtgtttattttatttttcgtacaattttgccggaataggtttccgtgagatgttcttgaaaatatatgtttttggggacttcgtaaggagataaacaggatttgagtcgggatagtaattgctgacattcagcctcgtcccaagggagcgattctatgacaagcacggctttttgtcctagccggcagtcgtcttcagccgtgataaagaaacgttggcttagaaaagaggcgatacgggcttctatgctttccggaaatagttttactcccccggaattgatcacgttatcatggcgtcccaaccattcgaaatgagtggtgtcaacaagccggacaatatcgttcgtgatgaatctctgttgttggagatgcggggtgttgatgattaggcaacctctttcgtccgtggagaaggacacttttcccaaggcgaaataggcggaggattttctttcgccattgatttcccgtagggcaatatgcgaaacggtttcagtcatgccgtacgtgccgtaacaccttgttggtagctcttgaaggtgttgttctaacgtgggggagacggcagccccgccaatgatcacttgcttgatgcgagcgaatcgggaacgagtttccgggttggccaaggtggtttcaacctgcatgggaaccatggcggcgaagtcaatgtcgtcctcgatgttttgcaggggagaagaggtcggttttatcgtgatcaggtcggctcccgagaggatggtgcggacgatcatcattttccctgcgatataagtcggggagaggcaaagtaacaagcgggattgaggaccgatgtggaaatattcgtttgttaagctggcggatgcgatcatgtcttttttcaataaccggatctccttcggtttccccgtggaaccggaagtatgcccgataacttcttctttttcgttgtaccattcctgcaaaaaggcgatgacttccgggtcaatattgcccggaagcatgtttaaatccgtgtaccgtttaccgtttagtctgatgttcatggcctttaaaaagagagcggggataaattccagcttgcctgtgggttgtaccggatggtcgagccggtttgttccaagggtgaaggggtattattcgtgtagagttgccccgttcccaagccttgaggtatgcccgtggggtgacactccaaaatataagctgtccattgtgcgatggcattcaacccgatattggattccagtgcggaagtaatccaccagccgatgttacgttctcgggaacgggcaatccattcccatgagcctgagaaactgcctaaaagagatggttttattacgacgtattgggggcgaatagtatcaagtagcttgtctttgtttaatccttcgattccgatcaattcttcatctagggcaatcggaataggggtatttcggcatagacgagacatttcttcccattgtccttgacggatgggttgttcgatagagtgaatatcatattgagccaattgttccagtttccgaggtgcatcttccggggagaaagctccgttggcatcaacccggagttctattagctctttgctgaattgtgaccgaatcatgcgtaacaggtctaactctgcatcgaaatcgatagctcctatcttcaatttaatgcaatggaatccggcctccaactttttgataatctgttggcgcatggaatctttggaacccatccagattaaaccgttgatttcgacatctgtttgtccttcggtgaaaggggtggggtaaatgatgcgtttacctccattatttaaatccgctatggcggtatccaagccgaattggatagaactccaatctcgcaagtagcggatgtcacgtaggctgccgaaaccttcgcaggtttcttttaatattttctcgaattccgggcggtcgtctgcacttaatccccgaaacaaagcacactctcccaatccgtatatttcgggttgttctgactcccagactttgacaaaccaagtttctttttccatgagcactccccgggaagttcccgccggttgtttgaagtgcaggttatattttgaataggttgcttgtaacatgatggattgtgaaatttgtaggtcatgggaattttgggaattttttgaagtccgggtctcgtttctccaagaaggcgtttttaccctcttgtgcctcttccatgagatagtacatcagggtggcatccccggcgaattccattaatccgtgttggccgtccaattcggcattcaatgcccgtttgatcatgcggatggccatcgggctgcgttgcatgatggtcttgcaccagtccacggtttcatcttccagttgatcgaagggaaccaccttgttcaccatccccatctcttcggcttctttggcggtgtactggcggcaaaggaaccagatttcacgagctttcttctggcccacgtggcgggcgagatacgaggaaccgaatcccccgtcgaaactaccgactttaggtcctgtttgtccgaaacgggcattctcggaagcgatcgtgaggtcacacacgacatgaagcacgtggcctccacctatggcgtatccgtttaccatggcgatgacgggtttcggaagagaacggatggctttgtgcaggtcgagtacgttgaggcggggaaccccgttttcatcaatgtagcctcctattcctttcactttctggtctcctccggaacaaaacgctttgtccccggcccccgtgagtacaacaacaccaatgtcactccgttcccgacagatatttatggcatccagcatttcgaaattggtttgcgggcggaaagcgttataaacctcttggcggtcaatggttattttagctattccttcgaagaattcaaatcgaatgtcttcatattctttgattgtagtccattctctttttgacatatccggtatgttatttttagtttttacaaagtgtaacgacaaatgtacatgataatttttattttaacgtggttcgatataaagaattcgcgtgatggtacagggaagaaagtcatggctttgttcgtggaaggtctatgtcttcttcgacgttgggcgggatcatgaacatagcatgaacatagcatcttcatagcacgaacactcgccagtgtttttgatgtgaaactgatgtcaacgtgttatatggttggtggtaaggaaccccggaggaaaggtaggatattccgggcaatccaccatactatgattaatattaagtacgtgttgacggctatcgggtgatggcacatccttttcagccgggccaatctatttcggggatcaaaccattgcgtgattacgagagccattagataaggaagagaaagaataaggaacgggttatacccgaaagctcctttgatattcaggtgtaataattgatgaattgccctttggctaccacatgccggacaatcaagtcccgtgaaccaacggaagggacatttgggtataaatgccgaatactcgggatcaatgaagaacaggatgatcccgagtagtataattgatatgaggcctattttcttaaagtgtccgaacgaatacattcattcgaatattaataataacctcctcccatcagtacacttgctaatccgctgatgaacccgatgatgacggcgagtacacctccacctaatgcaaggaagaaaaataatcttgccatgttagaagcttttatcgcttcctcttgctgaccggaattccagaggttgtccacttttgtggcgtagatgatagatacaatccctaacggtaagcaacataatacggtcgataggattgcccaaattagccaattgtccggtttggaattgttgtttaccgatggttggggcggtgtgggaggaaatggtgggggtgtggaaggcgtggaggttgtgttcgtgaaccatttcgcgagttcgggtacttctcctgccgggagccattgggccataccgtttttccacacgagggtgtttctcgttaccccgttgctaattaattcttcgggagaaaccgggcctttttgttcattcttttcgttcaggtaaaaatagttttccatagtttaataatttaccatttatattcgcttcgtaaataatttccgttaaagtcgtaaatatctttgatatatcccccgtcggcttcgatgcgttcagaaccggcgtagggtatgatgtcattgtatttgcagggaataatgatttttccttttttattgattgctccccaaactccattctgcactttaccgtctttcgtgaatccaccgcggttgatcagtgatataccgtttaattctttacagatgataaattgacagggtaatatctcttctccctctagagtatagaggccttcttggtcatccattttcacgtggaggagcgaggtttcccgccagcgggaaattttcgtgtactcgcaaggaacgattacttttcctcttggggtatatagtccttttagtttccctgatttaaccatgaaattgtcggttgtgagccaagtgtcaacatcatcgtatatacatgggataatttcagttccatcgagggcgagtatccctttttggttgttatacgtggcccggtagtaagcgggtgaccagtaactattgggtgcgatattatcgtatatgtagggaacgatttccaagccgaatttatccatgactccgactccggatcttttctctatgatgcagcgatcgtaccggaaacaataggcatgatttagtactccataatagaaaatggaaaataaggaagatagtaagaagggtagaactatcagtgttgtattcagtaggtattttctttttttgtaaaacagggaaaagatgatacccagtaccccgatgatgaggatgacaatacccggaacgtatgggtaaatgtcaaaccacgaggcgacaaacgccgaaacaaatctgccagcgagtaagaagagaatagtgcctaaggtcgcgtataaaatcaggacaatctgtaccacgctgatttgtggtttaggaggtgtgatacattcatgtaattcgggaatatcctttgcctgtacccagtttggcataccttcacgccacacgggtgtttctcgcgtgattccttgttgtttaagttcatctaacgaaagcggtccgacctgtttgtgggtcttgtccatgaaataataacttatccccataaattaagataaaaagaataaacaaacgctatcccaaaagtagtaaataaatggataagtgtgctgttgggggaagaaaaaatgagatggggctttgggcggggctgtccaaaaagttatttttcaaattccctccccccttcggggtactccccttactaattttagatttaatgattttagattttagattttagatttccgccacacaaagccgacgcttctagattttctactttcaacttttagtttttatcttttaatctttatctttctcttgcagaggtagagttgaaatactctctgtcttcggaatgaatcaccaacccctcttctgtttatagagagagttaaaaatagctcttctgagaaattctagtttcccttagttaatccctcaacgcttgaaaatatctttttaatatttctccgtttatttttccgggtgtgtgaacaacgagaatggccggttgttgtcccggttggtagaattcggatagtgctgattctaacgagggtgcatctgttgctcggtacaccttgaaacgatgaatttcggcaagccgttctatatccacgtcgtgaggggtttcaaagaattcttcaacttcttccagaccggaaggacctgccaaaaagcggaatatgcctcctcccccgttttggataacgatgattcgtaatgacgggggacagtttttgatccataaagcattggagtcgtaaaggaaactgttgtctcccacgatcagcgtggtgatcccgtcgaatgttgaggcggcacccatggctgtcgaggtacaaccatcaataccacttgttccccggttggcatcggtacggtccacctgcgtgtaccggaagagttgggcgtaacgtatcggggtgctgttgcctagttgtaaacggctcccggcaggaagtgcgggaatgagcatggagaaggctttcagatcacaccacgggatacgtttcaggtagttatcgtgtatttgtgttgctttttcttcccgttgatgccattggtgggcataactggacggcaaactgttggcttttatttccgcgggttggagttgatcaaagaatgttcgggtgtccatggggacgtggagggtcatggacttgtacgtgtcaggcggtgtcgaccgttcatcaatatgccaatgagaatgtggggtatgttctcggatgaaagcctttatcatgcgggaaacgatcgctcccccgaacgtgatgagtagttcaggggcgtaagtctctacctcttccggttgtatcgtggagattaccctgtctatcgtggagatcacgaggggaatggatagatttgttacgctttccgttaaaaccaccacgttgggaaggcttgccagtaacttgatatgttgttgtaaaaccgggtcgggttcatggaatccggcgatgatcatgaccttgggacaaaggaaaaattcctcccgcaggttttgagagatttctgcggttaaggaaggggtttctttcagagtcttgatcacccgttctgaagttatggattcatgttgaaagccgtacaggggttctctcaagggaacattgatatgcacggggcctttccggccgtgttgggatagattgatagcctcgtttaccagacgattggtatgccagcgatcctcgttgcacgtgatggctgtcgggagctgaaagctctttttcacaaagttacataatgccccttgctgttgtatcgtttggctatcgtcttgatctatccattcggagggacggtctgccgagatcacgagaaggggaataccctggtaataggcttccgccacggcaggggagtaattcaataaggcggttcccgacgtgcagatgagggcaacggtttgtccggtttgttgtgctattcccagagcgaagaaggcggccgaacgttcatccacgatgacatgatgtttcaaccttttttcccgggcaacagacacgagtaaaggtgcattccgggaaccgggtgacagaacgacttccttgatccctttttgaacgagtagactgataagaattcgaacgttttcaatatcagaatgtgatttttccataattcatttgacgtatgaggtttagtaaagtatcggctttctgacaagtttcctgccactcggtttccgggtcggaaagaggggtaatgccgcctccgacatacaaccgcagggcgtcatcgaatacttccatggtacgcaggttgacaaacaagtcaaatgccccggaggcttgcaatggtcctaggaatcctgcataatatccccgatcccgtttctcgatctccgtgatgatttgcatggctctctttttgggtaggccgcagacggccggagtcgggtgaagttgtcctaccagttcgtcaatctggtcggcagggagttgttcgtcacttctgaaaaaggtacagaggtgaaagacattcccggcttgtaacgtgataggtccctcgatttcgagatggcgggtaaagaaatgtcttagcgtgtcttggatgtagtcggtcacgatttgctgttcctcgatgtccttgtctccccattcaggtggattttttgctgttgccacgggttgagttcctgccagtgacatggtgaagaatccgtttctgtcgtatttgaggaaagtctccggtgaggcacccatccaagcgcatttacccggaatggcggcaaagaacaggaaggcgtggtggtattgtttcatctgttcgaagatcgctggcgatagtcggagtgaatcgcagggtatcgtgatggttcttgatagaacggcttttttcatcccttcccgtttcagcgtgtcgatcatcgtgcgtagttcatccaagtactcgaaatgctcgcagtcttgcttggtgaaaatacgttccggggtattgaaaaccgtgttttgtaaatttcgaatcgcttcgccgtcagtcaggtagtccgtgaatgaaagatcggccttgatgaagaaggggaaactccaagaggagtgattgaagggggtaataacaaaccctttttctccccgatgtttttcgaaccccttgaatatccgggtatcgttggagagttgagccccgaaaacaacttcacgcgaaccgggtaaacggtacgtgtaaaacgggatgttatttcgcaggcagatgttctgcgcttctgcaaccgagagtctgttttctgtttgttctatcatggcatatcctattcttaccgcaaaaataggcaaaattattcgctggtgattcaattgatgcaaaatgtaagtatttttgtggggagtgtggctgcgccacgttgcaggttgcaagttaataaagttattttgtttgaatgaaatgaataaagataggagcgggtataagtttttgggtggttggcgaggacttcgggagttattgccgaataatttaggggccttcacacaggtattcgtttccttgaaaagttataatttccgtctttatttcgggggacaatgtatctcgctgatcgggacgtggatgcaacagattgccatgagttggctggtgttccggttgaccggatcggtgcttttactggcgacggttacttttatggcgcaaatcccgattctcgtggctaccccttacatgagtgtttttgttgaccggtttgatcgacgtaagttgctggtgctgacgcaatcgctgtctatgatacaggcgttgttgatggctttgctcacgttgaccgggttgatacaggtgtggcatatcatgattctgagtttattgatcggtttgattaatgctttggataatcccactcgacagtcattttatccgagtttggtcccgaaggataagttgagtaacgctattgcgctgaattctgccgtgattaatggttctcgtttgatcgggcctgcggtgggtggagtgttgatcggtttgttgggagagggcatttgtttcctgttgaatggtatcagctatattgccgtgattattgccttgttgatgatgcgggtagcgcccaagcgggagagaaccgcgaagcaaaaggtgtgggaagatatgcgggatggtttccggtacgtggcgggtaatataccgatccgtacgctattgcttttgatgagcgcgatcagtttcttcgggttacccttgatgacgtttatcccggcttacgtgaaaacgatcctgcacggggagagcgagatgctggggctactactttcatgtatcggtgtcggttccttcattgcggccttgtatctggcagcccggaagagcgtgctgggactgggaaaagtggtgatgctttccggggcattgctggggatcggtttgtcggtgatgtcgtttgttacgattccttgggtggctgccgtgctatgcttgccggtgggcttcacgattattgcagccgtggcttctatcaacacgctgttacagaccctttccagcgaggataaacgaggccgggtgatgggatatatggcaatgtctttcacgggtatggctcccgtgggcagtatggtgctgggggcaattgaaaaatggatcggtttgcaaatgattatcctactatccgggatttgttgttttgttgccgctttggttttcgaatattatcgccccttggtgcgtagatatgcccgtcccgtttatattgaaaaggggattatcaaggagattgccattgggattgattccacggaggaacaacggttctgatccctattcgtcacttcctttcaataccggaagactgatgtggtatttcacggcaacgacccgggttaaaatgacacttccggccgtgatgatctgggtagtgatgtgtcccacggcaaagaagtcacaggcgaagtaaattaatccgcctagaatacaggcaatagcgtatatgtccttacggaagataaggggaacttcgttgataaatatatcccggatgactcccccgacagctccggttgtcatacccatgataatggcaacccacattgggaatcctgcaaccaaactcttctcgatgccaaccacggtaaatagtcccaatccaatggcgtcaaagatgaaaaacgtgttattcaatcggatgacatatttcccgaatataatcacgaataacaaggccagtcctgtaacaattagataggagggttggtgcatccaaaaaggagttaaccccagcatcaaatctcgtgtcgttccgcccccgatggctgttgcggctccaaccacgtatgccccgaaccagtcgaatcgcttggctgatgccaaacgtattccactgatagcgaacgcgaatgtaccgatgtaatcaatgattgtagtaaaatcaatattcatattcctgttattttttgagcctgcaaagctaataataaaggaatatcattcgccacgtattttgatgttttacagcatgataatagggtttataaacctattttatacccactcttcgcttttcactttcccttccacggaaagtacgatctttttgatcgggatgttacgggaggccatttctctcacttttaaagccatttgcaggaggccaccgcaacaaggaacttccatgatgagaaccgtgagcgtgtcgatccgggcatcgtcaatcatgctacgaagtttgtccacgtaagaatcggtattatgatccagtttagggcaggcaattgccaaaatcttacctttcaggaagcgttcatgaaaattcccggaggcaaaggctgaacagtcggaggccagtagcacgtttgccctttggaaatacccggcttgcgggtttaataggtgtaactgcacaggccattgtcggagttcggagccaccggaacatggggttacagcgggtttcatgacaggttttaattctcttgccatggaaccgggacatccacatcccagtttcggtgtggggtgtaattcttgcaggtttatggggatgttatggcgtttcagatagtccagtccctgttttaccagctctttttcaccgtgttctttcaggtgacgtaaatgagctagaatcacgtgttctcctttggacactatacgctccataacagcttcttcactatatggttccgcttcccgctcttctaattcgatggcaccgacgggacattctccgatacaagcacccagtccgtcgcagtacaaatcacttatcatgacggctttcccgtcgattaattgtaaagccccttcgtggcaacctttcacgcatagcccgcagccgttacatttttcctcgtctatttttataattgtccgtttcataatcagtcgtttttggttctagggcaaagatacacgtgaaaataggggaattttgtaatgaatattacagatggagctcaaaaaacaagaataattgtttatgaattttaaattgtaaaaaatagagagaatgtataagttctaattaatatcgtttttttctttttagtatgatatacactctctttagacatcattcgtagagcttctgggaggtattcgtggaggaatgagaatagagtttgtttaatatcggaacaaattcgaatcaaagacactcactgaacgtctttgaaacgtctttgattcgaaagtgaaacgtctttgatccctaagttcatcgaatcttcttcgaatttcctgcgggtatttatggtattctccagtatctccttgtacaagaaactaggaactttttcctttcgtacgaggagatactggggaagtgttaaccttcaattttggaaatttacttgaatgcttttttcaagcgttccagtccttcttttaccgtttcgagcgggcaaccgatgttcatgcggaaaaagccttctccctcggggccgaaatccgtgccgctatttaagccgagtttcgcctcgtggagtagtttttcctgaattttctcgtgggataaccctgtcgcccggaaatcaagccagagtaaaaaagagccttccgggagtatcatttttattgagggtaactcttcccggagaaattgatcggtaaacaggatgttcttttcgaggtaacgaaccatttcgtccaaccaggcgtccccgtgcttgtaggcagcctctagagtgacgtgtccgaagatattacccaaatccaagtgcagacataaaagttctttctcgaaggggcgacgtaattccgggttcgagatcacgacaacggaattcatcatcccggcgatattgaatgttttactcggagccatcatggtcacggtgatcgcggcaatctccggtgacagggaggccattaccacgtgcttgtgtccgaagagggcaaggtcggaatggatttcgtcagagaggattgtgaccccgtattgcaggcataacgctccgattcgagtaagttcttccttggtccatactcttcccactgggttgtgagaattgcttattatcagtaattttactccgtttttcagtttcttttcaacatcttcccagttaatctggtaatgtccgttttctacattcaaggtactgcatacgagttcccggttgttatctttcaccacggcatagaatggaggatagacaggagtaaaaatcatgaccttatcatgttcttccgtgtaaactcgaacccctaatgctagggccgtgacgataccgggactacttaacagccagcgggtatctacttgccaaccgtggcgacgtgccacccagtcagcgaatgcttgtttggctttatcacttcggaacgtgtacccgaaaactcctttttcacaacattcacgagcggcatcgagaatttcgggggcaacctgaaaatccatatctgctacccacatgggcagaatatccgtgctaccaaacacatttacaagattgtcgtacttcacgcaactggtgttccgacggtctattatctgatcaaaattgtacatactttttttatttaatcgagtagcaagttataaaactcttttaaatatttatacgggaaatgtc

SEQ ID NO: 42 - DNA, 15391 bp, Butyricimonas faecihominis
cagtatagattatgagaacagagtatatatgggagataaaggttaaaaacacacctaccttaaaaagaaaatgtaatcattgtaatagtaatagattttattgtagtaacaagttcaggatgaatgcccaaaaaagaaatattgatgtatggttaatttatagatgtgttgaatgtgatagtacctataacctgactatcttgtcacgcacaaaaccagaattgataaaaaaagatttattctccaagttttcagaaaatgatgaaaaactttcttgggagtacgctttttcttctgaaataggacgtaaaaatggtgtcgaacttgattatagtagtgtcgaatacgagatattgcatgatgatattttgataaatgagatcttggatgccgagggggaggtcgtggcgtttaaaattagaacccattttgaatttgggttgaagttatcttctgttattcgcttttgtttaggggtatcttccaatttgttaaaccaaatgatagaagctgaagctatttttgtttctgaaggctgtttgctaaagaaacgtaaagttaaagatggagatattgtatttgtgaataaagagaagttacgaaatatgtatatatttcgggggatgttataaatctatggactaggggctgttccagaagtcatttaatttccaaaaactcctccgtcacttcgtgccacctcctctataaacagaggaggtgctggtgactctttccgaagacgggtagtatttcaactctccctctgtttatagagggagtaccccgaaggggggagggagtttgaaagatgacttttggaacacgttattcatttttcatcccgatataaaagacgtagccgtagtaacttttgtatttccggtaatagtcgatttcatctaattcccgttgtactaattgctgggcgggtttactgtttttatatttttccaagaagagaggaatgttttcttgcatgggtttgtaaaaacaatccaaccaacaatattcaggtaaaatgaaatgggctaccggggtgtatccggcttcttccattttcttgattttattggaaatggtgtcaatttcggcataattgaaattccagaattgttcaatctcatccggtcgggtattcgtgagccaagaaacttccgaaacggcgatcattcctcccggtttcaggaattgtttccactcccttagacctctttcgaatccgatgttatagatggagccttccgcccagattaaatccagttctccgggttcaaaaggtaggttctccatggaaactgcaatgccggaaatccggtcgctgagtccatgatgaatggcccgttcctttaaaagtgtgatcatcttcgggaataaatcgatcgccgtgatctgtcctttcgtgttctcggcaagcgtgatggtttgtccaccgctgccgcaaccaatatcggcaattttggcgttatccgataactccccgataaagctcaaggcttgtcgggtgacttgttgacttccggggccttgacggtttaggcgtgaaaaaaagtccacgatcatgtcaaagtcgaagtctgctactaattgtaattcttgttccataattgtgataaatatatgtgattatatagtgaatcccatgctttagacataaagattcggataaaaattttcgtcgtggcagtaggcacttgaaaatcaaaaaataaaatcaatagaaataatttccgggtaggaaacccggatagggaaatccagcctgaaagaattcgggctgttaattacgcatttatcttcttagaatttgttgttttcaaaaagcgatattttgtttgttgaggcgaaggtatattattttcatttaaaatctattttccggctctaaaaaactcgatcatttcgctggtaagactaatgtcagattcagaagccggaatgttttcccgctcaaaccattcggccaaggccagttcctcccggtcgagcgtgatgctgtcgtctccttccacttcggcaaaaaagcccattaaaagcgtgtcggagaatgaccacggttgacttttgtagtatctgaggtttttaacgtgtaatccgacttcctccatgacttcccgtttcacggtttcttcgacgctttccccgatctcggtaaatccggcgagtaaggcgtagcgggtatattcccggttggcatacttggataacaggattttattcccgttcgtgacggcgatgatcacggctggcatgattttcgggtattccgtattattacaagtcaggcaatgtaacatccgttccttttcatggggaacgagttttgtcccacaatggctacagaactggtggttgtcgtaccatttgtagaggctgtacgccgtgatacctgcaaatgctaggtgtctcggctcgcttgtccggaaaagcccgatgtcttttagctcgaattccggttgtccttccgggacttgatgtaccagataaaaacagtcgttgtcaatggcgaataaataaatggctttctcgtaaatactttcttcgattccgtttaattctgcaaaacggggaaaacgtagggttgctgaagctttacttgccagaaccatatgcccgtcgaaataaagtgcgtagcttgttgcctccggacgtttgggggcgtaagcatttgaaaatatatggggcgcgatatcttgtatcataccttatttattttgcctgtgaattcgggcgtcaaaggtattaaattgttggatatgacgctagtttttaaaatgaaaagtggctatcccaaaagtcaattttaaacaactacccccactaactcccccttacacagggggagttggagggggtagttagcaaatacaggcaggacttttggacagccactttaagaataaaaactttgtaattaagggtaattggctcctattttaccatctcgtaatcgataccgtttacatagtagatagaatagaagtttttattatggtttttcatccactcccgcatttgttgaatgctgttcttttcagagtcgcagtggtcggaatctttgtctcctttagcctcttcttccgcgacttctttttcccagttgtcgatgtattcctgtgacaggcgttgttcctgtaataccccggtcacgacgatttcggaattaaccagctctttgttgaaagattgtatgttaccaccagcttcaacacggattgtaagtttacccgtggagtccgcgataaaacagcgacgtccggagtgagaacaagtgtgtttcacgacgcctttcagaacgaccgtatcattcagttgttcttcggccacgttcagaagaccgttaacgtccaaggccttggagaccaaggatatttcagtggtattctcctgctgtgtttttttgttcgtgtttttacatcccacgatggaatgtgtcgtgatacaagcgataataaaaataaatgtacttcttttcatgacgatatatttaatgttattttcttattttggcaaaaaggcacacggtaataaatccggcaaatcccgtgaataacgtgataatcccggcaaggtatttcccgtatgatttctctttacgatacacgacaaaagtaactattgtcagtataatattcaacagaagagacgggaaataataacccgagatccgggggtagatgtaactgttcgtgctatcttgaaaggtcaccgtgaacgggaataaataaggtagtgttttgtcccacgtggattccggtgccgggcggaacaggctgtccacttgacgcatacttttattctccaaggcgtaggtatgttccccgtccgaagaaatcttggctaccgtccagtagaacatattggccatgatggaaacccggtctttatcgggattcacgttttccaacactttcacgaggcggtacccgtccgtggaaagatagtaaagcgtgtgattcgtgtcgaacaggaatccgtacaggctccggttgtcaatttccatcgggaacatacaggagatgttacttgccttcgtgtccttgacaaaaggtttcccgtttgtcatttttacatggaaaagatgtccctcgctatccaaggcgaaatacccttcatcgtatgatttctggctcgtgggaatcccggtgacccacagcgcggggaacgtgaaaccggccttctccattgcttgctggaaacgggtggatttctgttcgtctacccggttggtggccatgtcgatgaattcgatgttctctttcagtcggaacatatcgctggggttttcaaggtctacttttcccgaacaggattcgaacatggggtagagttctatgaccggggtatttttatctttgggtttataccagaagaaaaagttattccgggctatggtttgtcggtcaaccggaatcccttggatggaatccgggatggcgttttccatggctaactgacgatagtagaacatgggtaacacccggtcgaattccgcgtccgagtaaactttcccgctcatgtcttttcctctcacgttatcattgtcctgatccaaataacagaattggttaatgacagaactgtaataggtgaacgggtaccggggagaggaatccatggttaattgaacgagtgacgggataatccatgataataggaaaatggataatccgatatatagaatctttattttcatctgcttgaaatttaatgatattactgcattccttctttaaagtgacgaatggagattttggggtatagggctaaaagtacgagtgtcccgaacaggaaggggagcatgtaaatgtagctacccggtacgccttgtaccatgaataatgataggatcaataacccgatcacggcattatagattcgctggctccacacgggttccagaataatccacgccgtaagtagataggatgcgaaaccgcataatacttgcgggagtatcgtggcgaaccatgcaccgaccacttctctcgggaaatccgcggatagtccccacaggaaaccaccatagctgaccgtgaaaaggagtaacaggcacgccatcccgtaacttagcatcaggaacacgattcggttctctccaagcgggagatgcagtgtcagtttgaaacgtttcttcgtcatttccggaataaactgggtgattcccatgatgatcccggcaagtagcggtaagacttttatctggtccagcaaaaccacgttttttaggataaatacttcccacaagtgtggcattcccacgttacgggcggcacttgaaatgcgaagtgcaatgtagcccatggcgaggataaataccacgaacatcaggagaaacatccaacgggttttaatccattctttgaatagtagtgctttgttcatcgttttagtgttgtttttgattaatattttccggttaacccgataaaagcgtcttcaagggataaagtttcctcctttaaatctgccacttgtacaccttttgattccaatagttgccggacggtttcgagtggttcgaatgagtaggtaatccattgaccgttatttttttcggtgttccatagtttttcatgttccgtgggaacttgaccttcgttcaaggagaaacggaaacggtggaagttttccatgatttcccgggtcggtttgtgaatcagcaagcgtccgtaatccagaatcatacaatcgtcaatcagcaattccatgtcttggatgatgtgggaggtcaggaatatcgttttatcccctccggcggcaaaatcccgcaagtattccacgaacagacggcgatagccggggtccagtcccatggagaaatcgtcgaggatcagtaattccgggtcttgggcaaatagtaacccaagggcgacttgagaacgctgaccgcaggacatatgattgattttctgatgaggaacaacttttagtttttccatcaaaccgtagaacgcgtctcgtttccagttcgggaaaaaggcccggtaatacttttcgatttgctcgatcgtgaaataggtgtgttgcacgtgaccttccagtaataagccgatcttggctttcgtggcgggagtgaggtgattcatgttctcgccgagaaggtaacactctccggaacagggttttaaataaccgttcaatatgttaatgatggtggtttttcccgttccgttttttccgagtaacccgagtactttacctttttctacttcgaagttcaggttctcgtaaattaatttttctccgtaatagtgcgttatatttttacacttgattactttttccatgtataaaagatattatggtttaaaaaacaatgccgcaatgtgcttgcagggtttcccggtgcaagtcgttttggcaggagtcatgttgccagtttaatttgataaagatacccctgtttttaggcagggaataattccagcggagttctatattcgtggtccagttgtccgtggagagattgtcgtaagccttgtaaactgcggctagggcgatttgctcttggtcgatttccgtgagctgcaaatcggcggttgaattcttacgatacaccccgtccagaacgaactggaaagagtgctttttgtagccggttgcggcaaagaagttcatcccgccggataaatagtttactttcatgaggcgggcagggtcaagatattccatcttgaacgagttgaacccggctcttggtgacaggtaccatgtaaaacggtctcccttggtttgcccgtatactcccgaaacggaaatatctgcttttttcacggatagctgttcggcctcgcccgttttttcgtacacgttggttgtggcacttccgataagggattcaatcccttgacgatcttggtaggttgcccgtgtccggactccccactggtgcttgttccggaaagaagtgtaagcgatttcggctttcatctcgtcctgattcaacgtgttcaagggcaggtcgttcaggtctgaaataatcttctcgaaagagaatctttcatacccgaaggagccggagaaaccttgtttgtcgcgggggaaaatttcaatgcttgccccgtagcgatgaccgtcgtagaagagggaagtggcccctctgcgaaaccggacgtagtccatgcccagaccgctgagattataggtaatggcggaacccagttcgctataaaacttcacgtcattggtttgcttgtattttccggcatggaaggcgattcccatggagtatagcttgttcaacttggccgacataccgatggaggctttcaggtccgagacgatatttctggggcggggatcgatcttccggtactcgataagggcccggtaattggcatatatcccccaagtgaaacgtttatgttcctgcgcgtatcccccggcaaaataatattcttcaaagtccatgtccccaccgaccgagtctgcgaccacgtaaggatataccgtcaaataatcggacgtttcgttccattctactttttcccttttcccttttttaaaataggcgtttccccatgtcttgctgttttctcctaatggcatataagaaaatgcgtggaaggagaaattacgaacttccgagcctaattggggcaaaaatgccttgtttgcattctgttgttcccaaccgatttgtagttccgatatggagaacgtgtgagcatagtaatttattgccgggttatcatagatttgcgacacgaaactctccgtcggggagaagtaaatccgtacgcgggtgtttgccggaatgctatcctgcgcccatgtcccgaaggtctggaaaagaagactaaaaatcagaatgaaacgaaaagtcatgattttgtcggtttaataattattgttttaaagacggagtggccttggcctcaaagtcttccgtggaattattcgtgtctttcagtatcttgcgtccgtcaggagtggtggaaagtactttccggcggacacttttgttgtatcggtttttgtcgagtgcgacttccccgcagtaggtgaatcccatgtcgagggatgcgtcaactacattccaagcatattgtgctttgttgcttatgttgaccgcgtcgatgatccatgcgttggggacttgataagcattcttgtcttgggattctcctataacgttaatatatgtagccttgtatgtgtaatctgttaaaaaagtatttttatccacttgtaaccgggcaatagcataagcgcaaagtccttgattgtgcagactccatgtcgtttttgtatagctatagattttgtcaaggttggtcacttgtggattatctatatctggatttttgtcactgtcatcataccattcgaagtctgcattacttaggtcgaaagaattgctgtttgcttctctgtgatctattgctttatcacaaatcaaaagagattttccgggttgtaccggatagtcttttccgtttccgggaatggcgtacacgcattgaacagccattgctcgtgacatgatgtccggtgtgtagtcgtatttttgggaggttttaaaagcggattctagaataacaagtccgtctgcatataaaacggaatcggaattgttgtatattttaatatattgatctgcaagatattgttttccttccggtgtcgtacttccggcgaaatagacctcttcaataacaaaatccgctttcgagttgaaaaggaataatttaatattatcagcgcttgttgttccgacaagattcacggattctttatatccttttacttgcccttcaacggttttctcgtcaacgatataattcattttcccctctacggtgatattgtaaaggccttcgttgagcgtgattttccctgtggttccggtcatcgtgtttgttgtctgttttccggtgttcacgttcttgaacgtgacgtgtaggtcggatatgcttgttacattcaagtcttccggttctgtgagtgttaaagtaaactctgtgatttttactttgtcatcatccgtgcaggcaataaatcctgcacagatgaataacataaatactaatacgtaagaaattttgttgatcatgttgtttttgtttttataaagtgtttatttcttcaaagatggtgtagcttccggggtaaaatcctcggttgaattgttggtgtcttgcagaatttcccttccgtcttccgtggtcgtgaaagttttccggagaacgctctttccatatcggttttcatccccgtcaataaccccgcagtaggtccagcccatatctatcgtgggcgaggttacaatccattggaattctgatttgacacttaaattgacagcgtctacaatcatttcgttcggtactttgtaacaactttcctcgcggggaatctggtattcttcaaagacaaacatccactcgtaatcataagtatagtcttgtaaaaacttttcgatatctcccagtcgagctatcgcgtaactattgaaaccgcgattgtggaatacaaatttgccgtacggggtcagtatgttgggaacttcgtggttatcaatatcgtcactatcttcatagaagatttcgaaatccgctttacttaaatcgatggagtttgagttttgagcttgatgatttatcccgttatctgcaatgataatatattctccgggattaaccgggtgttcggttccatttcccggaatggtaagaatagagtttacggccatagcctctctcatgatgtctggcgtgtagtcttgcttgtctgtggttaggaatgctgattctagaatagataatccgtcggcatacagcaccttatccgtgttattgtagattttaatgtatttgtctccattgtattgttgtccttcttccgtcaccgttcccgtgaaaaatatctcggcgataatgaagtcggaagacgtctggctaatgaataattcggttgctaaagaagcggtcgttcccgatatgttgacagattcttcgtatccccggattagtccttcatggctttctccctctcgcttgtattgaataaaaccttccatgctgatatgatacattccttccggaagggttacgtggatttgattattctcgaacgtcgtgttatttgtcactcgtccggtattcacgttggtgaactttactaccatattggatatactaggttcttcaaatccttccggaagtgttgtgtttaatgtaaattcggttgtattaaccgttttgttatcgtccgtacaagacagcacgctaaagatcgtcacgatcagcgaacagaaaatgataaaattgtttttcatatttatgatatattggtgttataatttgatgttcaattccatgccgaaataggggactgctttccttctgattttcgccccgttggcctcgtagctgggattgtagtccagtatgttgtttacgaacagggagagtcctatcttttgattgaaatacttggttgccgagaaattgatgttgatggatacgggaaccgttgtccgtttgaaagcggcctcgttgtagttcactaccagatgctggcgttccatgtcggtttgatcggcagccgtgtaatcgtgttcttcgcctttgatgtccacgtacttgatcggtaccccgttctttctcatgctctcctgtgcggtaaaccacatgcattgtaccgaagtggcgaaattcagtccgagcttttgcaggtacgtgtcgaacatgaagttcgtgttgaattgttcccgaatgtacccgtcgtcgtccagatataacccgatgtattttaattctttcccattcaatatcacgctgggtttcctgtacaccggctggctgttgtggtaggtcgatttgaaccatgccccggtaaccgtgagacgggtgtgtatggattcaatacggttggacgagtattgaaattcaactccttttttgataatcatgctaccgttcgtgtttctcccgtatgtgctgatcaccgtgtcgttcgtgtaagtcaggtcacttaattccggtggcccctgtaatgaggtgtggtcaatggttgaggcgtcatattttttatactggaaagaccggtagtaattggttgttctgaaaccgtcagtcatcttctcgtagaaataattcacggagaacaggtgtttgtcataatcgaaatccagacgtacttcccatttcttgttacgggcgggttccagatcgtaattcgtcgggtcaataatgtaggtcatcatgtttaaacgccggaagtcagcgttcgtgtgataatagttcaattgggtcaggtcgtaatagatcttctccgggtagagttgtgacatcacgggcatttttctttgccatccgatcccgccgacaagttggatgtttaattgtcggtcgaagagaaacagggtcgggaatttccattgtgcgtttacccggggatcgaagtatattttaccctgcatccggtactccgcatccaagttgagcggggagaaggcacgtatacccccggccacgatcagccgatgccggtcgataggaatatcaatccggtcctcgatgaaaaacgataacaggtgatctgccggaatctcgtcatacggtctggggcgataggaggtcgagggataaagaggccgtgtcaggtcgtacacctgacctttccctaggtttttactcattcgccattcaactcccgctttcaatttattcgtggtgttgaaaagatcgaagtgaaattcactcatcgtcttcacgtaagcattgatgggtttgccgtccacttttaaatgtgccgtatagcgatacgggagaaaaatcccgtcgtgttcgccttcttccgtgttgtcgggaatgggggtgtctttatccagcgagataaatttagtctgtttgattttgttgagcgagtagtccacggcggcggttaagttgacgtattgccagtgccgggattgggtgaatacccagttcagcgtgtttgacacggacatccggtggtagctggatttgtatttgtctatctttttatagctgatgtccggatcgcttttctcatcatcaatggattgcccgtagtccaagtccaaatcccatgataatgaccgggtgtttgttttccacacccgtgccatgtgggtggttgcggagagacgtttgtagttttccagattgttgcggggatcgatctctgcatccaagtaatcgaacccgaagttgaatatccatcctttgtttgtcgcgaatcctttacctaggtacacgagtttactttcggggtctgattttatgcgggcttcccacggatgggctcccgcttttcgttggattttgattactccgctggtcagttcaccgtattcaacggaaggaattccccggatcacttccacgctttcgatgaaatcagttgacaccatacgcatatcaacccctttgcccgtgctgttccggtagtaatcgtgatcgctttgactggctcccagcacgtgttgcatgttggcatccgtgttgattggtaccccgttgacaagaaaagcggtacctaatgatgaaatatcgtaatcgtcgctggaaacaccaacttcccgcaaacgggcttggtttacaccaccgagggcgggatctttcgttcttccgcccggcagtaatgccagaatatccgtgaaacttgacggttgcaggagttccatggccttgcggttaatcttggaagaggttgtaaggcctctggattcggatgcggtgacaataatgtcttttagcgtgatattgtccggttgcaaggcgattgcaattgtcgtatcccggtggatggacagggattgatgtatcggggtatatccgataaaagagatgctaagagagtaggtcccggttggaacgttttttatgctgaaacttcctttcgtatcactgatcgcgtgaagttgcacggaatcattctttaataatacggttgcgaattccagtaattcgttcgtcttggcgtcttttatattcccttgcaggtgaaattgtgtttgactttgcgcttgaatcggtagcgcgatagatagataacccaataaacaaagaatctcgataatcccaaatctgcatttcatcacttacttctttttgtcgatgcaaagttatagggtaggataatatgaatccatcaccaaaaataaggatattgggggtgcttttgggggagaggtgtccccgtttatggggataaaaaaagaatggggctgactaaaagtcaccctcattcttttgtttataagttttataaacccaatgactttctggtattttatttctgtaatttatcggctctttcttttaatcttgctgcacgagcctcgctatccgggtgggtagaaaacatctgttgaatgcgagaggctttttctcccccggtattggagagttctaccagtttggtcaatgcttttgacatggcgtaggggtcaaccttttgttgaaggcagaaatcaaaagcgtaatcatcagcggcgaattcttgcttttgtgagaattgtgcccccatgaaagcctctgccaacgctcccagttgggaatcggtcaatttggacgctgtttcacttaccgcacctgccacgttcttggcagccgagcgaagataggcatttttcatggcgtgtttagtgtcttggtgtaccacgtgtccgatctcatgaccgataacagccaacacctcgtcatcagtcattaactccattaatccggcaaagatacggatgctcccgtccccgcaggcaaaagcgttgacatcgacaacttcatatatagcaaaattcagtttcagcccttcaatttcggggaagtttgccgtgatcttggccaagcgtttacctaattcgctatccggtgccgccactttattatgtgtgtccatccattgtatgtattcttggctcatgttagcaatgtcctcgtcggaaagagtgattgctccggccgcgtctttcccggcttgaatagcttttttcgtgtcgattttcattttgccgatttttatttgcgcttgtaaagttaaggttccggcaagtaataatacgcacatgaatagttttctcatcgttgtagtgaattttaatgtttgattattaatatttccttattgtcgttatatgcttataatataacgtacaaaaataagcatttcccttgtatcttcaacgagaaagaattatttaaaaatattctcgtaagaagtgagcaagtgaagaaaattatattacctttgcatcgctcaaatgaaaaggactcgtagcttaatggatagagcacttggttacggcccaagaggttgtgggttcgactcccgccgagttcacgaaaagcaaatgaaaaccttgtaaatcgactgatttgcaaggttttttcttacgcgaccgacgtgttgttaaattcttgcctgtaagaatccgtcaattatatgttgtatttccatgacttgatcacgggataagttatctaaaaattgatcgttgatttgtacgtcatattcgattggaggtgtaatgtttacctttgtcaaggtttcgtttttcacgatcattggcatttctttgatgatctctattttcttttgcgcctcgttttcttccagcaataggatatgacgattattcttgcgtgtgggtgccggctttatttttcgaggttttattttcgggatggagcattgtatgtctattccttcaacttgttgcagaaacgagagtatatttaggaacaagtctaggagttgtaatgcggatatatattgtatgatttctccaaacgtcgaaacgttgtaacgcacgttaaagctcccgttgtcaaaaatggttatcttttggattttggagaattgccccaaaccaggacctaggtatatgctcgccgggaaggcttcatcttctcgatcgaagtactcgtttatggtgtcgtgaagagatttcaaatcttcgggtgatagcccgtgaatggtttttctcccaaattttaaatagtaactttgccggggttcatcttgactcttggtcatagtggaaatgtcattacttttcatggtaattaatttttaattattataaaatgacttgtacccttgcgaaacattagcaagtggtgactcaagtttggaggtaaattatccatgatgtgttgtgttagtggaggcagaaaaaagacggttccgcctgtcccgttgctcaacaccaaaggcgtgtgaggtgcattaacactctctacgggggtacgaaaccgccgtatgaggataacgggcataaaaaatgcctgtcataaattggcaggtttccccgcctttggtatgttgagcattacaaatgtacaactaatttttagtaatgtgttacgtgattatcacaggatttgtaaaaaataatataataatttgtgtataaggt

SEQ ID NO: 43 - DNA, 15375 bp, Butyricimonas faecihominis
tatgtttcgcgtgcgctgtgtctgcagcaaaggatgacgccgtttttttcgaggcgttccaggccgtttaggttatttttcgtgcggaagactgcagacgagattcagccaagtctcgtgggctctgaaatgtgtataagagcaagtgttattacaatgaaaataaaaacaggtatagggatcgatgtccatcggctggagccgggactggacttttggttaggagggattaaactggaacatgaaaaagggtgcgtggcccattcggatggggatgtgttgattcacgcaatatgtgatgcacttttgggagctgccgggctggatgatattggggtatatttcccggatacggaccccgcttacaagggtattgatagtaaaattctgttgaagaaggtgatcgatatgattgagaacaagggatttgctattggtaatattgattgcgtgatatgcctgcaaaggccgaaaattaaaatgcggaccttggagatgcgggagtgtttgtctgaaattatggggattgatgtagatgaaataaccatcaaggctaccacgacggagaaactgggctttgaggggagagaagagggggtttcggcttacgtgacggtgctgattattaagttataaaaggggagtcccgaaagtcatttttcaaactccctcccggcttcgccgtactccctctataaacagagggagagttgaaatactccctgtcttcgggaagagctaccagctcctcctctgtttatagaggaggtggcacgaagtgacggaggagttttttgaaataaaatgacttttgggattacccctttctataactatttcttttcatgtagtttcaatacttttccgtcggggagggttaattcggcttctttcccttttcccatcaggcttacttgatcgtttttgtacatgtagccggaagccatgcgttgctgcggtagctcgtaggtctggtcgtcaagtgtcacgactgccagttcttccgcgggatagaaggtaacttctacttggtatagcattttggttttaccgtcaccgccttggaataccacgttaatcacgctttcgggagtttcggtgtacaatgtttcaccgcgttgttcgatgatccattgtccgtttacctgtcttacgttataggtgtcgtcatcttccacgttccaagcgtaaccgcctttcggtagttcacgtctgtttagtagcgggttgttttccatgttgggaataaatacttcggccaacgtggaatcggtggagaacacgatgaaggtggaaagtgtggcttgcggatcgttaaccgggttcatgcgaacaccggattcgaacaggcggatacagtcttttctagcttcagaccaagtgtagcctgccgcgccgttacatccgtgggcgtcgtttgcgacaccaactttttcttctgttttaggcacgaaaacaagagtttgtttccggtctttatccgttaatttcaattctttgttttcaatgctgtacgaggtcatggcagccaaagtctggatgtatttgctctcgaattgtagatccggacaagccatcatggtgcttccacccggttctaacttgatggtgttaccttccgtggagtatcttccgaaaaatcggttacacccggagaatccgtacatcgtgttggtgtcggtcagcatgagggtgggtactcgttgcggaagagtggttttcccctttgtggttgtcatctctttcagttgccattcgttggcagtcagttgcgctttgtctccgctgttacttttacagccagagaagccaagcgtcacggcgatcatcattaaaatagttgtttttctcatatgtgtgtgaattttttacaaagatacgacctaaaacaggaaaaagtttataattgttataaactttttcttgctttgtcggcgagggattcattatctgaatcttatccttgattcatttttagtaattcatcgatgtgcgtgcggtcgttccataactgtggcactttattctgtccaccgagtttccctttttctttcagccagtcgttgaaaaggttcggacgagctgcatggaggatcagacgctgaagtgacatatctttatagcgtttcgcctcgtagtcggaatttacttttttcagttccgtatcaaggatattggcaaaattttccaagtccacggggggagttccgtattcgataatccattcgtgggctccttttttaccatcctccatgaataccggggcagccgtgaatgccatcactgtggctccggtcttttcacaggtctgttttagggcctcgatggcattgtcgataattaattcttccccgaaagcgttgataaacaactttgtgcgtcccgtgattttgaatttgtaaggacgggtagaggtgaacataatcgtatctccgatcatgtagcgccataatccaccattcgtggaaataacaagagcgtagttcaccccggtttccacttcttccaatagaagaacccgggggtgcggtttagtcagttcgctgatcggaacaaattcatagtaaacgccatagtccagcattaatagcatggacgagtcgccgggatcatcctgtaatccgaagaaaccttccgatgcgttgtaggtttccatgtatttcattttcgggtcgggcaacaggcgtttgtattgttcccggtagggggtgaagtttatgccaccgtgaataaatagttcaaggttgggccatacttcgtgaaggttgctttttcccgtgcgttccagaatccggttgatgagcgtgaggaaccacgagggtacccccgcgagactacgtacatcttctttgattgtggtgtcgcatatcttttcaatcttttcttcccattcgctcatgagcatgatcgattggtcgggggtcttcatcatgttggcccagaacggggtgttggagattaatatggcggacaagtctccgtagcggcaattgttgtttgtcttggatatttcgctacttccccccagagccaaggtcttcccgttgaatacttgtgcatccgggtatagtttattgaaaatagagataacatccttaccgcctcggaaatgacagctttccaaagattctttgctgaccgggataaacttgctttttgccgctgttgtgcctgacgatttggcaaaccacgtgatgggttccggccataacaggttttgctcgccgttcattaatcgctctgaatagggggccagctcttcgtagtgaatgatgggcaggcgctcccggtattgttctgccgtcaaaatagagtcgaaatcatatttcagtccgtactccgtgtcagcggctctgcgaagtaattcaaccaacgtgtctcgttgcacctgaatcgggttttctttgaagaaatcgatttgtgccaaccttttggtcgagaacatggatatgatggaattgattacgggcataggattaagttaaaaattaaaagttaaaaactaaaagttaacctctattgaggggtaacaactatcgtaccatttgttatttttagtgatcgaaatctagttttagttgcgggtcgagcaacgtgaaactttgtcgatgataaggggtaactccatggagcaaaatgccttcccggtgctttttggtcgggtagcctttgttgctgatccagtcgtaaacggggtactcttcatgcaattttttcatgtattcgtcccggtgtgttttggccagaatggaggctgccgcgatagccatgtatttcccgtctccttttacgatgcaatggtgttcgatgttccggtagggtttgaaccggttgccgtcaatcagaatatgttccggggtgacacttagttgtgccagcgcccggtgcatcccttcgatggaggcgttgaggatgttgattttgtcgatttcgttattgtccacgctggccaccgcccatgcgagggcttcccgttcaatgatcgagcgcaattcatcccgtttcttttcagagagttgtttcgagtcgttaagcatttcgttggaaaagtcttcaggaaggattaccgctgccgcgaaaaccggtcctgccagacatcccctcccggcctcgtcacatccggcctcgattttatcttgatagtattttaatgtcaacataaataatgggtttataaagttcataaagttcataaggtctaaagtgacgggtgtctttcggacggtgtttaacggcaacttgggctaccgtggaccaagcgccccgcaagagtccattgactttataaactttatagaccttatggactttatgaaccttaaactttatcactcccgcaaatatatgaaatactttgtaatttttgctatatttgcggggttgtccctgcatactaattttaatttatcagaggtgttcacgaaagaagaggcaaaagagattcgggtgaaattctgggaaggtttcaagcgctattgcaagcggaaacatatttaccggaaatgggtactcacgggggtgaagatacgatccacgcagttaaaattttacgcggaccgggagaaggctctcgtgttattccaaatagaccataaaaatgagttacgtcggttcgaggtgtacgagtgtatgttatcttaccagacgttatttcgggcggagtgcggtgacgagttgaagtgggaggaagaatataccgggatcgaggggcaggagatcagcgcgatttatttcgagttgcggggggtgaacctttaccgggaggaggatcacgagcggatttacgctttctttgccgagaagatgcctttgctggaagacctttattacgaatacagggatttgattaacgaacgattgaaacagaacgataattaaaaacgctggattgcgatgaaaataaacaagagtggggccgctctttcccgtatcgtgcaaatcggggagacgctgaaagaactttcccagaagagcgggaaggagtatttgcccttgaaccggggtgtgaatcaagtggtaaatatcgacttgacagaagtcgtgaaatcaataaactttaattctccggagatacaggtgtacccgcatggagctgggcgtccggacttacgagcggcaattaacgaggagttttttgccggaaagtcttcgccggataatatattaattacggcagggggaatgcatgcccttgatctcgtggcacagaccgtgaatatcggaaagttattcctgccctcgtattattggggatgttatttcaaaatgctcaagattcgttccgtggagagcgaaggatatgacagtcaatcagatttactcccgatgatcgatcgtttgcggggaaatgccgtgttaattagtgatccgagtaacccgctgggagacaaacatgatgacgaggaacagttgaatattattcgggcgttgaatgatgccggggtggtgattttttatgattgtccctatcgtcggttgtttatggatgcttcggatgattactacacgcgtctgatgaatctggataacgtgattatcacggagagctttagcaagtcggtcgggttgagtggccagcgacttgggtttatccacacgtgtaacaaggagttgcatgatgagttggaggtgagggtgatgtataacacgaacgggattaacggttttgcacaggaactcgtgttacgcttgctgacaacgccggaagggaaaaaggccgtgacggcatttaaagagcgtactacccgggatatagctttgaatatcgagtatttacgagccagaggcttgctggcggaagaattttatcatggaaccacgccacgaggcattttcgtgatcgtgaatcgtggtgaggaggagttgctggaacactatatcggtgccgtatcactttctttcttcacgaaaacccggcaggagtacgcgaagaattattcccgtatctgtgtttccgtgcctcacgataagttggtgaaatactttgaaacgatttgatcattgctgccttgtcattccctagggtatggctagggatgggctaggacaaataccaaacaattacatcacaggaacacggcaagtacatggaagattgttcttgctatgttcatgctatgaagatgctatgtttttgccctagtctatcgatagactaggggataatcacgggcgaacaaatggacttgatactccggatggggcttataaactttataaataagttttttataactttgcctaaataagagtaaagagaacgtttgtgaatcaaatattatcccttcctctcctgcctacgttttttgccggaatctcttacgagctgaacgacggtatggaacgtctttccagaccatcttttacctcgtcttcaatctcatgggacatttgcaatttatgatttacgaaatgcattgatcttgtgggagaatctaaaatcgtaaatcataaatctaaaatcaattcgtcacttcaatcatctcttgtcaggctaaattccttgtcggcaaataattctgccagcccggagatttgtttcaggcgtagtaattcgtctttatccattccgatattgcgcatgatccaactgtcggacattccggctttggtcagttcggccacgatttcggtcattaattcgatgctatgcgtacctcttgcccggttgtgccggatggtagaggccatacggttggaaatatctttgttgatgacgactacggggagcaatcctttttcccgttcgaatatccgttgggatgttttcatgactttgtagcggtgaaaaccgtccacgagttcataaatatccttttccgggatgtagtaacaaacgcagggcatcgtgtagccgtcttcccagatggatagttccaatagtttcatttccgggggtgccaccacgttcgggttgtaggtgttggcaaccaccttatcaatcgggacggaaataacgttgtatacgggacttttatattcttccataagattccatgatagatttatatttttgcatcaccttggcccggcgttcccgttcggctttcgagggggcgaaccccatgtatttacaggcatgatcgtttttcaggatacaaatgcagatacgtttgaacgtggggagttctttgaactccggaatacgtacatcatcctgataatccatgcgcacgggctttttatctgtcttgtaatttgtcgtttcgctaaccgtgatcgggattcccattcgtcggagtttggcgatggtctcttctgccagacagccgcctttgtttcgccaaaattccatgctcacggagagtttgtgcaagtagttttccctagcctcgtccggtagggtgcaaaggagaaatttaaagtaatccgaccaagtcatgttctccgggagggtgatggactgccagcccatggcggaagttcccccgtataacccggtaaagttgactccgttgacccggttaatcattttgccccatgtgtccggatctatggcccggtagagtttcaagctggagagcgcctgtgagataaacgggctggctacgcgttgcctttcaagaggaactcctgcctgataatagagatcatacaggtggttgtagtcccattgaaattttccgttggcggtccagatgtccgtggtaagccagtcgtatatggggtaggcgttaaagatatttgctgttactttgtgagtccatttcaagtgcttgtaactgtggtaattcctgtcccggtggatggcttgccagcgatggtagctttcttgcgtgcgaatcccgatgaggcaacaagtacgttgagcgtttttcttccggtgataccattctgcaaatttgacttgaaaatcgtagtcccacatctcttccgagtagaaatcaaaatcttctttgcggtagcatatttcgggcatatccctgacccacagatctcgtaaattatcttcccacgggcgccagaaacgctggtacatggaagtacacgtggagactttgaacgggatgcatactcggtagacttccagtaagtcggcgttatcggcgagcgtgcggtccacgtaccggatcgtctcgttatactgcacctcgtagtccatgtgaaaaacgcccagtttccgtttgagcttgtgctgacggatatagtcgatgcacaggtttagtaaaaccccgctgtctttgccaccggagaaagacacgtacacgttatcaaaatcagaaaaaattcgttccagtcggttttgcacgacatcatacacacttttttttattctcataagctggaggatataccatttttatatacaatttccactcttttgaaactataaaaccgtttgtcttgaaggtttctgcatctcgggtgtgggaaacggcaaaaagaggttgttcccctgcaaattctttttttgcgaagtcaatcaaggcggatagtaacaaggaattgcctcctgatacgtaataattatcaatacaggcgcccgtactctttatgtcaataggcatgaaacctttcaccactcccttctctgtagccacaagccatttgtggtgaacggaggtcttgaacggatagttattattgtaccggagtacgggaatactcattaccaacggtgccacgagttggtataaccgagggtccgtaccatgtaatttttctatgtccattaccgatcgctttttgcaaaactaataaaattaagcaatgattcaaaagaataataaataaaccttttaatataggctttacaaagtaaatgtcgaacgtgtatattatcatctgtttcttatgtgaaatatcgggaaaagtaatttgtgttctctttttcatttgtttgcagctcttgttgtcgattcctgtattgtgattataacctaacggcttgtcttgacgtttataaggtgaatattttaattctaactaaactgaactcgatttatggcagatactacaacaacagtctccggtaaaggggagaagaggaagattatattcctgattatctttatcatcgtggcaatcgtggttgccgttttgtggtggctggattacaggaagtatatccgcacggacgatgcgaatctcgattcgttccgggtgagtgtttcggctccggtggcgggacaagtgacccgtttgtacgcgatggagggggatacagtgaaacagggtgacacattgtttattcttgacgatagcgcttgtatggtgatggctcccgttgatggcgttgtcggaaaacgttgggttctaccgggagatcggattgaggcgggacagactgcgtttaccctgaatcggggaacagatatttgggtagcggtttacttggaggaaacgaagtttaaggagatttatctcgggcagaaggctcaattcactttggatgcttacgataagctaactttcgagggacgggtgtattacatcggggacaacacggcctcggaattcgctcttgtttctccgaataatgcatccggtaatttcacgaaagtaacccaacgcataccgttgaagatctctattgatagggttgaaggtgatgacgggcaaaaggctcgggtgaagttggtttcgggtatgtctgcaacggttaaaatcgagaaggagtgaccatgaatgtcgttaccgcaacaccgatcggaggaagaagttacaagtggctcgtgctgtttaacgtcatgttgaccacgtttatggccgtgcttgattccacggtagtcaacactggtttacccgtgattatgggaacgcttggggcgtccatgaatagtgccgaatggatactgacgggctacatgctttccatggcaaccattcttccggctgccgggtggttgtctgatcgtttcggttacaagcgaatctttattttctcgttaacagtatttaccgtgggttcgttcatgtgcggcaattccacggctatcggggaactggtattctggcgtatatttcagggaatcgggggtggtttgctgatgcccgtggggatggctgtggtaacgactgttttcccggtggagcaacggggtatggcgctcgggttctgggcgatcgcctcggctgcctctgtttcctttggtccgcttatcggtggctatctcgtggataatctgaattggaattatatctttttcgtgaatattcctatcgggatattcagtatcatatacacgatgatcgtgcaacaggagtacaagacgggtatgaggcagaagtttgacataccgggttttatcacgtctgccgtgtttttgcccgttttcctgtatggtctgtccgaggtgacctcaagtacgaacacgaaagggtggtccagcccgttggtgttgggatgtatgtgggtggcagtggttagtttcgtgttattcctgtacacagaattgacggtaaaacatcctatgattaatctcaagatattcaaggaccacaatttctcgctggcgaacctgatcgtgtttatattcgggatcgggatgttcgggagtacttttctgattcccttgtatatgcaggattcgctggggtattcggcctaccagacgggtttgttcttcctgcccgtgggatttctacaagcggtggcatccccgttggccggaaatgcttcccggtgggtaaacccaaaggtcgtgatcgtgttgggattgttcttgttatgtaccagtttttacatgaattattctttctcctttctgaccgataagtggtacatcatgatcagcctctatttgcggggagtcgggttagggattctttacccgcccttactcaacgtctctttgcggcaaatcagtaaccaacagatggctcaagcgtcgagcgtgacgaacatcgtgcggcaaatcgggggaagtttcggggtggccatgttcagccatttgttgagccagcgacagacgtatcacacggaacgttatcacgaggccattgcttacacgggagagacttactcgaacgtggtggatgggttaagccgcttttttagttcgagtggcgggttgggacatacggaatccgtgtcctatgcgaaacaatatatacttgaacacgtggacatggaggcctatattagtgggattaacgatgtgtttttcgtggcattcgttaccacgttgctagccgtgatcccgatgctctttttgaaaaccaaacgaaaataaatctatcggtttatccctcggtttcgtcctcgtagtcttcttccacgctgatacagttgaacgagtagatcgttttgtgaagataccgttcgcccgggttcaaacgggtggaaggaaaacaaggatggtggggactgtccgggagcatttgtgtctctagggcaattcccgaatagggaccgtaatgctttccgcctttcccgttgcccacgtcgatgtatttacccgtgtaaacctgcaagccggggtaatccgacaggatggtaaccgtgatcccgtttttcgggtgggacaattcggccatgagttggggttctatcggatctccgaacgtgtagcaatcatccaacccgtcttcctgcaaggcgaggaaaagcggtttgttgaaatcgaaagcgtgttttttgtctgtcgagaggacggttcccgttgggattaaatcaggagttgtttccagatagtgggaggtataaagccgtagttcgtgattcccgatatgctcgtcggtcggccttagattgaaataggggtgttgcgtgagatttacgtgtgtcggttgatcgcaactagcctcgtaaatcactcggaacacgttgttttcaatggaataacgaaccgtgacgtccaatgtaccggggaaaccgttctccccatccggactagtgtaacgcagaatgagatgttcgttgtccggttgttccgcgtcccaaagacgttgatcgaatccgggcgttcccccgtggagggtattttctttttcattcttgttcaacacgtaagtcttgttgtcaattgtgatctccccgcctttgatgcggttaccatagcgtccgatgagcgccccgaaataagggtaattcttccggtactccgggtcaatatattgttcaagggtatcaaatcctaaaaccacgtctacaagtttccacctgcaatcgcgtacaaatatgttttttataatcccgccgagattacatacgtgaatttcaaggcattcattcttgagaatatattctttcagttccatgatccatgattttaatcgactcataaaaataagcaatagaatgtaattttcattcgtgttgaacatgaaattttaaagaaaatactttaactttgtagacatacgggtggctaaaaagcctattttgaattttaaactctaaatggttaacatggatacaggcgtgttggaacaaagatttgaagagatttacgggacaaaggttgaacatctgtactttgctcccggacgggtaaatctaatcggggaacatattgattataacgggggacgggtgttcccgtgtgcgttgagtttcgggacttatctggccgtggctcgtcgggatgatcggaagattgctttcgccagtatgaaccaaacttttcaagtggaatgtgatcaaagtatttttgagaataaacctgatgaatgggtgaagtatcctttgggggtggtgaaggagttctcggatcgaggacttgccccgtggggttttaacatcctgtatttcgggaatattccgaacggggccgggttatcctcgtcagcctcgatagaggttgtgacggcgtttatgctaaacgatcagttgaatgccgggctggacgtggtggagttggtgaaaatgtcacaacgggcagagaatgttttcgtgggtatgaattgcgggattatggaccagtttgccgtgggtatgggaaagaaaggacacgctattgcgctggattgcagtactttggattatgatttgatcccgctaaaccttaatggatataaattggtaatcaccaattcaaataagaaccatgatttggttacttccgagtataacgtgcggcggagccagtgtgaacaggctttggccgatataaatcaagaactggacgtgaaacatctgtgtgatttgagcgaggaagaattggagagggtacgtcatttgatttccgatgaaaccgtttatcgccgggttcgtcatgccgttacggagaacgagagggtgaatgaagccattgacgtgttgcaaaagggggatttggttcgtttcggggaattgatgaacgcgtcgcatcggtcattgaagaaagattacgaggttaccggtgtcgagatggatacgctggcggaggaagggcagaagttaccgggcgtgctggggtcccggatcacggggggcggtttcggtggttgcaccgtgagtcttgtgaatgaggataacgtgcaggaatttatcgagaagttggcttccgtgtatcacgctaaagtcgggtttaatgccgagttttacgtggcggatattggtgatggcgtgaggaaaatttactaagtataaaccataacaattggaaaaatgttgaacacgagttttgagttctgggattatttcatcttcggggcgtatgccttgatgattatcgccgtgggattatgggtgtcaagaggtaagaaaggtgtgcagaagacaacggaggattatttccttgcgagcaaatcgttaccatggtgggctatcggagcctcgttgattgcggcgaatatctctgccgagcaatttatcgggatgtccggatcggggttcgccgtgggactggccattgcctcgtatgagtttatggcagccttgaccttgatcatcgtgggtaaattctttttacctatatttatcaaacaggggctttacacgatccccgaattcgtggaaaaacgtttctcgacgaacttgaagaccattcttgccgttttctggatcgccttgtttattttcgtgaacttgacttccgtgcttttcttgggggcaaaagctattgatacgattattggtacgggtaacggggagttattcattcccgctatcgtcgggctggcctttgttgctgcggcatattccatttacgggggactatcggcagtggcttggacggatgtgattcaggtggccttgttgatcatcgggggcgttataaccacgcttatcgctttggataacgtgttgcccggtggcggtgtcgtggagggatttaaacacgtcgtggacacggcgggcgataagttccatatgattatctcgaaggataacccggagtttaaaaacctgccgggtattgccgtgcttatcggtggtttatgggtggcaaacctctattattgggggttcaatcaatacatcatccagcggacgttggcggccaagtcattgaaagaggctcaacgaggtattgctttcgcggcgtttctgaaattgatcgtgcctttgatcgtggttattccgggaatcgtggctttcgtgatgtacaccgagtctaaagacccgtccgtgacggctatgttcgagatgacgggaggaaatgataaagcctatccgtggctgatcgggacgtttgttcccacgggtttgaagggtttggtgctggcggcattggctgcggctattgtttcttcgttggcctccatgctgaattcgacttctaccatatttacgatggatatttataaaccttacatcaaccgggaggcctcgcacaaaaaattagtgagtgtgggacggatcacggcagccgtggcgttggtgattgcgggtttgattgcacccatgatggctaatttcgaccagatgttcgtgtatattcaagagtacacggggttagtgagccccggtattctggccgtattcctgatgggtttattctggaagaagacaacaaaccggggggctataatcggagtgctgatctctattcccgtggcgttgttgctgaagttcctgcccatcgaaatgccgttcctcgatcagatgatgtatacgttcttgttgacgatggtaacgatcggtatggttagtttggctacctgcaagacggatgatgatccgaaaggcttggtgttgacttctgaaatgttcaaaaccgataaggtatttaatatttgtgcttacgtgatttgtattttgttagccgtgatttatacggcttgttggtagagcgtggatagagaatgaggtgatgtttcgggggttaaagggggtgatgagcctttacccccgattttttctctttacacggtcggtacacggtcgctcgtgagcgagggagtagcgaaggagtaccgagagtgtaccgaagtcgatccctgtcttctaccttacttcatcctatttcgtttgggatgtgatttactacaagtttatatcacaaattt

SEQ ID NO: 44 - DNA, 15343 bp, Butyricimonas faecihominis
gtgcaagtatatatttatatatatagcttgcaccttgcactaatcgcagaatatttattatcaatgatttgcgtatttcaaaagaaagacttatctttgaacccgaaagttaggcagacaaacagaggtcaaagttggacaagcccaacgtctgaaaatcgttactgtttcgttacctatttgaaattttgaaagcaaagtagctgaaatataagcagttagagttataggttcaaaaccctgtctctccgcgaaagaacaatcaaataatgagagagagttagcacataaaagctaactcttttgtatttcaaggggattcgaatcatcccatccctcggctcacatacaaaattagagattaccagacgttataatgtattctatcctcaacccgaatttctttctgtttacaaatatgtgcattctccgccgcataaccgatagcaagaaaacaagtgaattcgtattcttcggggacgttgacaaggtgtttcacgtattccggttcgttaccgataggaatacggaacgcacacgccaatccctccgcggttgctgccagtagaatgttttccactgctgcccatgccgaggcaaaataattcagagaactttggtctaccggatgacacagaggataatccttttgccggaaaaacggcaaaacaaggcaattgctttgcataagcatacgttgttgtttgggcagcgcatcaacaaacatagcatgttcatccttatccatcacgctcgcggctgcttcaagcccgctttgctgaatgtttttggtgttttcttctaccggcgatacaagtcgggcaatgttttcctgccctctcaccacgatgaactcaaactgtcgcaggtgatcgttcgtcggggccttaaaagctgccgataacactttttccaacacgtcgtccgttacttccttatcggaaaagtcacgaatcgttcttcttttctccaatacttgataaaaatccataacaatatattttaatagttcaacttactgatttcggatacaaagttacgtcaccttattgttgaaaatttgtcatatcatctcgaatatttgtcgtatatttgcattacactattttacatacattatggaagaaatgatcatcccttacgaattacctgaaataaaggaccattcattcttttttatagaccaacggataactcctcacttagaagctaaattgcatcaacacgacgcatgggaactatattatgtcatacacgggtatggcacccgaatggctggtgacacgttacaagctttttcggcaggcgatgtggcattgattccaccatccatgcatcactattggaaatacgatcctgcatcgacagacagcgacgggtgcatccattacctcatggttgcttttaaccactctcttgtagtgagatgcatggaggtatttcctgaattgcgaaaccgcttgataaaccttacattccctgttaatgcattaaaatttggcccggaaagctctcgtgttattcgcaatatgttatcacaaatgaacgacatggatgatttaggacgattgtgtggaatgtttcgtttattacctgtcattttcaattcacccgatcatatttttgcaggtaaacccatgcaaattgaacgtgacgtgaggcgaatgcaacaaatttgtacctacgtgatggctcattatgttcatacgatcactttggatgaaattgccgccgaaataggaatgaaccgttctgcattttgctcttacttcaagcgatgcaaaggaatgacattctcacaatttgttacccaataccgtttgaatacagcttgcgaacttctaaaacactcgcagaaacaggtatcggagatctgttttgcagtagggtttaatgacgtcccacatttcaatagagtttttaaagaatcacaaggaataacacccaaagaatacaggaaacgaaacacctaattaagcctatttcccttgagagatacttagctggaaatttaaaattaacggggtttagtatctctttccccggggttatccatgtccgtcacatgccggcagggcgactattgggcgactgttaggcgccatcgcccgattgtcgcccgatcatcgccgccattttaacagatgggaaacaaaaataacatactcgaataacccgtcaaccaaaccaataacgaggctattcacgttcaagaataatattttggggcattatatccccggtaaacggctgggataagggatacatcacctatttcggtacttccaagcccgccggaaccatctcttcgcaacttcttgacaataaacacatcatctggtgcaagaaattaaaaaacaccgatatattcccagttttatccggtctttttcctaacggaaggggcaaatatgctttattacatcgaactcacgttagaatatgaaaaaaaagtaacttctcccccacttctcggcaggattacctatatttctcttctacaataaattcttacttccttttcttttccgtcttcgccaacttttcatactcttttattctccgctcacacacttgcttggtaacctcttcaaacttttcaaccttcaccatcaagtcttcaacatcttcccggcttactttaaattccggattataacgagcttcgatgtaagaacacacaagtattttaaataatcgttcttcttcttcattcccaacaggaaaaactcgaatcagttcgggagcatatccacgtgaagccttgaaaagctcttccaaattatgctccttatcattcttgagagtgaatgttagcataatcgcattgaacaaattttcacaagcttgatgtaaattaaaagaagacatgacatattcttccttatcatacataaaaacagcttgctccataaaaagtctggctttagcgtatttttctccaaaatattcttccccttgtttctttatttccccaaacttcaacggttttcgcctcgccagtttatttttcccacggttataaagcattatcccatcacgtttcaattcagtataaaaataacgactgtatttcaaatcctcgtttactttcttaatactgtcatggataaactgcacggggacccggtaacgatgatctccccgtttatcatagatattacggacacttgctaacttattttcaattttatcatagctccacgcactgttaatgaccaatatatcataatcacttttgaaagaagtaggtatgccaaattcctcgcgttcgtcataactcacgtaagtaccacgggcgtaacttccatagaggataatcatctcgcacaccgggattttatccagaatcaactcaacgagatatttcaagtcttcccggtttttcttgggcaggaaagcgattgactttttcataaatagctatttattacaagagcaaatgtaacattttttctcctagaaagctccagacaaaaaaaatacccctcgaaatcatacgattaagaggggtatttgtacccagaacaggactcgaacctgcacagccgtacggccactagtccctgaaactagcgtgtctaccgattccaccacctgggcatgatttcaaagaccgagaagaaaaaaccttgcaacttccctgctgcaaggcccctcttcatgtttgttgtcccacaaggattcgaaccttgactgacagaaccaaaatctgctgtgctaccattacacaatgggacaatcttcatgtcgcttcaacaaccgctgttgttattttgacgctgcaaatgtagagcatttttttatttcaccaaaagaaaatgcagaaaaattaaaagaaaattgctattttcgtgctgtcgaaaaatgacatttttgttatagccttgaatattaataagaaatataaattcaaactaaggagaagcatgtgcaacattaaaaatcacccaacattaagctacaggttgatcaataatgtcaccggatgggtggcgttcgtggtggccagtattacttacattcttacggtcgaaccaacagccagcctttgggactgtggtgagtttattacaacttcagtcggactgcaagtaggacaccctcccggagcgcctctattcatgattatctcacgactattcgccatattcgcaccaagtcccgaaacccaatcctacatgatcaacatcatgtcggctctatgttccgggttcacgatcttgttcctgttttggacgatcacgcatttggctaaaaaagtcgtggtaaaagaaggggaagaatgttctatgggacaattgtgcgggatcatgggagccggacttgttggggcattaacctacacgttcacagacacgttttggttttcagctgtcgagggtgaagtttatgccatgtcgtccttgatcacggccgtcgtgttctgggcaattttgaaatgggaaaatgttgcttttcaaccttatgccaatcgttggttaatctttatcgcctacatggtcggactgtccatcggcgttcacttgttgaacttgctggtaatccctgccattgtattcatatattatttcaaaaaatacgaaaccaccaagtggggtattatcaaatcagcggccctttctatcgtcatactgggcgtgatcatgtggggtattatcccgggcgtgattatcgttgcaggctggtttgaattgctgttcgtgaatggctttggaatgccttttaacacgggtgttgtcatctacgcgttactcttaatcgccggactgactttcggaatccggtacacgttaaaacacaaccacacggttgtgaacacgatcttaacctgtttcgtggtcatgcttatcgggtactcctgctacgcgatggtcgttatccgttccgtaagtaatcccccgattgacgaaaatagcccggacaacgtgttcgcactgctttcttatatcagtcgtgatcaatacggccaagaaccattggtttacggcccttacttcaatgccccggttattggcgtagaggatgccggacctatttattaccaaaacgaaaaaacgggtaaatatgatattgtggatcataaaaaagaagtaaaatatgatcctcgtttctgcacgatcctcccgcgtatgtatagccaagctcgtgaaccacaggtatattatgagtgggtgggacaacccaaaggccccgtgtacatggtggacggacaacctgttcagaaaccaagtttcggacaaaacctaagtttcatgttccgttaccaactcggacacatgtatttcaggtacttcatgtggaacttctccgggcgtcagaatgatattcaaggacatggagatttccgttatggtaactggatctcgggtattccttttatagataatattctggtcggtgatcagagcgtgatgccggacacgttgaaacatgacaaggcaaacaataaatattacatgcttccctttatcctcgggttgctgggaatgttctatcaatatcaacggggaaaacaagggaaaaaagatttctgggtggttatgctactcttcttcttcacgggtattgccatcgtgctttacctgaaccaatatccgtatcaaccgcgggaacgtgactatgcctatgccggatcgttctatgcctttgctatctggatcggtttcggggttctctacctgtgggatttacttcagaagaagatggattcccgcaacgcagctattatcgtcaccgctgtttgcctgttcgccgttccggtaaatatggcagcacaaaactgggatgatcatgatcgtgacggacgttatgcaaccattgctcatgccaagaactacctaagcacgtgtgccccgaacgctatcctgttcacttacggggataatgatacgttccctctatggtacgcacaggaagtggaaggtttccgtcgggatgtacgtatcgtgaacctaagtttgcttgccggagactggtacattgatcagatgaaacggaaagcctacgaaagtgacggggtacccatttctttcacgaaagaccaataccatgccggagtacgggattttgtcacgattgaagaacgagtgcaacaacctttcagcatgaaagaagtcatggaatttgttgccagcgacagaccggaaaccaaatccaaccgttaccaaggaggtgccgtggacttcatcccgacacgcagcctgtatatccccgtggataagaaaaaagtactggcaaacggaaccgtacaacccaaagattccgcgttaattgtagacagagtagaaattcaattaaaaggtagctctttgaataaatcacaattaatggtactggatatattagcgaccaacaactgggaacgtccggtatacttcggagtaggtatgggacaagacagttacatgggcttcgataagtatttccaactagaaggagctgcttaccgggttgtacctatcaagtcggaaaacaacgaggcttattatgatttcggacgaatcaacacggaaatcctgtatgataacctgatgaataaattcgtttggggaaacatcaaggacccgaaagtcaatatcgatcatttccatgacaacaccattgccgtgatgaaataccggaacaccttcttgcgtttagcagaacaattaatgcaagaggccgccacggaaacacgggttatcggggacacgattatcaatgaaatcacagattcgagcaaaattcaagaggctgtcagagtgctggataaatctctggaagaaattccgttatatcaagttccggctgacttcttcttgttaaattacatctcgatctactatgctgccggcgagaaagagaaggggaacgatctggcatgggcactggctcttgataacgctcaaatgttgagatatatcggatcactttctcagaatcgcagaaaagcattggaaaatgacgagagaagaagtatgcaggcgttacaaatgctcgtcgacatggccagaagaaacggggaaaatgcctttgcccaagaaattcaggacatggtggaaagcacgttaagcggacggcctgtaaccagcaagcgggtaaacaaaaacttcccgatggttagtcaagataagtgagataacatatacgaatcattcgtcccttcgtatggagggacgaattttatttataaacttaatacacaatgatcacaatagaccatatcaaagaattggcagagcgaggtgaagcattgaggaggtatctttgacatcgatggcaagaagatacaactcgctgaagaagagttaagaacacaaaacccgtccctatgggataatcccaaggaggcagaggccttgatgaagaaagtccgggaattgaaatcttggatcgagggttacgaacaggtgacctcagccgtgggggatttacaggtacttttcgatttcgccaaagagggagaagcaaccgaggaagaagtggacgcccaataccaagagaccatacgagtactggaagacatcgagatgcgtaacatgctgcgccgggaagaagatcacttcggagccatcatgaaaatcaattccggagccggaggtacggaaagtatggactgggccagtatgctgtaccggatgtatatccgctggggagaattaaacggttacaaggtaaaacacgtggattaccaggaaggtgaagaggccggtatcaaatcagctactctcgaattcgagggagactacgcttacgggtatctgaaatcagaaaacggtgttcaccgattggttcgtttatcgccatataatgcggccaataaacgaatgacatcttttgcatccgtgttcgtttatcccgccgtggatgacacgatcgagatcacgatcaaccccgctgacatcagttgggacaccttccgaagtggtggtgcgggtggtcagaacgtgaacaaggtggaaaccggagtccggttacgccacgctcctaccggaatcatgatcgagaacacggaatcacgttcacagttgcaaaaccgtgaaaatgccatgcgtttattgaaagcccaattgtacgaactggaattacaaaagcgtcaggaagaacgggataaagtggaaggaacgaaaaaaaagatcgagtgggggtcacaaatccgcagttatgtattcgacgaccgccgggtgaaagatcatcgtaccaactaccagacatcaaacgtacaggcagttatggacggagagatcaacgagttcattaaagcctacttgatgatgttcggtggcggagaagaataaaagcaatcaatttatgatttatgaattacgatttacgaaaagaaaaagcgttgctttgtggaagggaatctaaaatcataaatctaaaatctaaaatgaatagatggatttaaactttaatagttgcaagatattgatcgtcggggacgtgatgcttgacaaatactatttcggaaaggtggaacgtatttccccggaagctccagttccaatagtaaatatcgtgaccgaggaatcccgtttaggcggggcctcgaacgtggccaacaacatcacaagtcttggtgggcaggccacgttatgcggggctatcggctatgactttttcgggaaagagattgaacgtatggctcaccggaaagggatcaaaaccgattttgtcaaaaccgagcaacccacgatcacgaaagcgcgcatcatcggtggaaggcaacagattgtccgtatagattacgagcaacatttggaactttctgaaaaagcaagagaagatattcaaacccatcttgcctcgctcttccaagagttccctacccttgttatttctgattatggaaaaggcatgatctcggaagaattatgttcgtttttgataaaaacggcaaaatcacatggaacccgtgttatcgtggacccgaaagggcaaaactggaagaaatatgcaggggcagacttgattactcctaatgtaaaagaattaggtgacattattggccacccggtgaaaaataacgaccaagatattgccatggcagccttggaaatcgttcatcactacggtttatcggcattacttgtcacccggagcgaacaagggatgagcttgatttccgatcaaaatattttgcatctccccacacattctcaagaagtatttgatgtaagtggagccggagacacggttgtggcggccctttcactagccttaacccaaggtcaggatatcacggaagccatgcgtattgcgaacgtggcagccggaattgttgttcagaaaatcgggactgcaactctcagcgtagaggaattaaacacaaatctataagaaaaaaggctgtttaaaaaacagcctttttaaatcttagatacaaagtatttcaagaatgccgtattatctgtaagttccggatggaaagatgttaccaacatattcttttcttccgctgcaacgatatgcccatcaagctcacacagaatttttaccccatccttcacgctcgtgatataaggggcacgaataaacaccaactcaatttctttcgaatctaccgccggaatcacttttttcgtggcaaaactgtcgatctggctcccgtaagcattacgccgaacggcaatatccatcacgcccaaatgagtcacagaatcgttcacgagttctttggccagcaagatcattcccgcacaagttccccataccggcagcccactctggattttcccgcgtaaaggctccataagtccggtccgattaagaatctttcccatagtggtactctccccccctggtagaatgatcccatcaatctcttccaactgctccggatatttcacgatcacgggttcatgaccaatagccttaatctggcgttcatgttcaataatcgccccctgaaaacctaaaattccaatcttcttcatgacaaaaaatataaggttcataaagttcataaaatctataaagcaagttaccttatgaaccttacaaaccttacgaactttataaactattcttaccagcctctttcagcgtatttgttttccaatttgctaatttccaatccggacatagcctctcccaaattctctgacaattcagccaatttaaccggatcgttataataagtcgtagctaaaacgatagctctcgctctcttggcaggatcacctgatttgaagattccagaacccacaaatacaccctcgcaacccaactgcatcattaaagctgcatcagctggagttgcaataccaccggctgcaaagtttactaccggcaatttaccattctcatgcacgaattttactaaatcataaggggctcccatctctttggcaatcgtcatcaaagcctcaaccggagccgcttgtacctgatgaatatcattgttcaactgacgcatatgtcttacagcctctaccacgtttccggttccagcttctcccttcgtacgaatcatagaagctccttcaccaatacgtcttaaagcctcacccaagttacggcatccgcaaacgaacggtactttaaacgcagtcttgtcaacatgatacaaatcatctgctggcgttaaaacttcactttcgtcaatataatcaatgccaatagcctccaaaatttgtgcttccacgaagtgaccgattctcacttttgccattacaggaatagacacggcattctttatagccttgatcatctgaggatcagacattctagccacgccaccatctttacgaatatctgacggcactctttccaatgccattacagcacatgctccggcagcttcagcgatctttgcctgttcaacattggttacatccatgataaccccaccttttagcatttgtgccagatttttgtttaattcatagtttcccataaggttctcgtttattaatgtgttcataataataattcccctctccttctaacgctcctaggagttaaatacttatgactgaaaagacccgtttatcaaacgtttccgatcactcaaaacaccccctctaaaacggggaacaaatatagcaatttagttgaaaaaactaactttataaacatattttagttgcagactgtaagtacatagaatacagacactaacaatctaaaagaatactacccatctcacaattccctctaacacaaaaaatttcacatgaaatgcatcatcagaagaaaagatagaaagtctaaatttatcaaacaacccctatccctccataaattaaatatgaaatttgtggagtaaagtactttctacaaaaaggaaaatttaccgacctcttataaatacgtcttcaaccgtttactacggcacgagtttttcagtctcttgatagccttggatttaatttggcgtactcgttcgcttgtcagacctacccgatcgccaatctcttccaacgacatagctgtataaccacccaaaccgtaatacatccgcaagattaaagcatcgcgttcatccagaatcgtcaaataacgatcgatttccgtccgcaatgaatcggcattcatctcccgttcggcatctgatatggcattatccccggtaatcatcacgtcatacaagttagaggaatcctcgtctgccgacaagggcgcatccatggataacggacgattggcgatccgcaagctatctttaacctccttcgcgggaacatccattttcaaggcaatttcctctgccgtgggttcccgttggaactcttgttccagtcggaaaaagaatttattcactttgttgatactgctgattttgttcaatggtaatcgaactaaccgcgagttctcggcgattgcctgtaaaatcgattgccggatccaccatacggcataagaaataaacttgaatcctttcgtttcgtcaaagcattcggcagcttttattaatcccagattaccctcgttgatcaaatcccccaaactcaaaccgttattctggtattgcttggccacggaaaccacgaaacgcaggttactcttcaccaacaactcccgtgccgctcggtcacccgatcggattttcttggctaaagcaacctcctcatccggcgtcaacacgtcgattttcccaatctcctgcaagtacttctctatcgagaacgaatccctgccagtgatttgtttgctaatttttaactgtctcataggtctcttcgtataattggcttaaagttaatcatctatttcagtaaaacaaatattagagttctttttttcgtatctgcttaaagaaatatacgaggatatattaactttgttgtctgaaaaccccatttaattaaaacatacgccattaatttagaaaccatttgaataattaggataaaacaccatttgaatcgagataattttgcaaaaatctttggcacaataaaaaaaatacctacttttgcagtccgaagtgagaaaataataacataagaaatattgcaatgaaacgtacatttcaaccatccaacagaaagagaagaaacaaacatggtttcagagaaagaatgtctaccgctaacggtagagcagttctagctagaagaagagctaaaggaagaaaaaaattgactgtttctgacgagcgcagacacaagcattaatataaaaaaagctgcttttacaagcagctttttttatttgttccttttcccccgcaaccacaattacaactgcatcctttccccttctttgcattccggaacaaacgataagcacctcttcccgcaaaaacaagtgctatcgccacaattatatacgtcaatattagttgcatttccattctctaattttagattaataattcatgatagggaacacgttctaaataatcaagtccaatacctgttttatcacgaaacatacgccccaagccagtaccgtcgtgtatcccatcacgaaaaacgcccatttcattccaatctctttaccgatggcaatcaaggccgcgaaacaaggggaataaagtaacacgaaaatcacaaatataatggcagtaaccggagtaaacccgtgttcccgcaaacgcatttccaacgtcgcgtttgacgacccgtcatcttcctccataacctcttccccttggtacagaacggccatcgtgctaaccacgacttcttttgccgcaaccccggtcaacaagctcacacctgctttccaatcaaagccaagtggtgtccaaataggctccatcgttcgccctaatcgactgatataagaattttcctgacgttcactcacctcttgtcgatgcaagctctccaatttcgcttcttgttcttccttcagcatatctacattcccgatcccagaagcaatcgttgcctcgtaagccctcgtcacctcggccttcttttcatcatactgcgcttccaactctttatccacgggaaaatagcccaaagcccaaatcagtatggaggcaaacatgataatacctcccatttttttcaggtattgctcgcctttactccacatatgccgtacggtcgttctcaaggttggcattcgatacgggggcaactccatcacgaacggcacttcctgtttatggaaaagtacccgtttaaacaacttagccatcacgatagcagcaagaattccaaacaagtatattccaaaaagaactaacgccgcgtaatctttaaaaaatgccccgaccaacaggatatataccggaagacgagcactgcaagacatgaaaggattgatcagtatggttaatatccggtcactccggttctccagcatacgcgttgacatgatcgccggcacattacacccgaatcccatgatcatcggaataaaacttttcccgtgcaagccgagcttatgcatcaatttatccatgataaaagccgcacgagccatatatcccgtgtcttccatgaaagaaataaacaggaataatatcaatatattcggtaaaaacacgatcacgctccccacaccaccgatgataccatccactaataaatcctttaaaggtcccgcactcatctggttatcgacaaattcacctaaagcaccgaccccggtctcaatccattccatcggataacttcccaagctaaacgtggcaaagaatgtcacgaacaagaataacaagaagatcgggaatccgaacaatttatgcgtgacaatagcatcaatatactccgttttacgtcttcgattcacgggactttccttgtatgtttcttttaacgccccggaaataaaaccgtacttcgtatcggtaataaccgactcgactttctctccataggttgtttcaatccgttcaactccctcttttacgaccttcaataatttctcccgtgaatgatcccgttgcacgaattccaacacgtccttatccccttccaataacatcagagacaagaaacggggagacatattacagatcaaatctttttcatctttcaactcggctcgaatagccacgatgctgtcctcaatctctttcccgtagtttatatggatatggcgtaccgtttcacttcttccctcgtacacctcgataacttcccgtaacaactccttaattcctttcccctttgacccgatcgtgggcatcatcggcatcccgatcatctgtcccatctcctgataattgaaagttgccccggaacgttccagctcatcatacatgttcaaagcgatcacacccttcacatccatatcaatcaactgcgtggacaaatagagattacgttccaaattagacgcatctaccacgttaatcaccacatcgggtgcgttattcataatatattcccgcacatacttttcttcattcgagtaagcagaaatagaatacgttcccggtaaatcgaccacgttaaactcgtaaccttcaaatcgaaacgtagcactcttcgcatccaccgttacacctccgtaatttcccacgtgttcctgagaaccactcatgtagttgaacagtgttgttttccccgcattggggttaccgacaaaagcaacatgtatatgtttatctcgaccttcccaatgcttggcgaaagcttcttccgcatcacgggcgctaccggacaccccgacaatattagtagcctcctcaagagatacgatttcaataaacgctgcttcttgtctccttaaagagatttcataacccataattgcatattcaatcggatcattcaaaggagcattcttcacggccttcaccacttttcccctcacgaatcccatctcgtttaatcgtttccgaaaggccccatatcctttcaccttggtaataacggcactttctccggttttcagttctgacagtaacatataaacatcttgtaattagtatcgcgaatgtaaaaac

SEQ ID NO: 45 - DNA, 15321 bp, Butyricimonas faecihominis
attttatacctttgtgcgaaggtataaaggaatttgttaatatgcgttttaaaagaatatttcaaatcggtgtatgggcattttgtttgctggtggctttttctgttcatgggagtgttcgggataaaggatatattttagtcattaattcttacacggagggggcgatatggtcgaactatgtgattgatagtatccggaaggatcgatcaatcggggagaatgtcgcggtggaatccatgaatacactcttgattgatgacgaagagagtatgcgtgtcaagaaagatgatgtcttgtcgaagtacacggaactgcctaaagcgattgtcttacttggaagtagtgcttggtgtctgttcgagcaagagttgaacgggatctggaaagatgtacctatgattctttgcgtggagaatgattacgttgcccccgtggaggcatttctaaaaaagcatgaagttattcaggaagaaaagattcctttattaaaagttctgggagaggctaacgtctcgattatcaagtgtccggtttacatccgggaaacgatagaagaaatgcgtttgttgttgcccgatctggagaagatcgtgttaatgtctgaccatcgttacgtgagtgcccaagtgagatgccagatgcgtaaagtgtgtgagcagtatttccctgatcttgaggtggcctattttacggagggggaatactctttggatcaggtactcgattctatcgaatcgtttgatattcaaaaggtaggattgctttattattcttggttccagcggaagaatttggcgggtaataaatatttaacctcgaataatcacaagacgatctgttcttttgacaatcatccgatttttactttagaggatgtcgggatggctgacggggagatggccgggggatatttttatcgaggaaaagattttgcccatactgttatgcgtactttgcgggatgtgttgaacgggaaggaccctaaaacaatccccgtgcagatcgccgggaaaccggaatgttatttgtcctacccgatccttcaaaaagcgggaattccggagtcattatatcccgatgatgcgaattatttgtttgctccggaaagtttctgggagaaaacccgttatatgtggatcgtgattgttgttttgttgttcattacttatatcatgtgggctcgggtacgacttttaaaaaaggaaaaaatgatgcgggggagggagatgatattacttcagaagtacaagactctttttaataatatgcctcttgcctacatgaaacatcgattgctttacaatgcgaaaggggatatcgtggattaccggattgaagaagtgaacccgatgttcgaagaatattttgtagaagcgtcccgtgtcgtcgggaagaaagggagcgagttgaaagatgataataaaagcggagaatttgccgtgttatataaaaagatgcttgaggaacagaaatctttcacgatcgaatatttttataaacggacggggaaattctttgaggtaatcaatatcgcttccatggaaaaagatatggtggatattttttgtgtggacgtgacagatttacggaaaacaaaatccatgttagagtctgtgaattataaattgtctatggctcttgatgtttctaatattgtgccttggcgttgggatttggaaagacataccgtcttgtgtgatgtgaatcgtccgatagaactgaaacattgtgttgatgacgggaattctttggcggttcctgaagagcaatatttttcaaagatacacaaagatgaccgggagcgagtaaaggcggcttattcggctttaatatccggtaacgtgtccaagatcagggaggaataccgggtgttggataagagcgaacatcattattcttacgaatgggtggaggctcaggctaccgtggatcaacgggataaaaacgggcatcccttgtcattagtgggttcttcggtggttatcacgacccggaagcaaatggaactggcgttgcgtgaggcgaaagagcatgcagaagaatctaaccggttgaaatcggcctttcttgccaatatgagccatgaaattcgtacgccgttgaatgctatcgtcggattctccaatatcttggcatcagcggaagcggaggaggagaaacgagagtatattaatattatcgagaacaataacacgttacttttgcaattaattagtgatattcttgatctttccaagattgagtccggttcgatggagtttgcttattcggaatttgacttaaatgccttgatgcgaggattggaacaaacctcttgtttacgactgacttctgccgcggtggaaattaaatttgatgagtatcttccggattgttgcattcgttcggagaaaaatcgattaacacaagtgattaccaatctgatcaataacgcgataaaattcacgaaagagggaacgattcgtttcggttatcatcttttggagaaagattctctttatttttatgtgtccgacacgggatgcggtattgatgcggataaaaaagatgccgtgtttgaacgattcgtgaagttggacaattttgtacagggaacggggcttggcttgtcaatctgcaaaactatcgtggaacggatgggaggtaaaatcggggtggaatcggaagtcgggcaaggaacaactttttggtttacgattccttacgtggctgtaaaattgcattatcaggaaataaaggaagagaaaatcgttcagcacacagtcgaaaaaaataaactcaaaatactggttgccgaagataatccgagtaattacatgcttttcgaatccatcttgaaaaaggattatcaattgatacacgcgtggaatggccgggaggccgttgaattgtttaaagaacacgatccgcatttggttttaatggatataaatatgccggagttgaatggttttcaagccgtgcaggaaattcgcaagatttccgggacggttcccgtgattgcggttacagcctatgcttatgcctctgatgaagagaaaatcatggccagcgggtttgacggctacacggccaaaccgattaatgcaaatttattaaggagtaaaattatcgctttgttggagaaacatcttattttgctctagtgatgtttctaaaggcctgtatcgaggtatttttattgtgtgtctcctgtgtttcatatgcccagacgggggtgcgggaacgagtcgtgttctataatacggaaaatctgtttgatacccgaaacgacacgctgacggcagatgacgattttactccccggggaaaacaacattggaaccgggaacgttatacccggaagttactcaatatctcgaaagtgttaagcagtcttggtgcgggaaactttccgctactcatcggcttgagcgaggtggagaatcggggtgttgtttccgacttggtaaacaaaacggtgttggcggatggtaattatgggattgtacatgccgactccccggatgcaaggggaattgatgttgccttactctaccggaaagattcattccggctattgcataacgctttctttcctgtccgtttaaaaagcggggagactacccgggatatactttattgtgagggtatatcggccccaaacgatactcttcatgtttttgtttgtcatttcccttccatgcggggtggggaggcgaaaagtgaatggaaacgggtaaaagcggcatctgtcgtgaggcagaaggtggattctatacaggatcttcatccccgggccatgattttaattttgggagatttaaacgggcgtgcgaatacacccgcgcaaaagatgttgaaaactcaagatccggaatccgggacaattaaatctgaaaacttttacaacaccgggtattacttgctgggaaaaaactatggtagttatcgttacaagggagagtggcagacgctggatcacatcattgtttcagggaacttgttgaatgggaaagctgatttgcaggtatcccgaagaatgggtatctatgatgcggattttctacttgaagaagagcgagggactttcggcgttcgtccgaaaccgacctatcgggggcctcactacattggaggatacagcgatcatcttccggtctttatcgatttaaagaaataattgctgtttttaaaaataaaagattacttttgtggcaaaattcatagaacaagatatggacgactatcatcaacagtattaatctgaataggggttctcgataaatgcctctattcataaattgaaggaggattattatgagaactttcctaatgggtaaagtagggttcgtggaaaaaaaagtatgggaacccaattgctggattaatgttgtttcacccactcaggacgatcttcgctacctgatcgacgaaatgggaattccggaggcttttattgatgacgttgaagacgtggacgagcgttcccgtttggaagtagaggatggatggacgctgatgatcctgcgtattccttttaagtcggtagatacaagtattcctttcatcacggtgcctttggggattatcgtgaaggaggatatgtttgtaaccgtgtgctattacgagacagaaatgattcccgatttcatcaattacgtgattcgtaaaaacttggagattgccaataactgggatcttgttttccgtttgtttctttctgcctccgtgtggtatttgaaatacttgaaacaaatcaacgcccagatgcatatggcagaggtcgaattggaacgttccatccggaatgaagaattacaacggttgctaaaaatcgagaaatcgttggtattctttattacttctttgcgtgggaatgataacttgttgatcaaaatgaagactttgaaagtgcagcggcaatttttcgacgaggatttggtggaggacgtggagatcgaattgcggcaggctcaggattcggcccgtatttatagcgatattttaagcggtacaatggatgcctatgcttcggtgatttccaataacttgaatatcgtgatgaaacggatgacgtccatctcgattatattaatgttaccgaccttgattgccagtttgtacgggatgaatgtcccgaactctttggaggaaaatccatacggatttttgatcgtgattgttatctcgatactcttttccgtcttcggtttcatcgtgtttaaatggcgccattggttttaaataaaatatctaaaacatctcgttattttaacaaactattaacggtttgttgataaacttttggggatatttgatgtcataacaacagtgttgtgaatacttgtctaggctcggctgaaacaggcatttttggtatgtaatgattaaaaatatgaacaaaggtttaaagagagttttacaaattggaattccggtcgtgatcgtgggagcgatcgtgatccctcgtttggatttttcttcggataaagagacgtcaaccccgacaacagctgtcaaggcggctagccggggagctttaccggtatcggggatcgtggcatctatgtcaacttccggtaatggaattcccgtaacgggattattggttgcaaatgaagaagtcgaactggtttcggaaacagccggtaaagttgtgaagatcgcttttgaagaaggaacgttggtgaagaaaggaaccttgttggtgaaagtggatgattcggatttgcaggctcaactcgctcgtgccgaattccaaaaagaattattggctgccaaattggaaagacagcggatactattaaaacgggaatccatcagcgtggaagaatttcaacagttggagaccgagtacaatatgaatctggctgatattgaattattaaaggttaaaattgctcgaactgaaatccgggctccctttgacggtcgaatgggattccgtttcgtgagtgaggggagttacttgcaaccgagtaccaaggtgtccacgattgttgataactcttatctgaaaattgaattttctattcctgaaaaatatattgatctgcctttagtgggtagaaaacttactttccagcctagtggtatggaacatcagatcgaggcggaagtgtatgctgttgatccacaggcagacgtggcaactcataccataaatctgcgggctcgttaccggaatactaaaaatcttgtagccggaatgttcgtgaaaggggaattgatgacggctgagaatttgaaatatatacttgttccgacagaggccgtcgtgccggagatggacgggaaacgtttgtgggtagtgaaaaataaaaaggctaccagcgtacccgtgcaaacagacagtcgggattcccaattcgtggaagtaacttccggaatacaggtgggtgacaccgtgttaacgggaggcttgatgcaattgcgtgagggaatgattgtgaatgtcaagttgaataaaaattaatcagtggtatgagtttatcttcaacctgtataaagcgtccggtgctggcaaccgtgttaaacttgattttggttattgtcggttccatcgggttgctatatttaggcgtgcgtgactaccctagcgtggaccccccggtaatatccgtgtcgacctcgttcgtgggggctaacgccgatgttattgaaacacaaattaccgagcctctggaatcggctattaacggtatccaaggaatccgttcattaagtagtacgagccgtgacgggcaaagccggatcacgatagaattcgaattaagcgtggatttggaaacggcagctaatgacgtccgggacaaagtttccggaacgttacgtcgtttaccgcaggatatagatcccccgaccgtgtacaaggcggatgcggatgcccaacctatttttgctgtttctttgcgtagtggtcaacgttcgttgatcgacctgagcgggtatgccgaacgttattacaaagaacggttacagaccatccccggagtgagtagcgtggatatttggggagaaaaacgttattccgtgcgtttgcgcatggacccggctttacttgcagcacatcggttgaccccgatggacgtgcagtctgccgttgaaaaagagaacatcgaattaccttccggacgagtggaaggagacaataccgagttgacaatccgtacgttgggacgattaatgtctatcgaggatttcaacaacttggtcatttcgagagaaggatcaaaaattgttcgttttaaagatattggagtggcggaagtggatgccgagaatacccggagtattgccaaacgtaacggccttcccatggtgatgtgtgctttgattccccagccgggagcaaactacattgatattgcggaccgggcctatctcgtgatgcaggatttggaaaaggacctgccggaagatattgatgccacgattgccttcgacaacacggtatttatccggagttcaatcaacgaggtggaggacacgattttcgaggctttccttttggttgttttgatcattttccttttcttgcggagttggcggacgacgttaattcccgttctggcaatccccgtgtcattgattgcctccttctttattatgtacgtggccgggttcaccatcaacatcttgaccttgctggcagtcgtgctggccatcggtttggtggttgacgatgctatcgtggtcatggagaatatattcacgaaaatagagcaaggaatgtccccgttgcaggcgggattcaagggatcaaacgagatattttttgccgttatcgcgacaacagtggtgttggtagccgtgttcttcccaatcgttttcttggaaggaaccacggggcgtttgttccgtgaatttagcgtggtgattgccggagccgtggtagtttcctctttcgtggcgttgacatttacaccgatgatttccacgaaactattgacccggaatgccacgcaaaactggttttaccggaaaacagaacctttcttcgaggggatgaaccgggtgtaccgtcgttggttacaacgatttttgaaagttcgttattggtcaatcattatactcggggcttccggtgtagccatttatttcttatggttattgattccttcggagatggctcctttggaggaccgttcgaatatccggttaaactcggttgccccggaaggagccacttacgagtacatggctcgttatgcagatgaaatttctaacttcgtggaacaaaccgtgccggaacaggaaaaagtgattgagttcatcggggggggacaaacgaaccgggcaagtttacaattatggttggttgatgccgacaagcggaagcgtacccaacaggaaattgccgacgagttagcaatacaagtgcgtgaatttaccggaggccgtaccttggtttcccaacaacagacctttggcggtcggcggggaggacttccggttgaatatgttattcaagcgaaaaatctggatgacttgaaggctatattacctgttttcatggatgaggtaaacaaaagttccgtgttctcggcgtctgatttgaacctgaaattcacgaaaccggagttgactattaatatcgaccgggacaaggctgccagtatgggcgtttccgtgcaggacattgccaaaacactccagttgaccatgagtgaacaacgggtgggctattacatcatgaatggaaaacagtaccagatactttcccagttggaacgtcaggatcggaataaaccgagcgacttgaaaggaatatacgtgcggaataataatggagacctgattcatttggataacctgattacaacgtccgaaagttccatgccgccacagctataccgttatgaccgtttcgtgtcggcaactgtttctgccggactggcaaagggcgtgaccctttctcaaggtctggaagagatggatcgtattgcaggagaggtcttgagcgatgactttaaaaccacgttatcgggaacatccaaggacttcgtggaaagttcttccagtttgatgttcgccttcatgttggcgttggtatttatctatttggtacttgccgcgcagttcgaaagtttccgtgatccgttaatcatcatgtttaccgttcctttggcattgatcggagctatggttgctttgtggtatttcgggcagaccatgaacattttcagccagattggaattatcatgttggttggattggtttcgaagaacggtatcttaatcgtggaatttgccaaccagcgtaagttggccggtttatccatgcgtgaagcgatcgaggattcagccgtgtctcgtttacgtccgatcctgatgacgagtttgtccaccgtgttaggtattcttccgatggcaatggccacgggtgcgggagcggagagccgtgttgccatgggtattgcggtagtgggaggtatggtatgctccacgctgttgacactcttcgtgatcccggctatttacacctacctctcgtcgaaagaagtaaaaataatagaagagatagaagattgaacaaattgaaaattttgcgagtagaataaagaatgactatgaaaaaacagaatttacgatatatgaaatggatagggaaaatgatcgttttattgttcattttcaattttcaattctcaattttcgattgttccgcgcagcgtgtgagtctggatgaatgtctggaaaaagccttggaatcaaatttttccattaaaatcatccggaacgaggctcggatggataagaataatttgaattactcgactttcctaccgacgttggaaggaaccgcgaaacagacacagacccgcaatgacacgaagaccgagaatagcgcgggtgaagtgaataaaatgtcggatgtaaaaacggataactacaccgcgggagttgctctaaactggcggatatttgacggattagagatgttcaccacccatgaaaaacagaaagagctgctggcaatgggtgagcttgccgtgcagcaagccgtggagaacttgatcttgaacgtgagtgcagcctattataacgtgctggtacaacaccataaattgatggcggcccgtcattcactggaactctcgaatgaacgttacgacgaggccagagtacgttacaagatcgggaatagatccgggctagaagctcaacaggcaaaaatagatttgaacacggacagctcgacttacgttcggcaaaaggaggctttaaaaagtgcctatatcacgttgaacaaattgatgaatacggatttgcaaatggtgaattacgtgcaagacacgatcttgctggggccgcaactggtattgggtaccttggaacaaaaaactctggcaggaaacaccaccttgttgatcgctaaaaaagatcagaaaatttccgcgttggatttaaaaaatgcccgtgccgtgttgttcccgacgctggatttcaactccgggtacaactataacaagacagatacaccttcttccagtaccacgttgaaccggtcaaacggtttttactggggattttcgttaaatgtccctatatttagtcgtttacaaaaccggacgaagatcaagaatgccaaactggaattggaaaataccgaactttcctatcaggaggcggaaaaagaaacgctgggagatttggcgttgatgtataattcctatgaaaacaacctgctgatggtaaatttcgagattgaaagcgctagtgtggccgaggctaacttggatgcggctttagaaaaatacaagatcgggtcgctttccggaatcgaattcagggaatttcaacgtagttacattgatgccgttgatcggaagttatccgctatctatcaggcaaaagtttccgaattatcgttactgcttcttagcggggatattcgaggctcgttcgtgtcggagtaatctgttatcagttcttaaccacacggtaatatttttgtcatatcctacttgtacttttggcttgtaatcttaaagcgagtaaatgatgaaaataatcgtgtggttcagtgttttaatgatggtatttttcgggtattcctgtacttccggcaagggagatggaatacgttacatatttttcttgattggagacgggatggggaacgggcaagtgaccggaactcagttttaccgggcagaactggatggacggatcggtttggattcgttatcttttaccggatttccagtagtaaacatgatgtccacgtactcggcatttaatgcgattacttgttctgctgcggcgggaacagctttagctaccggaacccgcacttcaaacggaactatcggtaaggatgctattcactcgaaagacgtgtatagtattgccgtaaaagcgaaggaaaaaggtttgagcgtgggtattacaactagcgtgagtatcgatcatgcgacgcccgccgtattttatgctcatcagtctagccggagcatgtactacgagatcgctatggatgccgttaaggcgggatttgacctttatgcgggaagtggttttttacagactcgttcaatgacggattcaacagccccggacgtgtatcgtagtttcgaggatgcgggatacacgattgccaggggatatgacgattttaatcgtaaacgggaaaaagcaactaaaatggttttcgtgcaggaaacaggggcgagtccattcagtttgccttatgcgatcgaccggaaaccggggaatttaacgttgtctgaaataacccggggagcaatagattatctttttcaaaaatcaaataaaggtttttttctgatggtagaaggtggtaaaatagactgggcctgccataacaacgatggggcgacaatggtgaatgaggtgatggatttctcggatgcagtggaagttgtcttggaattttaccaccaacatccggacgaaacgctggttatcgtgactgccgatcatgagaccggaggtgtggggcttggcacgcgaggatatgatttgaatctgaaacttttatcttaccagcaaaattctttggatgtgctgtccgagcgcttggtttccttgcgggaaaaacggggaggtaaagtccgatgggaagaagtgaaaactgtattgtctgaagaactgggtttttggaatgaaatagagatcacgaaagaggaagaagacgtcctgaaatcagagtttgaatgttcttatctacaagcaggggctgctctaaggggattgtatgctgttgtggaacctttggccaaacaggcagtccaactgttaaacaacaaagccgggataggatggacaacccctgagcatacgggaacacgggtgcctgtatacgctatcggagccggggcatggcgttttgatggaagtccgttaaacaacacggatattccccggataatagcggaatctgccggttgggattgagctgtgtgtttgaatttatttaaaagaatatcatggttgaggtacgatctttagaaatataagtcgcggtaaaccaccatatttgagcgcctctttcacgactttataattctgtttttccatgttgccctttgaatatttattgtccgggtgaaccgtacacatgaaataccgaaatccttgggagcataaatcctgttccgctaatgcagtcagtttctgttgcaagccttggccccggtagagaggatgtacgacaattgtgtccatgtgggcaacgagtgaaagttccgggtcggacaacccgatgtcgtatcccaaattctcgttcccacgtcccgggtacgtcgcgatgaaaatgcctgctacttgtcgggttatcgggtctgttgcttgccagacatctcctttgcgtgtattgaataaatccgtgatatatttctctgcatcatactgggcaaaccattccttctgctccatggcctcccaaacctcccgcatcatccgaccgagagtgggaatatccttttttgtggctttcctgaatacaaatttcatggttttattcgtgactgttattcgtaacgtgtcgatataccgtttttgaaatatctgcgataattcgggctgttgcggcctcgctttcttctgaatcctttataaagacagcgatcgtgtagctttggccatcgggtaagtacacgaacccgacatcgttcatcccgataatttgtcctttgtcattccggtcaccggtcccggttttatgaccgatgattgctttgtttccttgcagagggcgggctaaccgatcttttcccgtttcgcaggacatcatggtcgttttgataaatccttggtattcgtcatcgaatagccgcacgttcaacagtaattcaattattcttgccgtttcaagtggggtactccaattctggtagcatttgtttttatcttggtgcatctcgtcttcggtggccttgatcgcaaaatgtctcatgcccaaattggagcggatgtagtgatccgtagcctccgtgcctccggtttgctggaaaagaatatcacaggcattattatcgcttaaatgcagggtatactctagtaatttttttatcgggagagaaatttctccgtttggatacaggtcccggagtggactgtacgtgtccgttttcagatcagccttacgaatataaataggtgtatcgaaagacaaacccttcttctcgcaataatcggcaactgctaaagcctgatgcaacttgaacacgctcatcatcgggtaacgctcgtcattattaatcgtgatcgtgtctttaccgttaatgatcacggcaataccaatttgtgcttttttatttgcgatgacttttcgtaattgttcctccaagccctgttgttcagccttgattacaaccggtaacacgagcaaagagagaataaaaaatagtttctggggtgttatattagcgtgtatcatgcgagcctgtttttgatttatgatgttgtttttttaccttgtccggggaaagtccttatccacctgtcagcaaatttataaaattaatctgaatcccttgaaactggttaaagtcttttcccatgttgctgcgtgaacagtttattttataattgtcccagttgtttgtcgtcttcaataaaaagtttacttttgtatggatagaggtcgtgttagttatatgcgtatcatgataggaaatgacttaaatagtgattcttttgaaagtttattcaaatcccatttcggggatttggtgggattcgtatgtagctacgtgaatgacgaagaggtggctaaggacatcgtgcatgatgtgttcctcgtggtgttgaagaatcaaaaaaaattggatacttcttattctttgaagtcctacctgttcaccttatccaagaattatgctttgaattacttgaaacatttgcgtgttgtggctatgaacgagcgggaagttgtcgaggcgttgcagaatgctgatgaggaactggatgattatgaacaacgtatggcccgcttgaacgaaaagctcgacgaattgcctgaaaaacaacgggaagtgctgatgaaatgttttgttgaaggtcaaacatacaaggacgtggctgacgggatgggaattagtgtgaattcggtaaagactcatatttcacgagggttgaaattcctgagaaacgagttgaaggaggaaatggtgatgttattcctgctgaaacgggaacgagtataagtgtttgaaaattgggatgttaatttaaaatagtgaaaaaaatgatgaagttaattgtatgtatcgttctgacgttgaccttgtcaaacgtctttggacaagagtccaataatggaaaaaaattgtgggcagattcttttctaaataagaaagccccggaatttgtggtggaagagtggatttctcaacaaccgaaattgaagggaaaattcattttgattgacttttgggcaacatggtgtggcccgtgccggaaggcgatacccgaattaaacgagtttgctaaaaagttcgggaaaaagttggttgttatcggaatctctgatgaaactgcggctaaagtaaaagagatgaaagagccgaatatcgaatattacagtgcggtagataccaaaggtgtgatgaaaaaagcacttggggtaaaggggattcctcacgtgattttgattgatccgaaaggcattgttcgttgggaaggttttcccttattacaaggacatgagttaacggctgaggttatcgagaaaataatgaagaaatataagtagaggtatttttttgtttttacaggataatttgaagacaggacttttttggagtcctgtttttttgtcgggtatttttaagtgggaatttataacgttatcaaaaggtattaagt

SEQ ID NO: 46 - DNA, 15156 bp, Butyricimonas faecihominis
gttattaccctttaattaaataagttttaatatgcaattagtaaagaaaacaatgatgatggcaggggctttgctccttgctttaaatgtgtgtggacaagagaatgttcccgcggagaagaaggttgaaaagaaggtaacgagtgagaatcatgatgtcggcaaggtgaattttaaagtgagtgccgacgtggtgagttcttacgtatggcgtggagcttacaatgccggagccagtatccaaccaactctgggaatgagtgcgggtaacttctcgcttacggtttggggatcgaaagagatcagcgatttacacaaggaaattgatattacggctgcctaccgtttcggacgtgtatccgtgtctgttgccgactactggtgggaaggtgacaagttctgggaaaaagaggataattcttctgccaagtattttaatttggacaatcatgacacgaaacatcgtctggaggccgggatttcgtgggcaatttccgagaggtttcccttgtccgtggcttggaacacgatgttttggggagctgataaggatgcccgggacgggaaacagaattattcttcttacgtggaattgaattacccgttcacggttcggcagatcaacctgacggcaacactgggttttactccttacgagagtcggaatatgtatggaaccggaggttttgatgtgtgtaatatcgcgttatccgctgcgaaagagattcggacttcaaagaggttttccttgcctgtttttagccgggtggtattgaaccctgccgcgcaggatgcacatgttgttttcgggttcactttacaataatcctgtacgtttaaggggaaaaatcctgtttttaatcgtttaaattaacatcttttgttagttgtaactttatgatagatagtgtgttacaagcttttctccgagaaaagccctgtttctacaacttggggtacttttttacggttctggataggttcttgtaaccttctggataccttaagtatagattcgggaaagcaagtaaaaatcagtgctaagttactcgacagttaccgcttatctccggtaactttccggtaacttaccggtgacttaccggtaacttaccgaacaaggagttaaggattctaaaatctacagttactaaatctaagatcagtgggaaaaattgggggggatgttttattgccatcccccacctaatgccttgtaaagattaacgacggaaagcagttcgtcccgcacggcattgttcaggccgatctgggcatcgaagtaacctctttgggcatcaagcacgtctaggtaactgatcaccccgttaatatattgcaagttggctagttccatgtacgagcgggcggcctcttccaaccgggctcttgattcccgcatatcccgtattttcgagaacgtggtcaaggcattatcaacttccttgaacgcagatagaacggtctgttgatagctgtacgtctcggcctccagcgcggcacgggcggctttaagacgagcccggttgctcccggcgttgaacacgggggcgagcagtttacctcccaagtaaaagtaaggtgctttcagaaagtcgctgagttcgctatcttcccggccgtatctggccgtcagcgtgatttgcgggaaaaggctggtataggcaacacctactttagcgtttgccgcttttagtttatattccgcttgccggatgtcgggacggcgttcaagcagggaagagggtaatcctaccggaagatcggtcaacagcgtttgccgatcgatgttttccccgcgggggatgtccccgggataatgtcccgtgagcaaggatatttcgttttctttcaaccggatctgtctttcaagatcgggaacaagggtcgtggtcttcgctagttccacttgtgcctgacgataggctgtttcggaagtcaacccgccttcgaaacgtagttttgccagacgaacactctctacacgagcctcgtaggtctgtttgacaatacttaattccatgtcaagagcccgtagctcgaaataggcttgtgccacttgtgaaactaacgtcatgcgtagggccttttgtccttccacggtttggagataggctgccaaactggcctgtgaactccagcggagttttccccagaggtcaagttcccaagagagggtggcctccacgttgaacgtgttaccgggagaacggtcatattctctttcagcgagcgcatctgcaccgactttggggaagaggttcgctttctccatgcggtgggcgtaacgactttctttcacccgggccgcggcagccagcagatccttgttgtaagtgagtgccgtgttgacgagacgttgtaacacggtgtccgtgtagatcgtcggccattggatgtcagccacggtcgtcgtgtccgaactgttcgtgtcggcaattgttgtcggtaaatccagttccggacgagtatattttttaccaatcttgcaggaggtcgctaaacttccgacaagcacggcaacgagtatgatgtgatagtgtttcatgactgtgatattttggggtttataaagtttgtaaagttcataaggtttataaagtttataaggtttatggacccctgcggggcgctttgttgacggcagctcgggctgccgttaaacgctgtccgaaggacacccgtcactttataaaccttatgaactttatgaaccttataaactatttctttctccacatttttaccttataaatttgcacgaagaagaagggtacaaggacgatcccgacggtgatggcaacgatcataccgaagaagattccggtaccgatggaatgacggctggccgatccgggacccgtggcaagtaccatgggcaacataccgagtacgaaggccagagaggtcatcaagatcgggcggaaccgggctcgggcggcggtgatggccgcgtgtacggcatcaacacctttatccacttctaccttggcgaattccacgatcaaaatggcgttcttggctgccagtccgatcagcgttaccaaaccgatctggaagtacacgtcgttctccaaaccgaatacccacacgccgagataagccccgagagcggcaatcggcaaggataacaacacggcaatcggcacgagccagctctcgtacaaggcggcaaggaagaggaacacgaagatgaaaacgagcgacatcaccatcccggtttgtccttccgctttcttctcttggaaggaaagaccgctccattccgtaccgatgttgtcgggcaggtgttcacgtgcgagtttctcgatggctttcatggcctctcccgagctgtgacccggtgcggcctcgccgttgatgatggctgtcgtgaacatgttgaatcgcttgatagatccgggtcccgtggtattttccgctttaccgagagccgtcaggggaaccatgtttcccttggatgtcttcacgaagaacatgttgaggttctctttttgcatccggtagggggcttccgcctgcatatataccttgtaaacccggttgaacatgttgaagtcattgacatacaccgaacccgtgtacgctttcatcgtggagaatatatcggctaggggaattcctaggaattgggcccggtcacggtccacgtcaaagtacaactggggaatctcggcctgcaacgaggaagataccccggaaagggccttgtcatttgcagcgtatttcaccagcgtgtcgacagcatctaccagattctcgaaggtggccccgttacgagcttccacttgtagttcgaatcctcccgatgttcccaatccggggataacggacggggtggagaggaatacaagggcctccgggtattgtttgaactcggtgcggacatcattcatcacttctttcagggacattccgcctttcttgcgttcttcccacggtttgaggataacggtcaattccgagcgggattggtttgtcccgacacgggggctacttcctgccacgctctgcacatatgccacggcagggtgttccttcaggtaatcgacggcacgttccgtcaccttgcgggtgcgttccagcgtggcaccctcgggcaacgccagttctactttgaaatatccttggtcttcctccggcaggaaactactggggattacccggttcaacacgatgatgaagacgatagccattccgaacccggcaatgattcgtcgggggttggcgagagcccgttgcagaaactgaacgtatttgttattcccgcgggcgagccactcgttgattttacggaacacgaagttcttcttcccgttagacgggcgtaacaggatggcacacatggcgggacttagcgtcagggccacaaccagcgagatcaacacggacaccacgatcgtgatggcaaactgacggtaaagcataccggtgattcccggcaggaaactcacgggtacaaacacggctcccagcacgagcgaggtggcaaccagcgctcccgtcagctctttcatggctttacgggtggccttgtagggcgacaatccctcttcttccatgatacgttcaacaccctcgacgaccacgatggcatcatcgacgacaataccgatggcaagtaccagtcccaacagggtcagcatattcagcgagaacccgaaggccagcatgaacccgaaagttccgatcagggacacggggacggcaacgaggggaatcagggaggcccgccagctttggagggagaggaacacgacgaagatcacgaggaaaagcgcctcgaacagggttttatatacctcgtgaatggattccgagatgtaagtcgtgatatcgaaagggatgttataacttactccttccggaaaatctttactgatttcttccatggctttcaccacgttcttggccacttccatggcattcgcaccggggagcatgtagatgccgagtacggcagcattctcgccgttcaatccactctccgtgttgtacgagctggcctccagcgatactctcgccacgtcgcgcaaacggatgatggaaccgtcgggatttgcccggacgacaatctcttcaaattcgtttacggaggaaagacggcccggagccgtgatggggatggtgatgtccgtcccgctcatcggttgctggccgagtaccccggccgcggattcccggttctgatctttcagtacattttgtaagtctttgatcgttaacccgaaattggccatacggtcggggagaatccagatttgcatggcgtagtaacggctaccgatgttggaaacacgtcccacgccgggaacacgtttcagcacgtcaagcacgttgatggtggcgaagttactgaggtatatctcgtcaaaacgagggtcggatgaggtcagcgtgagagtcatcaactggctggaagattgtttctccaccttgatcccgttctgcacgacttctgccggaagacgggattctgccagtttcacgcggttctgaatatcgacggcggccagttcggcatccgtggatatgtcgaaagtcacggtaatcgatagacctcccgagttggagctactcgattccatgtataacattcccggtgttccgttcaattcctgttcgatgggagtggccaccgcctgtgaaacggtaacggcactggctcccgggtaggacgcggatattttcacgacgggaggggtgatttgcgggtactggtccacgggaagcaggaacaatccgatgaatcctaccagcacgatgacgatagatagcacagccgagaatatcggtctgtcaataaagaaaccgggtttcataatgcaacctcctcctctttaatcatttcgggactcacgggtttcacgagcgcacccggggttagtttgtggtagccttcaacgacaaccagttcgtcaggtccaagcccgcgttctaccacggtatgattattcacttcggggccggtttcgatgaaacgtttctcggctgtactgtcgcggcggacaacgtatatgtaggcgccgcctttttcaatggcgaccgccttgctgggaacgacgatggcgttttcacgcacgtcgagtaacaactttactttcgtgaattgtcccggcaatagtttcctgtcgggattggggagttcggcacgcacgccgaatgtacccgtttggggattcacctgcgggtcggcgaaatccacgattccggttaggggataaatcgagttatccgctagcgtgatggtcacgctgggttgccatgaccggttggcgtctttttccccgagggttacattccgttgctggctacgcaggtagtcgagggcggtaagactgaaatctacgagtacctcgtcactctccacgatggtggccagttgggatttccctccgggaccgaccagtgtaccgatgtcagcgtaccgttcactaatatatccatcaatcggggaacgcacggttgtgtagcttaattcgagttcagcttgtgctaggtcggctttactcatggcgacgtttgctttggcactctcgtaggcagccacggcattgtcaaggtcaagctggctggctgccttttgctcgtaaaggggacgcaggcgttccacgtcacgctcggcttttgcctcttgtgcctgatcttttgccagttgagcctttgccttgtcgacacgagcttggtaaaggtcactgtttattttgaaaaggggctggttccgtttcacgcgctttccttcctcgaaaagcatctgttccaagtaaccttccacgcgggctctcacctcgacgaatcctttcgcccggatctgcccgacgtattccccgtatatttccacgttatctactcctactttttctacagccactacttgtcgctccggttcggtcttgtctttacaaccggacaagaggatgaatgacacgagtgtaattgctattcctaattctttcatattaattgatttttatacattttcgtcgtaattcttcttatgctatgaaaataacatgctacatttttacgtgatattgtaaaaataagttatcttattgaaatacaatgttatttatgaattctgttcgtttgtccatttcaaaaacggcgtgttttcgtgtagaataatgccacaagttgtggagggggcaagttgatttcatgctcgctacggttttcattacttggatatggttataacgcttttacaatgaggtgtcccacgtaaacggccgttaaccccagtacaatgctgagggccgtgtaggacataaaatatagatagttttgttctctcaataacacgaagttctcgttcataaaagtggagaacgtggtaaatcccccgcataaacccacggtcaagaacagacgtaggtctgtgttaaatagattgcctcgctcgaacaacccgtagaaaatcccgatcaacaggcagcctgtgatgttcacgatcatcgtgccgaaagggaacgcggcaaggaaatgattttgtacgaaacgagtgaggagaaatcgaaatattcccccgcagaaacttccgagaccgatgataaatagtgttctaaacatatactacgcttacttaatggtttaacattttacatgtaggcatcatcagcttttcaagcggttcgaggtagataccattaccataagttgggcgcaaaggtattatttttttcttattaaacgaaaaggggttgtccttaaagttatttttaaaactccctcccggcttcgccgtactccctctataaacagagggagagttgaaatactccctttcttcgggaagagtcaccagctcctcctctgtttatagaggaggtggcacgaagtgacagaggagttttaaaaataactttaaggacaaccccttttaaactgtattttaaaggtttttcaacccgcttctttccaacaaagcgtcaacggtcggctcttggcctcggaagcgcttgtagagtgtcatcgggttttctgatgcgcccttttccagcacgttgcggcggaacgattcggcggtagtcttgtcgaaaataccgttttgcttgaataacgaaaaggcatcggcatccagtacttctgcccacttgtagccataatatccggcagcgtatcccccggcaaagatgtgtccgaaagcgggagagaaggcactacctttcacaagaggcatgatctccgttttgcccatagcccgttgctcgaagtccacgagaggttcggtgacaggttcggtgatcgtgtgccatgccatatcgaccatgccaaaacttaactgacggtcgctcgcgtacccggcttggaaattggatgatttcttgattttgtcaatatattcctgcggaattttctctccggtctggtagtgtacggcccatgtgtcaagccactctttttcgagggcgaagttttccatgaattgcgagggcaattccacgaagtcgcgggacacaccgtccatggacgtggagccgtaagtacatttactgaacattccatgaagagcatgtccgaattcatgcaagaaagtagttacctcgttgaacgtcagcaaggatggtttcgtgtcggttggtttcgtgaagttcatcacgagcgataccaacgggcgctgatctttaccgttaactattttctgaccgcggaactgggtcatccatgctccgcctcccttgctttcccgtgggaaaaagtccgtgtagagaacggcaagaaacgatccgtcattgtcatatacctcgtaggtttttacctcggggtggtataacgggatgttgttcacttccttgaaggtaataccgtagagacgggttgccaagtcaaagacacccttctgcacgttttcgagcttgaagtagggcttcagcatctcgtcgtcaagagcgtatttctcctgcatcaatttgttggagtaataagaccagtcccaacgttgcaattctccctttaagccagctttgcgggcgaaatcctccacctcttttttatctttgagtgcataggggtaggacgcctcgtgcaattcggcgatgaagttattcacgatctccggggtgttggccatgcgatcggttaatgcataatttgcgtaggtcgggtaacccatgagtttcgctttttccagacgcagggcggtgatcttcttgaccacttcctcgttgttatactcgttgtctttgtatgctcgtgtcgagttggcacgatacattttttctctcaatgtccggttgtcagcgtatttcataagaggacccatgctcgggtagtggagggtgaaaatccatccttccttgcctcgttgtttggccgtcatggcagccatttccttggctccttcggggagaccggaaaggtctttctcgtcggtcacgtgcaactcgaacgcgttggtttcggccagttcgtttttatcgaaggtcagacttagcttgcccagctcgatggaaatctctttgaaacgctcgcggtcggcaccttcaaggtttgctcccccgtcaatgaaggctttccacgtgttttcgagtaacatggcctgttccggattcaggttcaaagttgctttttgctcgtgaacttgttttacccgttcgaaaagttgcgggttcatatagatagcgtggctgaatgaagtcagtttcggggacacgttttgggcaatgtcctgcatcaaactgtcggtgagacaagcattcaggttgaaaaatatgccggaaatggcattcattttttcaccgatgttatccagtgccacgatcgtgttttcaaatgtcgggttttctttcgaagaggcaatttgctctacctctttcttggcttcctcgatagctacatcaaaagccggttcgtaatgctcggccttgattttatcgaagggaggcgtctggtggggagtgtcaaaactcgataaaagcgggttttgttcagtctttccgcaagatgccacaagaagaataattgcagccataaaagtcgtttttctcattgtttttatagattttgtattcgaaatttcggtcacgaagttacaaataagtttggaaagtttatagagttcataaagttcataaagtttgtaaggttcataaggtccgtggacccctgcggggcgctttgtccatggcagcttgtactgccgttaaacactgtccgaaggacacccgtgaccttttgactttatgaaccttatgaactttataaactcacttctttttccccttgaacacgatcttgggttccacgatcatcgggatcacggttaccgtgatgtcaaggttaagttgattctcagttactttccccttgtgagtgtaggaaatggtctgttgaccgacagatactttaccgccaccttccaagttaagagtggagtcggtttcggttactttgctcagtgccgggttaactgtgatgcctttcacgggcatggtgaagtccacgagattcagcgtgacgttcttgctggtatccgccgtgatgctgattttacaggggatcggaccttcgggaataagcgtgttgccgttagcgtcgggtttgagcatggccttcacgtggtcgggtaggatgatcgtggcctcgccctcgtacaggccgggtagagatgaaacgtcgtgtgcccgacggtcgctgcaactattgcaagatgttaataatgaaattgttgaaataataactaataatatcccgataaagaaaatattccgtttcatgaactattgatttatttttgtattttcgacggctaaaaatataaacttttatcaattaaaccatcaggattatgaaatttgtaggattacttcttcttttatgtttcgcggtcggaggatcgatgaacgccacgccggtgaataacacgaataagaaagaccatgcggcagctgttgccgggacgtataacggggaggcttttatcgaaatcatgcaacagaagatgaagttaaagctcgaattgcaacggactcaccgggatagtgtgatcgtggtggtgaaggattttatgttgcccaacgggcagaagtttaactatcgttcgaacggggtttccgtgaaacctgaagtgaaagatgggaaaaccgtgtacaagctgaatatctcgtttacttacacgtataatggaatgccgatgaaagtgaccgccacgggaaccgtgaaggacggggaactcgattcgctggtgaaagccacgatcatggatgcgatggagacgaaagtgacgtacaaagcgaaaaaggcctagtaaaatctagtaactccgcttaaaaaacaagaggggtggcaaaagtcattttatttcccaaaactcctccgtcacttcgtgccacctcctctataaacagaggaggagctggtgactcttcccgaagagagggagtatttcagctctccctctgtttatagagggagtacggcgaagccgggagggagtttgagaaatgacttttccctctccttgttttttatataataatatgctacctcaaatcaataacgtccacttccgggtgggcatccttgtcaaaacggaagaaagtgacgtctagttctttctccggtttctttaaacttttaatcgtgatcaccacgtcgttcccgtctttgccgaaggacgtgactttttccaccatgtttgttttcgtgtcgatccataccccaatcttggagatctgtttgtgagtttgtttcggggttaattcgatgtaggctttgccatccttgttttccaccaacttctgggtgaacttctggttgtgaatatcgaacaggatggaaggattcaacatctcgtcctcgttctcctccgggtttttgatgttcacctcttcttgatccggcatgtacgtgtagattacttccccgtcgaaatagttgaccacgtccatcacgtcaatgcggtacatcttatctttcatgtatgctttcccgtgatgtgtttcattaatatcttctgccttgttgatcatggaaaggtcaaaaacgatttccacggcagggtaggacttgatatgttcgactgttttatccagaatagcctttgcttttgcgtctgtctgggcgatagcgagagaaccgcataatgccagaaccatgaatgtcagaatgtacttcatacagtgtgttattttatattgtctttttcttaaaatcaaaagcaaatatagggattatcccgtagatgcaaaaacttatgggaaaatttgctactttcgcaccgttttttgaaaaaggaaatggacaagtttaaagggattctattcgcggcattgtcggcggctaccttcgggttgattccgctgtatgcaaatcaggcaatactggacggggttaataatgaaacaatattagtgtaccgttacgggatagcgggaatcgtgtatgctatttatttattgttccggagaatgaatataagactgacccgacgggaggtgaaggaagttacgcttgccggggttggagggtatggaatcacggctttcttcctgatgtggtcgtatcattatatgcccacgggcgtggcgacagcgattcatttcttttatcccgtggtcgtcgcattgctgatggctatcttctacaaagaacggctacccttggaggtgaaagcggggatcgtgctggcgatatgcggggtgtacctgttgtcgtggactcccggggaggtgaaatggctaggattattctttgtattaatgtccacggtgacttatgggtgttatattaccgcgctgaaccgtcccgtgttaaagcggatgaatccggacgtgctgacttgctacgtgttactattcaccgcactgttctacttgatcttggccgtggcacaggggaagatggaaatcatcacgagaccccggttcttgctggatatgttgcagttggccatattgagtacgatcgtttctgcccggttgctggtggcagccgtgaaattgatcggttccgtaccgagttccgtgttgggaacgttggaaccgataacggcaatcgtcgtgggagtactttatttcaatgaacaattgacttacgcgaattaccttgggttattgatcgtgatcgttgccgttcttgtcgtgatttacaagatgaaaaaataagggggaaaacttccgttattatgatgtaacctatttatttttggctatttttgcgggtgaaattgacttttaagaatatcgtatgctgttgtttataactataaacttttacactataactgatatattgctagccgcttttatattttatcaggtttataaactggtgaaagggacggttgcaataaatatatttgccgggattttcacattctacgtggcatggttgctggtgaaagctctgaatctggagttggtttctggtatcttgggacagtttatcggtatgggagtgattgccttgctgatcgtgttccagcaagaagttcgccgctttctattattattaggtagtaaatataacctgcaaaacatatttaacttggagcggctttttaccaagacttctataaaagatgaggtcgccgccgctatcgtgcaggcctgtgattacttttcgaaaacaaaaacgggtgctttgatcgtgttgtcccagaattcggagttgtacaattacgcgcaaacgggtgtgttgatccgttcgatcgtgtcggaggagttgcttgaaaatatcttctttaagaattccccgctacatgacggtgcggtaattatcgcggataacaagattttggcggcgcggtgtattttgccggtttccgataacacgaatattcccgggagtttggggttgagacatcgtgcggcgattggaatgagtgccgtgaccgatgctcacatcatcgtggtcagtgaagaaaccggaaatatttcttttgtgaaggatgggcatttcaaggtgcggatcaccccgcaagaattgaacagtttcttgcacaatgatttcacgggtttcgtcgtgaataagtaatcctgttttcgtttttcttttatcatattggtaaattattcgttcgtgtaccttggttcgcttgtggtctatggatagaaggggacatgaacattgcatcttcatagcatgaacatagcatgaacactgacgggtgttgttgatgagttagaggagggtatctgtctagtttatttcctagtttatcccatgatattccatagaacaaacgctgaccacaggtggaagatagggtataaagacgtatcattttcgaatcaaagacgaatcaaagacgttcacgaacggctttgtaccggctttgaagcggctttgtaccgaggttgatacctgtcttttaccttatttcaatagtattatcctgaaaaaagttccccttctaacattttgccaatcatgcttttggcgtgtattgatgaaaataattgaaaaataattgtgaaaatatttggagaaggggaaaagtttgccttatctttgcacccgcaaaacaagaaacagtgcaagcatgaacgaggctagaaaggtggtttcttgtaacgttcttgaaatgttgaaaaggaaataagacaatccttcttttgcttgagtaattcaaaatatcgaattacgaggctcttaaaaaaagtttgaaaaaactttgaaaaagatttggaaggtaacgaaaaaaggtcttatctttgcatccgctttcgctcttaaaacgagtgagactaaaacaagaaagaaagagttctttaagatattgaaatgaacaaaacgtagcgagcgtgaatcgagatcgacgagagtcgagattcatgaaacacatgacccggccagaataaaatttctgtaaataacttttaccatgaagagtttgatcctggctcaggatgaacgctagcgacaggcttaacacatgcaagtcgaggggcagcggggagtagcaatacttcgccggcgaccggcgcacgggtgagtaacacgtgtgcaaccaaccccgtaccgggagataacccgcggaaacgtggactaacatcccataatactggaggatcgcatgatctttcatttaaaattccggtggtacgggacgggcacgcgcgacattaggtagttggcggggtaacggcccaccaagccgacgatgtctaggggttctgagaggaaggtcccccacactggaactgagacacg

SEQ ID NO: 47 - DNA, 15064 bp, Butyricimonas faecihominis
agatagtggatgctattacgtatgtgattcataacagaagaatttaaagccggtcttttttagagcgaattctagtaagttcgtagctgataactaataatttgaatttatgacaaagattaaagttcaaaatacagaagtgacagtcatcatttatgacgataaggactatatttccttgacggatatggtacgtaacatcgaaaatggattagctcttatcgagaaatggctacgtaacaaaaatacaatagagtttttaggtatatgggaggaaatgtacaatcctgattttaattcccccgaattcgagggaattaaaaatgaggctgggttgaatcggtttattttatctgtgaagcaatgggtggaaaaaaccaactctaaaggtcttatcgccaaagctggtcgttatggtggaacttatgcgcataaggacattgcctttgaatttgcttcttgggtttctccacaatttaaactttatcttttgaaagagtttcagcggttgaaggaattagaacaagctcaacttggttggactgccaaacgtgaactttccaagattaactaccgcatccatacagatgccattaggcagaatcttattccatcagaggtaacaattcaacaggcaaatatcatttatgcgaatgaagccgatgtcttaaatgtagccatgtttggcgtgacagctaaaatgtggcgtgagcgaaatcctgaacttaaaggaaatattcgtgattacgcttctatcaatgaacttatttgtctttcgaatatggaaaaccttaatgctgttttcattgagcaaggaattgcgcaaggagaacggcttgttaagctgaatcaagttgccattcaacaaatgcgaatactggaggctgatggaaataggaagttattgaaatagtatgattatttgtatctttgtctgacacaaagcgagctattatgacagaacctcgggaagaaatagtaaaaaaggcgtttctgcaattcttgaacaggggatataaggcctgttcgctgaaaacattggagcaagccacgggcttgaccaagggcgctttttattattacttcaaggataagaaggagattttggaggcggggatggaacggtatttcagcgtgatgaaggaggagagtgggaaggatgtggagcgagtggcttctctgcgggagtacattgatctcgtgatcaagaataaagaggagagtgccgatgcctcccagagagttttcggatgttttatactggaagtcttgtttttccagctggtgctggaagtggccccgatctttccggagttccgggagcggatatacacgatttccaagaggcggttggcgaactgggagcgtgctatcttgaaggctaagcaaagcggggaaattcgggcgacattggatacttcggttttggcgcgtaacttgatgtccgtgtcgagtagtatgttgaatatcgagttggaacaggcgaatttccagtatatgttttcagatacccggatgcagtttgaacaatattatatgttgataaagaaatgaacggaacgagagacacgattatcgagacagcttttttgttgttcctgaaaaaaggattcaaggcggttacgcttaccgacttggagaaggccgtggggatgacgaaagggacgttttattatcatttcttgaacaaggaggaggttttgaaagagggggtgacgaggtattaccgtatgttgaataaccgacgggccgaggagatgagccgggtacattcgttgcgggagtttgttgacctgacgatccataacttggaaagtatcggtcattacggggcgaaacgtttggatagtgatattcccgaaattttgtgtctatcgctgatggtggaggtgatttccttgtacccggagtttaaacagatggtgagtgacacgaaaatctcgtggatgtcgaagttggaaggtgttatcttggaggcaaaacgagagaaggagataagagatgacgtggacacgtcgattttggcaaagaatttgctgaacataagcattgggttgataaattatatcgttatgcatcaagatgtttcttatgctttatcatcggtgcgttaccagtatgaacaactttattcgttagtaaaagctcgataaagtttttacgggagtacataccgaaaagtataaatttgaagagacttgaagttagaatataaaaacgagaaagtgatgaataggattacggaatgtaaatctgtattaagtttaattgttgtattactgtgctttatcttgcagtcgaatgcgcagggggtgttaagtttggaggattgtcggcggttggcgatagagaacaataagaaactgaaaattgcagatgaagacgtgaaggcgagtgaggctcaaaaagccgaggctttcacgaagtatttgcctagtattgacgctatgggcgtgtatttgcgcaaccagaaagagattaatttgttgtcggatgatgcccatttacctgtcgggtcgattggctcggacgggaagttcacgtttcgtcccgatcagttgatggtgggttcggacgggaagccggtgatggtgaacgggcagtatgtcccgaaggattatgccctgttgccaaaggaggcgatgaccgtggacgaacgaaacttaggaattgtgcaggtcgggctgacccagccgatttacatgggagggaagatcagggcttataatcagattgccgggttgtcggagcagttggcgaagagtaagcggtcgcaggagttgcagaacgtgattctctcgacggacgaggcttactggcagatcgtttccttggtaaaccggaagaaattggcggataaatacgtggagacgttgacgaagttcgtgcatgatgtcgagttgatgtacacgacgggggtagcaaccaaagcggacgtgctttccgtgcgggtgaaactgaacgagggggagatggtccaaacgaaggtggacaacgggttgagtttgtcccggatgttgttgaaccagatttgcggcttgccgacagacacgatcgtgatgttgaaagaggagatggcagacacggacgtggaggaggtgccagcggagagtttggaacgggtgtatagccggcgtccggaggtggcgagtttgcagttggccacagatatatataaaaagaaggagaagattgctttgtccgagtatttgccgacgattgctttaacggcgaattatttgagtagcacgccttctttctttgacggggtgagtacgaagttcgacggaatgtggagcgtgggagtcgggattaaggctccaatatttcactggggggcatcccgtaagagtttacgtagtgcgaaggcacagacgaacgcgatgaattataagttgcaggaggcaaaggagcagatcgagttacaggtgaaccagtcggaattcaagatgaaggaggtgacgaagaagttggcgatggcccgtaagaatttggaacgggcggaggaaaatctgaagtttgcgaatttgggtttcaaggagggaacaattcccgtgctgaacgtgttagaagcacaaacggcttggttgacggcgaattcggaactgattgatacgcagattgaggctcgattgtgtaaggtttatttggagagagcttatggaacgctggaattttagatttatgatactagatttaagattaaccccctttagctcccccttgcacagggggagaaacgaatgcgggaaaccgccacaatgtaacaaagtagcgtgtcctccccctgagtaagggggagttagagggggtagtttttctattttaagttttaaactctaaattctgaattttaaattaattgttatgagcgaaaagaaagtaagcgggaaggtattgatgtttacagggatcgtgatcatcgtatttttggttgctatattcgggtttattttttgggaaccggtgccggagatgattcaaggtgaggcggaggccacggaagtacggatttccgggaaggtaccggggaggattgagcgttttttagtggacgagggggatcaggtgatgaagggagatacggtggcgattttggatagtccggaggtgatggcaaaatttaatcaggcgcaggctgcggaagaggctgcccaagcattgagtgataaggctcagaagggggctcgcgaggaacagaaaacgatggccttccaaacgtggaaaaaagcacaagcggctcttgacgtggcaaagaagtcttttgaccgggtacaaaagttgtttgaaaatgatgtggtttccgcgcagaaacgtgatgagaccgaggctaattataaggcgatgctagccacggagcaggcagcgaaggcccagtatgagatggcgaagaacggggcggaaaaggaagataaattggcggccgaggctcaggtaaaccgggcaaggggtgctgtggaagaagttagttcttatataaaggagacatttttgatttcaccgatttcaggagagatttctgaacgttacccgaaggtgggagagttggtggggacgggttcccccgtgatgaatgtgctggatttggaggatatgtgggtggtttttaacgtgcgtgaagatttgttgggagacttgaagatgggaaccgtgttcacggggtatattcccgctttgaacaataaggaagtgcagttaaaagtgactcacatgaaaaatatgagtacttatgccgcttggagagccacgaagacaacggggcaatatgacgcgaagactttcgaggtgaaggccgttcccacggaaaaggtggaggggttgagaccggggatgagcgtgctgaaaagagctaaaaactaaaagctaaaagctaaaaattaaaagtttaaagtttaaagtgaaatcaggagtgttgatttgtatggttgaaatctaaaatctaaaattaaattatgcgtgagaatataagggctttgggggtgttgatgaaacgggaggtccggatgttggcagaacgtcggatctactggtttgtgatgatcttcgcacctttgttctgtttcctgtttttcatggatttgttgaaagaggggttgccgaaaaagttgcctgtggccgtggtggatgaggataataccacgacttcccgttctttggtgcgttcgttgaacacgtttgcccagacggacgtggtgatgcgcacggcgaattttagcgaggcccgagaggctttgcagcgaggggatgtttacgggattttttatatcccggcggacttccggcgggatgcatcgacagggggagaacccgtgttgtcgttttacacgaatgatacttattttctggcgggttctttgttgtataaagatatgcggatgcaatcaaatttagcgaatggagcggttcaacaaacgttattgctggcgaagggagagggcgggccgttgctcgccgctaagctgatgccgattgtgctggatacgcacccgttgaataacccgtggttgagttacgctgtctatttggcgaatttccttttacctgcattcttgtgtatgttcgtgatgtttaccacggtgtacagtattagcgaggagattaagcggaggacttcaagagagtggttggaggcggggaatggttctattatcgtggcattgatggggaaacttgtcccgcaggcgttgattttcacggcgatggggatgcttgctctttccatgttgtatggttatgctcatttcccgttaaatagtggatttttcccgatgtttctggctatggtactgatgattctagcctctcagtgttttgccctgtttgttacggggatgacccgccggagcaggatcgcattgagtgcttgtgccttgtggggtgtgttgtcattttcgatatgcggttttacctatccggtgcgttctatgccggagctggctcagatcgggtcgaatttgttccaaatgcgtcactattttttgatatacgtggatcaggctttgaatggtattccgatgatattttcttggcagagttatgcggcattgatggtatatttattcttgccgatttttatcctgccgaagttgaagttggatttgttggagtttaagtatttgccataaatcgttgaaaacgatttatgggttgcaggttggaatgagtttgaaatttaaaatttagagtttagaatttagaatttagaatgaaaaagactaccccctctaactcccccttacacagggggagaaacggacgcaagaaattgctacaatgttttcaatgtagcgtgtcctcccccttgaaaagggggagttagagggggttaatctaaaatcaaaaatcattaaatctaaaattgaaatgggtttttggacggatatatattatgtttttaaacgagagttttatgcggtgttccgggatcatgccgtgttgacttttttcgtggcgttgatgttggggtacccggtggtctacacgtttatttatagtaatgaggtggcgagggaagtgcctgtggcggtggtggatcattcgaagtcagcgttaagtcgggagtttatccggaattgggatgccacggcgagtgtggatgtggtggcccgttgtgaggatatggaggcggcgaggttattgatgtataaaaaagatatttacgggattcttgagatcccctctgattttagtaagaacgtggcccggggggaacaggctcacgtgtctctttattgtgatatgggggctttgctgaattacaaggctttgttgacggctgggactgacgtttccttggctatggggaaggatatacaggtgcaggggatggagtacgccacggtgatcacggaacagattgcgtcttctccagtacagattcaggacgtgaagttgtttaatccacagggaggtttcacttcttttttgatcccggcggtgttgattttggtggtgcagcagtcgttattgttgggagtgggaacgattacagggacagagcgggatcgacgtcggaaaggattgttgttacctacgaataagcattttcgtcatccggcacgggtagttttagggaaggcttttgcttatttgcctatttatttcgtgatgagttattgggtatttttcatcgtacctcgtttgttcgggatgacccaagtgggggaacggggggagctgatgttgtttttgttcccgttcttgctggcgtgtaccttttttgctattgccatgtcgttttttagtcgtgaacgggagatgcctttcttgatattcgtgttcacgtctgttccgttgatgtttatttccggaatttcttggccgaagtcagcaataccggaatattgggtgtggtttggaaagttgtttccttcctcgttcgggattgacggtttcgtgaaaattaataatacaggtgccacgttgtcagaggtgttacctgaattttgggggttgtgtatattgatggtgttttattttattgtggcatgtttgttgtataaaagagagtgtaaaaagttaaaaattaacatggtttagtgataaaattggaaaatgatgaaaggtgttgtattttctttgcttgggttgattttattgatgtgtgcctgtggaagttctaaaacaaagcaggaatgcggtaaggctacggtgcaggccgatacggtgaaaagttaccaaggggaattgtcgattatttatccgggaaagatcaaggcggcttcagaggtaaagctgtcatttcgggtggctggacctattcgggctgtgttgccggaagtgggggctttcgtgaagaagggggagttgattgccgagattgatccgagggattacgagattcaactttctgcgacagaggcggaatacaatcaagtgaaggaggaagccggaagggtcatcgaattatataaccgggggagcgttccggtaaatgattacgataaggccgtggccggggtcaagcaaattacggcaaagtataatgcccataagaatgccttggctgatactcgtctgacggcacctttcgacgggtatattcagaaaaaatattatgattctcacgagacggtggccgccggttaccccgtggtgtctatgattaatagtaattattttgacgtggatatcgatattccgtccagtgattttgtacgacaagatttgttcaaggcgttttcttgtacaattgatgtgtttccgggacaagttttccctttggagttgattgaaattactcggaaggcgaacttgaatcagttgtaccggatgcgtctgcgtctgaaacccgtgccgggagtggatattgcggcagggatgagcgtgaacgtgacgatcgagtataacccgaacgaagaggcgttgacggtggtgccgttatccgcgatgttcgaagaaaacggggaatctgccgtgtgggtatataacccggaaactcaacgagtgaccaagcgtgttatccagttgaaaaagttactgaaaacaggtgagttgatcgtttccggagggttggctgccggggagatcgttgtgtctgccggtgtgcatagcttgaaggagggaatgtcagtagaattattgaaaccagtttctaaaacaaatgtagggggactgttgtaatgatcaatttagcggattatgcattaaataatagggcgctggtaaagttttttattgcagtgctggtgattggaggtatttttgcctttaattcgatgagcaagttggaagacccggaaatcaaggtaaaacaggcgatggtggttacggtgtatcccggagcttctgctcatcaggtggagttggaagtaacggatgtattggagaagtcgattcgttcaatgggggcaatcggtagtattgaatccaagtccatggcggatatgtcattgatcacggtagaattggagagtacggtgagcccggacgaattggagcagaaatgggatatcttgcgtcggaaggtgacgaatgcacaggcccaaatgccggatggagtgcgcccttccgtggtgatggatgatttcggggacgtgtatggaatgttttatgccataacgacagacggggtgggagacgagcagttgctggattatgcccagttggtgaaacgggagttgcaggatattgagggggtgcgtcgagttgaaatttacggaaatcggaccccatgtatcaatatcgagatgatgcaggataagatggcgaatttgggggttcatccgatggaggtgttgtccacgttgaacagtcagaataaaaccgtgtatcccggttatttcaatagcggggatcagcgtttgcgggtggctattaatgatagttacaggtcgatagatgatattaagaatttaattatacagggacacgaggatgatcagttgcgtttgcgagacattgcgtctattacggaagggtatgaagatccggcccgtaacggaatgaagtatgatggcaagcaggctttcgggttggcgatttccatggaaaaaggtgggaatattataaccttgggagagaaggtagaccaagagttacagcagttgaaagaatcccggattccagtgggagtggattttcagaaagtattttttcagccggatcgagtaagggaagccattaatgttttcatggttaatctggtagaatcggtagtgatcgtgattcttgtgctgatgcttaccatgggattccggagcggggtgattatcggaaccggactggtgattatcgtactgggctcattcgtggtgctttatctttttgacgggaccttgcaacgggtttcactgggttcgttgattgttgccatggggatgctggtggataatgcgatcgtgattgttgatgggatactggttgatttggagcggggcgtgaaacgtccagctgcgctgacaaatatagcgaaaaagacggccatgcctttattgggggctacattgattgctatcttggcgtttttcccgatctttatttccccggatacgacgggcgagtacgtgcgggatttgtttatcgtgctggcggtatccctgttgttgagttgggtgttggcgttgacgcatatcccgattcacgcggatcactcgttgaaagtgaagccgaagaaggcgaatgagaatttgtatgatagtaagatataccggttgttccggcagttcctttcttttatgttgtggcataagtccatggcaatcggggtggtcgtggttttattggcgattaccgcatttttgtaccggtatatcccacagggtttcttcccggatttgagttacacgcagttgtatattgaatttaagatgccggaaggtacgcgggtggaacgggtagaatcggatttggcaagtatagaggattatttgttgagccgcccggaggtgactcatgtgacgacgagtgtcggcgggacgcctgcccgttataatctggtgcgttctattgcggaacccacgatgagttacggggagttgatcgtggattacacgaccccggaagagttgaaagcgtcgatgaccgagattcaggattacctgacagctcattacccggatgcttacgtgcggatgaaacgttataatctgatgtacaagaagtacccgatcgagttgatgttcacgggtccggatccagccgtgttgagagagttgactgcaaaggcggaacagattatgcgtgacgaacctgcaattactttggtgacgaatgactgggagccgatgactcccacgttgatggtggattactaccagccgattgcccgttccgtgggactttcccgttcggatgtcggtttgtcgatgcttgccgccacggatggaatgcccgtgggatctttctacgagggagttcatgcaaagcctttgtacatgaagagcgtgaatagtgagggggagaaggtggaagcacttgataatattcccgtttggagtgtgctgccttcgacggcggctttgaacgaggagtcgttgaaggggttgttgatgggaacgatgtccggggaggatttgctggctcaaagtataggttctatcccgttgaatcaagccacgaaaggtatttccttgaaatgggaagatcctgttgtgcgacgttataacgggcagcgggctatgcgggcccagtgtaataatgctttgggatacacggcggagagtgcccgttcgctgatcacggagaaggtggatacgattactttgcccgaaggatatgctaaacagtggttgggagagcataaggcgagcggggagtccatgaaatatttgttcgggaatattccgttagcggttattctgatgattgctatactgatcatgttgttcaaggatttccgcaagccgattattattttctgttgtttacctttggctgcaatcgggatcgtgctgggtatgttgatcagtggtaaagagtttggtttcgtggcgattgtcggtgcattggggttggtcgggatgatgattaagaacggagtggtactactggatgagatcgggttacagattgcttccgggaaagatcagacacaggctctgctggattcttcttcttctcgtttccgtccggtgatgatggcgtcattgacaacgatattggggatgattccgttgctgggtgacgatatgtttggctcgatggccgttacgattatgggaggcttgttggtaggtacggtgatcacgttggtgtttattcccgtgttgtacgcgatattctttaaagagaagaaaagtgatagtataagttagaagattattatgaaaggtctgttgataatattattggttttaggtatttctccggtaaaagcgcaggtttctttgaacttggaaaaatgtcgggaaatggctttagaaagtagcaagaagatgtcgattgccacgaaacagggggagaaggcggaatttgagcgaaaggcttatcgtgcgaattttttgcccaagctttcggctaccgggttgtatgcttatatgcagaaaaagagttcgttcacgattgatggggggtatttaccgacgttcgtgccggatgcaaacggggagttggtttacaatctttatattgacccggcgacgaaacttccggtgatgggaaaggatggtttgcctctttcggcgcaatatgcttttatgcctgatattgagttggagttagggttacgaggggtttattcggcgggagcgatgctagaacaaccgatttatatgggtggaaagattcgttcagcctatcgtatggccacgatcggaaaggaaatgtccgaattgaataagcagtatacccgtgcggaggtgattaccgaggcggacgaggcttattggcaatacttgcgtgtcgtggagctggtgacttctgcccagaagtataaggcggtagttaatgagttagtgcggaatttgacggatgcttacgaaacagggatggcttcccgaaatgatttgctgaaggcacaggtaaagttgaacgaggccgagttgatgttgcaaaaggcggagaacgggaaggctttggcagggatgaatctttgccgggtaatcgggattgatctttattcgacgatacaggtgagtgattctttgtatgatgaggtgactccgggcgtgttgaatgccggggagggattacaacagcgtcccgaatataatttgttggagaaggatgtggaattgaaggagaaacaggtggcgttgacccgttctgattttttgccggaggtgggagtttctgcctcttatggattttcggggggaatatccctgaacgggcagacggaggatgtggcgtctttcacggctatggcatccgtgaagattccgatttatcactggggtgagggccggggaaagattaaagcgatgaaagctgagcaggagatgagtcgattgaagaaagaggagatgtcacaaatgatgcttttggagattgcacgggctcgctataatattgaggattgtcacacaagggttatgctgacccgtaaatcgttgagccaagcagaagaaaatctaggggtgagcaagaatcagtacgaggtgggaatggagacgatcacgaactacatggaggctcaggcgcaatggcaaaaggcgtggagtgactggattgacgcaaaggcggaattacggttgagcgagacgaggtacttgaaggcgacgggacggctataattaataaggcttgccccaaaagcaagccttattaattataagataaaagttaaaagctaaaaactataagttgggatatgtgtttgaattattttttgcaaatagcgggaataattttaactttaccgtgtcacgtaaaaggagtagtatcgtgcctgatataaaagaaacaacgataattcgtctattagaggccggagatgagagatgtatgaagatgatgtttgatacttattatcaagcattgtgtatgtatgtcatgcgttatttgatttcggtggaagatgcggaagatattgttcagacggtgtttatatccttgtggaataataagcggggacaggtttttacaggatctttgaggtcttatttgtttggggcggtaagtaaggcctccttgcagtttatgcgggatagggaaaggatgtatttcgtggagatagagttgcatattgatgattttttggaagaaatgtctcgtgatcgtgaagtggaattagagaagatgaaagaatatctatatgtagccattgaggatttacccgctaatccgaagaaggttcttaccgcgattgtttttaataatacaccttataaggtggttgccgaggagatgggaatttcggtgaacacggtgaaaacctattacgctagggcgcttcaatcgttgcgtaaatctcttgatggtaagacattttgttttcttttcctctcgttcttttcttctgaaaaataaattttaatttttcttcttgatttgtgtcacccatttttaaattttgggaatatgtataaaaattatgacacatggaagataagtcgatatttgaattaattgcagaatatagtgccgggacgatttctcctgcggatgccgaattacttcgtgagagattggagagcgatgcggaggctatgcgtttgttccgggagattcgggagacggagaaggtgttgaaatccgtgcaggtgcaagaaaaaattgaccttcagaagtcgtggcaacgtcttgacagttctttggctgggctacctcgaaaaggacggaggctgttcttgacagtgggctcggtggttgctgcttccgtggcgttattgctgatgtttgtttttccgtttacccgacaagtggaacagccggggacgttggtatcacaggtgggaattactcccggaggagtaaaggctattttacagagtgaggatggaaagatgatagatttaacttcttccacgtcctctcatattgtgacgtcggatggtttggtgttagtgaacgattctttgaagggattaaggtttgatcagagtaagttggagaatcaaccgatgaaatatcatacgcttgcggtgcctgttggcggagagtatcatttcacgttagcggatggaacccgggtgtgggtaaattctgcctctgaggtgcgtttcccgaattgtttctccgggaaaaaaagagaaatctatgtcaaaggagaggtctatttggaggtggctcgtgatgaaaagcatccatttgtggtacatgccggagaaaatgaggtacgtgtgttgggaacgagatttaacctgactgcttatccggatgaacaggaggtgattaccacattggtcgaaggaagtgttgagttttggaatgatcaatcaagtattcgtttgaaacccggggaacagtccgtgctggatcgggagacgaataatcttgagaaacagaaggttgacgtgtctatttatacttcttgggtttccggtacgtatgagtatgaacggatgccgttgtcggatattacccggcaattatctcgttggtacgacgtacagtttgtttacgagaccacggaattcagtaatcacccgttcacgggagtcgtgaaacgtgatcagtcgttgga

SEQ ID NO: 48 - DNA, 14968 bp, Butyricimonas faecihominis
tatctatacaacgtttgtatctacgtataatctcaggctgaaaatgatgttttttgtcattagcttttcctgtttcatataattcttttagatactctttatcgaatgtaacaatcatattagttgtttctttgaatacaaagatagggaataaattttataaattcgcaaatttgcgaatttatatgatgattttgaggtagtgtcgtggttttatacataaacactgatcgaaaaaatttaatataatcttgcattcctgtttgttatttgtttatagtttgatacctttgctattgacttacatatatccacggtagggattcctgcctaattgtagcaggcatttttcatgcctgttactcaacatacggttctgtacccccgtgtggtgtattaatgtacccactgccgtggatggtgtaagtcaacgggaaaggcagaaccgtttttttctgcctgacttaaatctataacttatggaaaagaatgatgctttgaaggcgcaatcagaaaatggagatgcgttaggtggtctgtccacggaagaaattgaaaggctggaaaattactacattttggaggcagaacgtttaatggcgtttggggtgcaagagaaaaaggaacctttagaggttatgttgaaacacttgcgtatcgtggaaaacctattacacagtttacaatttcagtgggaggatagtatttcagtactatatagtagttttatgcattatgtagttctggtagagggaaaagagaagcaaaatcgcttatcagatttggtgatagagttgataaaaaagatgaaacatctttccaagaaagaacctttgattatgggtttggcacgtcaataccagcaacagaggaaagaagtagaagctttgattgatttgaggagtaatgaacctgaaatgtgactatcatgggtgaaaaggatgaaagtgctttttctgacgggatgtcgggagagcaacaaagaatgtcttcgaaagatttctatctgacgaagtctcaggttatgagaaggtttcggggtaataaattgagaggagattgtgatgaaaatttattgggaggcttgctccatgagatgaatgaaacgcaacaactcttggattgtatgcgacttccttggatgaaattggctgatgctttttttcaaggttacgttgatgtcccctcgtatagtaaggataagagactgttagcttcacgattaatagaattaatggtgaaattatcaagggaaacttcttttgttgagaaatggtttgtgtacaattcttttcaagcgaaagaaattaaagaattagaggttgcgtgtaagatgcgacgcctctatagtatttccattggtgatgagttattgtacgatctttcgttaaaacaattagttgaaattcatgatacgatcgaaacgtttcttgaacaagataatacctcttttcaggaatttgaggatgatgatttatgtggaattgatgtggatatgtctgtttgtcgttttgcggataaagatacttatggtgtttcttactatattgatacttacgagggggagatgcactttacatcttccgagcaaataagctgtgttatcgagcaaatgcaacaattcttggatcggatggaaaagagagagtttatgaatattaaagaggctacggaaaaagaagaggctttcattacaatacgggaagactattccccaagaaagaaagtcttgaacgagattccacttgtaagcaaaagtattcgtcaatgtgatggggaggcattaacgggaaattacacgataagtgctaatggtttgtatttaaatgatctatcttccccgaaattaaaagaaatttccgtgaaacttgaagaatttttagaatctgtagataaacaatggagaatacttcgaacgcctgtagaatgtggggtcgaatcttgattggaagggtaaaaagcaactgcttttccagttgcttttgctattataatagaaaaatattgttaaggattcagccgtttgattgtttcttccagtttaaacatttcatcccggaggcgggcagcttcaaggaaatccatttctttggcggctttttgcatggcggcttttgttttttgcagcattttttccagctccgatttactcatgtaagcggtaacggggtctgcggccatatttacgtgttcttcttcgatgtaggcacgagaggtttcttttagtacggattccgtggatttccgtatttgggtaggggtgataccgtgttgaaggttatactccatctgtttttctcggcggtactgggtttcattgatggtttcctgcatagagcgagtgatcgtgtctgcatacatgatcactttgccatttaggttacgggcggcacgtccggaggtctgtatcagtgaacgggtagagcgtaggaatccttctttgtctgcatcgaggatggcaacaagggaaacttcaggcatatctaatccttcacgtaataagttaactcctacaattacatcaattactcctttgcgtaaattttcgatgatctgtactcgttctagtgtgtccacgtcagagtgaatgtactggcatttgatgcgaatgcggtccaaatatttacttagttcctccgccattcgcttggtcagcgtggttacaagaactttttcgttgatctcaattcgtttttgtatttcgttgatgaggtggtctatctggttcttgctgggaacgacttcgatttccggatcaagaattccggtggggcggataatctgttccacgacaaccccattgcatttttccagttcataatcggccggggtggcactgacgtatatggtttgccccgtgttggcctcaaattcttcaaacgtgagtggacggttatcgaaagctgccggaagacggaacccgtattccacgagtgattgtttacgggatcggtcaccaccatacatggctcttacttgcgggagtgtcacgtgtgattcgtctacgacgagcaggaaatcctgcgggaagtaatccagcaggcagaaggggcgaacgccggcagcccgcccgtctaggtaacgggagtaattctcgataccggagcaataacctagttcccggatcatttccacgtcatattttacccgttcgtccagtcgttttgcctcaaagtgtttaccgatggagtttaagaaatcaacttgcacgacaagatcgtgttctatgtcatgtatggctttcgtgagcgtggctttatccgtgacaaacagatttgcggggtagatgttcagattttccatttcgtcgatcgttttcccggtttgcgggctaaacgaggtaatccggtcaatctcatcatcccagaactcgatccggtaggccattccctcgaaggtttcaatggccgggaagatgtctacggtttctccttttgcccgaaaactaccacgtttgaattccagttcgttattcacgtaaagggcatccaccaaacggcgtaaaagttgattacgggctatcttttgacctttctgcaagtagataatatttgaaccgaaagcagttgggtctgccataccgtaaagacacgaaacggatgaaatcacaattacatcccggcgtccggatagcaaggatgccgtggttcgtaaccgtaatttgtcgatctcgtcattgatcataagatctttctcgatatatgtgttggtggtgggcaggtaggcctccggttggtaatagtcgtagtaagatacaaagtattctactgcattttcagggaagaaagccttgaactccccgtataactgggcggccaacgtcttgttgtggctgaggattagtgtcggacgctgaacctcttgtatcacgttggcaatcgtaaatgtctttcccgatcctgtaactcccaataatacctgccccgggacttcatccagaagtccttgcgttagttccttgattgcttccggttgatccccggtcggttcgaattgggaagttagtttaaacatttactaattttagattttaaattttagattttaaattgaaaatgttggttcttcaatttaaaatttacaattattcaatttacaattaagaaagtttgctcatgaatttttccgggttgatgataaagcggtcgtggatggccgagccgataggggcggtttcatcccatgcctcgatagagaaacgaatacggcgaccgtcaacctcggtgatggtggctttgcaggttactttcttgccaacagcggttgccttcacgtgtttggtattgatttcgatacctacggtgtcgctgtcggcttccaacattccttccaggcatttgatagctgtgttttccattaaacctaccattgcgggtgttgcgaatacttccagtttcccggaaccgtaaacggctgccgtgtctttatgttgcacggtaatttcttgtgtgaaagagtgtcctatttttatttccatgatctttgaatttgaattgcaaagttaactaataatcctgtatggaaaggtcgttttaagaagttttcacgtgatgttatggattgtttaaattcggttagctgaaaaacaggcgtacggctacaatgacaagtacgacgagcaggaaataccgaatgtatttagctccccatttgatactgaaacgtactcctaaccatgccccaagcatatttccacaggctaggatgagtccgactttaaaatccacgagatcgttccagataaagattgccagagcgataatcgtgtagaatagcacgataaatagttttatggcattggcttttaatagatcgtaaccacatccgagaaccaaccccgccagcaggaagaacccgataccgatttggatgaatccgccgtaaattcctaggaaaaagaagataatgtttcgtagccacgggcttttcatttttgccttgtccgcatttgctttaacccaggcatccgggttcaagagtagcatgaaaaacatgacgattaaaagtccggcaatgacttttttgaatatctcttcgttgatgtccacggcaataaatgcacccacgatacttccgagggccacggggagtagcagtttagaatcggttttgaaatcaagtatttttttttgtttaaagccgctgacggataccacgttttgcaataaaatagcaatccggttggttgcgttcgccacgtttgccggtaagccgatgaagataaggaaaggtactaccaacatggagccgcccccggcaaacgtgttgataaaacctgcggcggtaccgaggagtatggtgacgatgatttcgattattgtcatggggcaaagttaaaaactaaaagataaaagctaaaagtttaccgtgagtatttccgaggatagcgaaagaatatagccaaaagggctgcaacacccattaagtacgggtagtagaggtactgcatgatggctagcggggtaatggaggctagaccggcggccatgagtaattgcgctccgtagggaatgataccttgcacgaaacacgagaatgtgtctagcaggctggctgatttccggggatcgacaccaaaacgattggcaatgtctttagctatggggccggacatgatgagggctatcgtgttgtttgccgtgcataaatcggcgaaactgactagggcggcaatacttaattcggctcctttttttgatttgacatgagttgtcaatttctgaatgatgtaggcaattcccccgttgtagcgaatcatttcgagcattccgcctgccagcaacgtgataatgatcagttctcccatatcggagatccccgaacccatggcggcaaaccattcccagaattgaatgcttccggtaattatcccgactataccggaacagagaataccgagtagaagtacgatcatgacattcacgccagccaaggcggtgattagtaccaaaatgtaaggaattacttttaaccactcgatcggggtggcgctgggtgttgttgttatttcgctgccttggaacaggtaaacgatagttacgagtatagcaaccgggatgacaattaagctattgactttaaatttatctttcatgttacagccttgcgtgcgggtggcaacaatggtcgtgtcggagataaaggataggttatccccgaacatggctcctccgaccacgatggctaccatgaaaggcgtgtttatgcctgtttgtgcggcaataccgacggcgacgggggtaagtgccacgatcgtaccgacagaagttcccatggaaagtgaaatgaaacaggcggcaataaacatccctgcgagtaagagactgtccggaagtacggataaagcgagattaacagtcgcatctaccgcccccacggcttttgccgtttgggcaaatgccccggcaaggataaaaatccacaccatgagcatgatattgctgttggcggctcctttacagaataggtctatccgtttgtggagttttcccccggaagagatggccacggccacaacggaagagacgagaaatgccacggtgatcggcattttgtaaaaatctcccatgatgatagaggcgatcaggtagatacttaaaaatatgatcaagggagttagtgcccaaaagtttggtttagtttcttgttgcatagcttagaaaacttgttttacaatttcctgaatattttccgatttccccatcgtgtagtaatgaacggcgggaaccccgtgtgcgatgagttctttactctgtgccacgcaccattctataccgacttggttgatctccttgttatttttgcatgaacgaatctctttaaccagttcgtgtgggatgtctatactgaatgtacgtgggagcatttccagatgtttgaatgttgatatgggttttaatcccggtacgataggtacggtaattccttgcgcccggcatttatcgacaaactggaaaaatttggagttatcgaaaaacatctgggtgacgatataattcgctcccgcatcgactttctttttcaggttctcgatgtcacaggcttggttgggtgcctcgtaatgtttttccgggtatccggcaaccccgatgcagaagttcgtgggaacggcatctgtcagcgtgtcatccaagtattggccgtggttcatgcgagtgatttgttctaccagttcacaactatattggtgtccgccttcttcgggagtaaagaaacgttctcccggtatgggatcaccccggagtgccatcacgttttcaatgtcaaggaaattcaagtctatgagttcgttttcgatcttatggcgggtggctcccccgcacacgatatgaggaaccatgtccacgttgtaccgtctcatgatggctgcggccagtgccacggaaccggggcgttttgtcacggtaacttttttgatcgttccgtccgggtattcacgatataccacttcatcccggtgaaaggtaatgttaatgaatgggggagcaagggcaatcaagggttcgatggcctcgtatattttattgatgtctccgccttttagtggcggtaccagctcgaaagagaataccgctttgtctgtattgttgagtatgtcgatgactttcataattttagatttttagattccaatagtttatctattttagagttcaaactcctccgtcacttcgtgccacctcctctataaacagaggaggagttggtgactcttcccgaaaacagggagtattccagctctccctctgtttatagagggagtaccccgaaggggggagggagtttgttacttttatcttattttagagtcttatacgctaaaatattttgctttaggatgagaaatcagcataccacacaggcttgtcgagggatagatggaatacccctcggtgaggcgtaccccgatctgggcaggagcatccaagatgtcaaaggccaatttcttcatcgcatgatccgggcaagtcgggtaaccgaaagcgggacggatgatgtgagttccttcattgacttgttcctgcatccattccgcgcaggcttctgccaaccgggcacagagacttcctcgtaacaaatgttcaaaattacggcaatcgttgcattggtgatcatcctgtactttcaagcagaatagtcccacgctgccgattcctttttctttcgggatgacaaaatcagccagtgaaagacactcttccaagtccgcttgttgccggggcatcgtgaatcgatattgaccatccagaacgatgtcttcatactccgaataggcatcaaagaaacggacaatgatggaaacgtcaaattcatttccggcgatcactttacccagcatatccagtgctgcctggtaagtatggtccgcctcgtcgttcgtgtaaatgatttcagggtatatccctttgaatccccagaaatggaaaaatggtgtccagtcgattctttccactaaatcttcgagattcaagcgttttaccagtagattgtgttctccgaaagttgtgggctccacgtgatcccaatcgtatcgaggggctctccggcgagcctcttcgagtgatatttgtttttgttgatgttgattgtacaaaattcgaatgttttcttgttcaacttttatttcacgaatataatttttccggtcattcagtaaacgcttgatgattcccacggtccgggatgcgtcaccgcctgacacgacgcaataatcgtatttaggtgccagtttaacggccgtatgcacggttgaggtcgtagccccgccaacaagtaggggaacttgtaattgttctttttgcaacagttcgcacaggttttccatttcccccagagagggcgtgatcaaaccgctgactccgataatatctgcctcgtgttctttggcagccttaacaatactctgattgtcaaccatgacaccaaggtcgattacatccagattattacaggtcagaacaatattcacgatatttttaccgatgtcgtgtacgtctcctttcaccgtggcaatcacgacacgggggcggcgggttacgtttttgcccgatgcgttgtgacgttcgatttccggttgcaggatgtgtacggcttctttcataaccttggctgatttcacgacctgtggcaagaacatttttccttccccgaagaattgtccgacccgttccattcctttcattaaaggttcttctatgatctcgaccgggctggcataatgcgcgagtgcctcttgaaggtcttccgtcagataatccgtgattcccttgattagagcgtgtccgagacgttcttccaggggacggttccgccattcttcctgttgcactgtttttacttctcctttcgtttccttgtatttttcggcaagagagattagggtttccgttgcttcaggtgtacggtttagtacgacgtcttccacggctttcagcaatatcgggtcgatctcgtcatatacctgtaatatggcaggattcacgatcgccatgtccaaccctgcacgaatggcatggtacaagaaaacggagtgcatggcttcccgcaccgtgttgtttccccggaacgagaatgacaggttggagacaccaccggatgtgcggcatcctttcaagttttgtttaatccagcgtaccgcttcgatatagtccacggcatagttgttgtgttcctcgattccggttccgatggctagtatgttcacatcgaagataatgttttcaggagtaaatccagcttgcgtggtcaacaagtcgtaagctctttggcaaatgtctattttacgttggtatgtcgtggcttggccttcttcgtcaaatgccatcacgaccacggctgcccccagacgttgaatttctttggctttgtaaaggaagtctttttccccttctttcaagctgatcgagtttacaatacattttccttgcgtgttttttaacccggcaaggatggtttcccacttggaagaatctatcatgaaagccgctttggcaatatccggttcgttgctgatgattcgcacgaaacgttccatctcggccgtgccgtccaacatggcatcatccatgttgatgtcgatgatagacgctcctgcctcgatctgtttccgggcgatcgtggcagcctccgtgtaattcttttcccggataagacgggcaaatttagcggagcctgccacgtttgtacgttcgccgatattgataaaattgtttaattccttatccaccacgacggtatcgagaccactcacttttagttggtggttggatgtcgggacttttctaggggggatgtctttcaaggcgtttgcgattgcccggatgtgttccggtgtcgttccgcaacatcctccggcaatattgatcaatccctcttttgccatgttctggagacaaagagcggtaaatttcggagattcgtcgtattctcccatttcattcggtagtcctgcgttcgggtatatactgatgtaacacgggatgcgtggagccagttcccgtaggaaatggtgtaactctttcgccccgaatgaacagttcaggccaaagctgagaatcgggtagtgggagagactcgtgaacagggcctccagtgattgtccggtcagtgtacgtccgcttttgtcgtttaccgtggcggaaagcatcacgggaagatgcgtacctttctcttcctgtacttttgcgatagcgtaaagggcggcttttgcgttcagcccgtcgtagatggtttcaaccagcaacaaatctacgccgccttctattaatgccgttacctgactggcgtatgcattggccagcgtatcgaaatccacgattcggtaagtcggttgatcgggatcaggggtgagggtcagggatttatcggttggtccgatacttcctgccacgtaaactttccgttctttacaagcggctgcggtttcttttgccagacgggcgccttccaagttaaagcgttccacccattccgtacaaccgtattcggtttgtgaaatagcattggcattgaaggtgttggtttcgataatatcggctcccgcatcaatatagttttgatgtacctgacgaatcacgtccgggcgggtaatattcagcacatcgttgtttccctttagggggatcgggtggtgtgcgaattccttgcctcggaaatcggtttccgtcaaccggaattgctgcaaagctgttccggtggctccatccagtatgtatatgcgatcttgtaggttcatttttgtaatttagaatttaaagtttagaatgaaagagttttaaatcaaaaatgccgtgaattccgattttgtcatccttgatacagatggcggcaaggatgtctttcgtcttcccgatcttttcgatgcaaggggcgatgtcgtctgttgttttgatttcgttggcaaaagccgtggcatacgtgtcggctaaagcacaatttttacaaataatcatgacggcatccgctttcccgaaacttaaagagggacccacggttccggatgaagtacaaattcctaggggggcgtggtcagcccagagggtgaaacccactttttccgacaggggagagggcccggcaaacacggcaatatctatgttttcttgtatgtccgcgtagatgtctccgccattttccacgatgatttcccgcaccccgtacttttctttgatctcttgaccaattcggctggcaacagccccggcaaccgcactcatcggaccgattccggattttctggccacctcagacatctcttgaaaaatggttggggctcccggttgtgcctcgtaggaaacgagtgacgtggcgtaatccggatcattttgcaggtaagcatccatgtattcccgtaatgttcggattcgggattccgtgaatgtaggtatgctttcttggaaagatgcttgatctattccgatccacaggtctgtctctttgtaagcaaccgtgaaagaataccagcgctctttctgcaaatgctcccgatatgtgcgatttttgtactcgatcataaccgaattaatttatgatttcaattttcaattctccattttccattttcaattgtctagcagctttccggattactgaattcaatcttgaaaagtttcaacgggcaagcttttaaacatagtttgcaggcgatacatttttcgggattgaattgtagtttccagtcgggagcctcgatcgtcaaggcgtgggagaaacaggccgaggcacagtttccgcaattgatacagcgggattcgtcgtaagaaatcttgctggatacagggcttacggttaccccgttatcattcaggaaggcgatagcctgttctattctcaagggatccgcatccatttcgatcaagagtgatccggtttttccgggttgtatctctgcctttaggatatttacttttacatcatagatacgaattaagtcgtatgtcaagggtctatctgttgcgtcaaccgggaaggttaatattacttttttagtcatagccgctattaattttagattttactaattatttgattctgtgatttccgattagatgattataaaatcacgtaatcgttgaatcggcaagcacttaatcttttttcaattctccattttcaatttcttggagtccttttagagaagtgcctgttggcatggggcgaacgggttccgtgagcaggaagtctcctttctgaatccatgactttaaaatctcggcaatttgccgggcttttgacaagctggcaacaggagccgttttgattttatggccattgacctcgatctctccactttgtagggcggcgtaatttgttttacctaaaatcttattcccgtctccgtaatcgacaaccgtggtttctatttgttcatttcggatagatactctgcgggcaaggtcttcatccagaatcgggatggggatgccgatgccgacaaacatgcttaccccgtatttttcgtaataaactcctcttaaaaattccgtactcatgttttttaagtcaccgattacggcaatcgtgcgggcattgctggtgggtattccgtgttcgttcgtttctttcgtggagtggaattgtgttccgttccaagtgacgtatccttctgtcccgcagaggaaaatacgagttcctaaaccgatcgtacgacattccggatcgttcaacaggggagataattctccggccgtgctgtaagaggcatttcgcaattttggcaacaaggttcccatgtacgtgtatttaattttatccgtggagttagtagccacgttataattctggtaggcatttctggggttgtacaggatggcctcgttaatcgtatctttggtgatcaccgttttgatatgtttccggggataacaatccgtaccttttccccaggcctccagcgtgatttctttacctacaatcaggtcttctatgatatgggcacccccgtaactgggattttccgggttgcaatcagtggcacccacgtaagtgtccacggcggctagtccaccactgacacgaatgccgttcaactcgattttttccatgcgaatcgggggattagcgtgtccgaagtttaggaatgccccggaggaacacattgccccgaaagtggccgtggtcacgacatccactttctccgcaatctctttcggggagagcgtttttgccagttctgatacctcttcggccgtcaacacgacagccgtaccttttttgattttatcgtttatttctgcgtatgttttagccatgatcttgtacaattttttaatggataaattgtttgttggtgattttttatctgttagctgccttgcaactaattgatttctatggatgatttgatggtatgcaatgacacgttttcacacggtttatccttgaaaccgattcataaaatcctgaaaattaccgtgtaatttcccaatcaaaaatctgaaattaaaaaaatctaaaataaaaagtccggggtataaaaaatattagcgcatgcagcgcatacgcatagacatggcgatagaatgaatgaaaagaatgctacaatttgtagtgcaataaatgctgttttgttttgttgtttctgttttcattttctttcagcttaaattataactcctggttctcaggtcgggttttggcaccttgcaagtggtcttgcaggttgtcggagtttccatgagcccgttctctcgactcctctttataattcaaacaatcctcgcagattgaattgattgggacaaagaaaaacagaataaatgaataatgcaagtatttggcgggattttttcagccgatcgaatatttacgtccgtgtagtttcctaaaatcgagtaaaccgattttagaaaactacattagaaataaggtaggattagataatcttgaatcctagggttaagttccatgatttgggagcttttatatcgtccccgaatttctttaatccgaattcgtagtcaatgtcgaaagttactttccaaacgtcaactccggctccgattttcccgttccacatcattttatccgtgttgaagtccttttttaaatccttggtcacgaaggaagcaacgggacccgcaaatccacgcaatttgaatacggggagtttaaggatgttatatccaaccataacaggaatgtcgatggagctgtatttgaatttcccgatggaaccgatttcgccattaattttactttctttgtgagcaaagttcaaggcgggttcaagataaatacttcccagattgatacgggcgaaagctccaatcatatatcccccgtgggaatctactttcaagtgttttgcactgattttcgtatcattccatcccgcatgtataccaaaattaattgggagtgattgggccattgttgcaaggccgataaggctgaataatgccaatactacaattttcttcatactgttctttttgttttaaataattgatttatctatttaattatattc

SEQ ID NO: 49 - DNA, 14843 bp, Butyricimonas faecihominis
atataataattgtatactatggggaaatctaatttagttcgttttgattgggctgccaaacgattattgagaaacaagtctaattttgtggtactggaaggttttttatccgtgcttttagaggataagatccgtatcgagcgaattttggaaagtgaaggtaaccagcaaaagtttgatgacaagtttaatcgggttgatatgcttgctgaaaattcgaagggagagttggttattattgaggttcaaaataatcgggaactggattactttcaccggatgttgtatggcacttctaaagcgattacagaatacataaatcagggagacccttatgctaacgtgaagaaagtgtattctgtcaatattgtttattttgatttaggccaaggagatgattatgtgtatcatgggcatacggagtttcggggtgttcatacgaaagatgtgttacggttatctgttcaacaacaggagcaatttgtttgtcatgatgcgggagatttgttcccggaatattacgtgttacgggtagatgaatttgataagttggccaaaactcctttggatgaatggatattgtttttgaagacgggtgagattgcggagaatgtgacggcaagtggtttgcgggaggcaagggaacgtttgcgggtagataagttgagtgatgcggaacagaaagagtacgagcgtcacatggaagcattacgttatcagcgtagtgttattcaaacaggatggattgaagggaaagcagaaggaaaagccgagggaataaaggagggaaagatagagggaatgaaagagggaatgaaagagggtaaggttgaggtagctcgttccttgaaacagatggggttatctgttgagaagattgcaatagccacggggttgtctattgatgatattgaacatttggaatgacggaatatatttgaataataaaaagcacttgaacgttatttggtttcaagtgtttttttccataaaaagtttacctttgataggtaaaatgctaagaaactaaataatgacaaataatgcgtatgtggccgaacaggctactcttttcccttttaccccgccgaaacattcggatagtttgtgtattcccgtacagacgtgggaatttttatgtcacacgctctatttaaagcggtatccttttttactcggtccgaaaggatgtgggaagtcttccattgctaaggaattggcggatgccatggggatggagtattttgctttcgatatggggcaggcttttaagccgaaaaagatgttcgtgggaggattgattatcggggatgacgggaaaacgaaagcggtacgttcggagttttttaaggcttttgtgtcgactaaaccaacgttaatattcttagatgagttgacacgtaccccgatggtggcggcgaatttcctgatgactatcttggatcgtcaacaatcgtatatctatgatgaggattctgggaaacgctataataaaggcggaaatgtgcttttcgtggcagcaggtaacgtgggatttgcctatgtttccacgcagcgtttggatacagcctttgaagatcggtttatcaaagttcggttaaattacttgaccacggcagaagaggctgcattgattcaggctcggttcccgaaggtgtctcgtgatgcggctactcaattggccaaggtcgccgaggtgttacgtttggccgaacagaaagaaacgctatccgtttcactttcgactcgtcaggtgctggatgcggcggcttatatcccgttagggtacaggctggatgaggtgatcgagcgggtgattctcacaaactacgtgattacaggggaagagacagtggctcgttccttaatacagaccctttgaacgtgcggtcatggattatcgacggatagaagagatatatgacgaacagtttatcgaccgggattggtggggaaattttcccatggctcgaaatttactggatcgggatttgggaaccacggatttattgaaattggtcccggtatgtgcgaggatcgcttttcatgtcacgggggagattcctaaaatggtactttccaatcgggttcctagtttgtcgatgaatcccaaacatatagccctgaatttaaaattgttgcgattgggcgtgtcggacgagacaagagtatttgtctttttcgggtatttcgttcacgagttggcacatctgatttacacgggaaaagatattgcagagttgagtgacgatgaattgcgctacacaccaatgcattatgatatgattcattttattgaggatcggcgagtggagtcgaaactcgtaaaggattttcccggttatcactattatttgtatgcggctcgtaagttggggttggcgatgggattgaatgccgtggaacattatatgggattttatggtggacagagtgaagatggtgtacatcggggaatggacggttccgaggctttgtatgattatatctgttctaaaatattgtacccgaatcttctggacgagagtaattatatgcgggaagtattgtcttttcccggtaatgacgggaaagtacggcaagtgaatgcgatcttgaaatcgatcaaggattatggggaattgacttacaaggaggttgtttggtatgcgggaatgttgaccgagttgtttcaagaaaaggagatatgtccggatcatttctttttacaggagatgaagaaggcgatgaaggggatcgaggatttcaagacggataagcagattaaaatggctgaatccgttattcgtgatttgcggaaaacgttgaatcaagagcctgtcttttcgacccagttatacgtgagtccggaacggtcaaagctggaatggaaggggacattgggtgtttgtgaccgtatcgaggagttcgaggctgatgtagccgaaatttcggatgatttattgaaccgggcaaaggaactggcggccaaaatacagttgagtctagccatgttctccggaaaaatggatcgagcccgggtgatctacgagcaggattccggggaattggatgaggatgaattgtatcaatcccgatataaccggaatatattttttgaggaagtaatggctccttcggctattttggaagtggttatccttttggatttgtccggttcgatgtgtacgggagacaagatttccacgcaaattgtgatctcttctgcgttagccttggctttcaacaagtatccgaacgtggtgtattactcgatatacgggcatcgctgtggagatgagggcatcgagattattcgtttccacgatcggggcgaaaaactgcaactggggaagctgttctctcaacaagcgttaaatgccaatgctgacgggtatgccatgctgtattgttttgataagttcaagtcggatgccaagaataaattgttcttcatgatttccgacggggctccctcagccacggggtatgacggggaggatgcccgtgaacacgtgtgggaggtcgtgcgggaaggaaagaagagaggaatcgaggttctgtccgtggggattgataatttcgaacaggcggatatgtatgaagagtttattccttattccggtccggagatcacaacgaaaatctctcagtggattcgtaagaaattcatgtcgatagcggatgataattcattttaacgataataaaaaaacagcatcaaaaccgatgctgttttttcatttcttattataatcctaatttcttacgtattgctttcggaatagcatctttgtgaaccatgattgccacggtctgcaagcgacagaatggttcggacatataaagataaccaccgaacgggttacgatcttctccccaagaatttttggtcttataatagatcgttccgttctgatcctttagcattccggtgatgtgcatcaagtgatcatctgttgtctggcggttgttaaaagtaaattgacgtttgttgtcatctactctcatttccggtacgggagattcgaaagactgcattttacgttcccgatcttttgcgctaagtgtggtccacttgtcgatctcggcattgatcatttcctccgggttattggtcgggagaatggccaacccgttcggatggctgaaaccgttgtggcttacgtctccatcccagcatacggagtacccgtttttcaaggcgttattcatcacttccattaactcgtcaatcggtagattgtagtaacgggcgtgcatccagttatcgggaatcgtgagttccacctcttcgtagaaagggtacatttggaaagaagtcaattccacgtaatcatttaaatttagatctagggatgccgcaaaactttgcggggtatactccttgccctcgtaagtgaatgtttccggggtgtcacccagataagcctcgatatatctcatgaaaccttttgtccacacgggtgtaatttgtcggttcggatttttgttcacggcgtcaaggattccttgcaaagcagccaccatttctgcatgaatgtggaaatctcgtccgtattgtaatccggtatatacttcttccggaacaattccgtattttttgatcatatctattacgtcatgagcttgtcctccctcgctgaagtttgtcttcccgtggaattgaacgtaacgtaatcctttctcgaagtaggcatttttagccacgtaaagttctgcgagatcatagacaggtttgcctttacgcagtaattcggattctaagaatgagagagttgcgtagtcccagcatgttcccacgctttgttgattcttcaccggggtcgttttcaagtcaacgactgttgtaaagttgtagccggaacgaggtccgcctttttgtgcaaacacggccgtgctgatagaaacaagcaggatgaccatgcataagaacgaatgttttatcatatctgattaattttggtatttttactttggtggcgaagttaattaaaattttgcatacactaaaaataatcttttaccggcaaaacgaatgctttgtagcggataatctatatctttaccttgtttttgtggacgtggggagaaatatacttaaatataaattactttattcatgaaaaagagcgttatattacttttgagtgttaccgcattagtaacgtcttgtaaggatggagctaagcaggtaaacaacccattaatgcagaagtttgaaaccccgtttcaagctccgccttttgataagataaaaccggcggattacaagccggctttcgaggaaggtatgaaacaacacaaggcagaaattgaggctatcgtgaataacccggaagaaccgactttcgagaacacgatcgtggctcttgataaagccggggagttgctgaatcagacctcatcgatattctttaacctgtacgaggcgatgaagaatgatgaaatgcaacaattagccatggaaatcagtcctgccgtaacagcccacggggatgagattaacatgaatcctaaattgtttgctcggatcaaggcattgtacgacaaacgggagactttgggattggatgctctggctttgcgtacgttggaactgtattacaatgatttcgtgcgtggtggtgcgaatctgaatgatgccgataaggctaagatgatgcagattaatggtgagttggctaaattgagtttacaatatggtgataacctattgaaagagacaaatgctttcacgttggttgttgataacgagaaagacttggccggacttccggaaacttctattgccgccgctgcggccgaggctaaagaccggggcatggaaggtaaatgggttttcacggttcaaaaaccaagtatgattcctttcctgacgtatgcccaaaatcgtgatttgcgggagaagttatacaagggatattatatgcgcgggaataatgacaatgctaatgacaacaaggccgtgttagctaaaatggtgaacttgagaacggaaaaagctaaattgttgggatttgacacttatgccgcttacgtggtagatgtgaacatggccaaaaccccgaaggctatctatgatttcatgggacgtgtgtgggaaccagcattgaaagttgccaaacaggaattggctgaaatgcaagctattgccacgaaagaggggatgacgtctaaactggaaagttgggattggtggtattacgcggagaaattgcggaaacagaaatatgatctggacgaatccgagatggctccttatctgaaattggaaaacgtgcgggatggaatgtttgcggttgccaataaattatatggaatcaccatgcataaaagaacggatattccgttatatcacccgcaagtggaaacttacgaggtgaaagatgttgacggaacttctctcggaattttgtatttggattattacactcgtgccagcaagtcagcaggagcatggatgaccgaattccgtcactacacgaaagtgaacggacaggaagaaatgccattagtttctgtggtttataatttctctccggccgtgggggatgctcccgttttgttgagttgggatgacacggaaacgatgttccatgaattcggacacgccttgcacggattctttactcgtggcgattaccagcggattgcgggtacgattcctcacgatatggtagagttaccgtcgcaggtgatggagaattgggcgagtgaaccggaagtgttgaaaatgtatgcaaaacattaccagactggcgagactatgccggacgcgttaatccagaagattcaggagagcggacattttaatcagggatttgcgacggtagaatacgtggcagcggctttactggatatggattggtactctaatacagaagtgaaagattttgacgtgaacgctttcgagaaagcctctatggataaatacggtttgatcaaagagatattacctcgctatcgttccacgtatttctctcatatttttgatggcggttacagtgccggatattacgtgtatctctgggccgaagtgttggacgctgacgctttccaagctttcaaatcttctggggatatttataacaaagagttggcagccaagtttagaaaatatgttctgtcagaaggcggatatgctgaccctatgcagcagtatatcaaattccgtggtcaggagccatcggaagatcctttgttgcataagagaggattgaaataacaggaaagtccgtaaagttcgtaaggtttataaagtttataaggtctgtaaagtttgtgaatccttgtggatgatttgttcatgatggcattgttgccaataaatagtctgaaggataccaaaaacttttgactttatgaactttacggactttataaactaattacgatgtgtgtgcgtgtatttgttcttttgctttgtttattatctgtacagggtggaagactgtttgccgtggtacggggaattgattcattggctcggaatgaaaaatgtgctgttgtaacaggagtcgtgtatgatgtacaaggcgaggcgatagccggggtcaatattattgaaaaaggaacgatgaacggggtaactaccgatcgagaagggaaattctcgcttgaggtagatttgcatggaacgttgatcgtctcttttgttggctatcgaacccagatcatcccgattgacgggagaaccgatttagtgatcacgttggagcatgattatattcttttggatgacgtgatcgtgacggcattgggattgcaaaagaaagaatcggccttgtcttacgccgctgttcaggtgaacaagaatgagttagtccgggtgaaagatccgaacatgatcgtggcgttgatgggaaaagtggccggaatgcaagtgaaccggagttcttcgggaatgggtggctcagtgaaagtcgtgatgcggggaagtcgatccgtggctgggaataatcaaccgttgtacgtgattgacggggtaccgatgttgaacgaaagcagtgaacaaccttacacggctatcgggggaacggctgatgcgggaaatcgggatgccggagatggaatttctaatttgaacccggaagatgtagagagtatcagcatcttgaaaggggccccggccgcggccctttacgggacacaggctgccaacggggttattttgattaccacgaagaaaggatcggtcgggaaacaagaggtttcttttacttccagcgtggtttttgataaggcgatgatgttaccgaagttgcagaatcattacgggatgagcgatgaaatcgagagttggggagagcgagagaatatagccacgggtaacccgataccctctttttttcggacgggagtaacagcgattcactctttgtccttcatgacagggaatgagcgagtacaaacttatttctcgtatgctaataccacggggaaagggattctggagaatcataagttgtcaaaacacaatattaacttgcgggaaacggcgacattttacgagggacgtttgaaaatagacgggaatgtgaatctattgagtcagcacgtgaaaaatcgtcctgttccgggaggattctacatgaacccattagttggtctgtatcgtttcccccggggaatggatataaccgaatataaagaacattttgaagtatggaatgaagaacggcatttgaacgtgcagaattggcatgccccgacagaggatttcgagcagaatccatattggatacaggagcgaatcacgagccgggatcaacgaatacgggctattgtttccctcgcattgaacttgaaaattacaaattgtttttcagttcaggcccgtggaaacgtggattacgtgaacgataaattccgtcaaaaatattatgcctcgacggcccccgcgctggcaggagataacgggcgttatatagattccgggaacgaacaggtgcaaacgtacggggatgtgattggaacttataaaggaaagtttaatgacttttcgctggatgtatctttaggggccagtattaaccggaaaaaagtcaatgaacttcgatacgattcgaagaccgcctctttgaaattcgctaacgtgtttaatatagcgaacataaacatgaatacatctgcctatatttcagagcagattgatgccgtccgggagatgcagtcattgtttgtcacggcacaagtagggtttcgagattatctatttctggatgtttcagcccggaatgactggagttctactttagcgtacacgaccagggaatcgagaggctttttctatccgtccgttggtttttcttggttggtgaaccgggtgctgaaattacccgaacaggtgacgagtggtaaggtgcgggccacgtggagtaaggtgggaaatgacattcccttgtatatcacgaatcccgtggctcacgttctggccggtgggggaatacaggcatcggatgcggctccttttgaagagatgaaaccggagatgagcttgtcaatggaggtgggaacggaatggaaattctttggctctcgcctgcacgttgactttacctattatcagacgcataccaagaatcagtttttcaaattaccggcaaaagatggcgacgagtatgcctatcgttacgtgaatgctggaaatattcagaatacaggtgtcgagctgatgattgagggtactccggttgagattaaaaatttcagttggaaaacaggaataaattacgctttcaacaagaataaagtggttcgtttgcacgccgagttacccgtgtttcaatacgggccttatggtttttcatccagttacgcaatgaaattgaagaaaggaggggctttcggggatatatacggtaaggcattcaagcgggatgcagacgggaaaattctttacgagacggatggagaacatcagggattgccgatgattgaaggagatgggaacacggtgaaagtgggaaatgctaatccggatttcacgttgggatggacgaacactttctcttggaagggattggtgttgagcttgctgatagatggtcggtacgggggtaaagtgttgtcgcagacacaggccgacatggatatgtacggggtgacaaaagttactggggatgcacgggacagggggtacgtgatgctggaaggagagaagattactaacgtgaaagggttctacaagtctatcgtcgggggacgttccggggtgacggaatattatatgtatgatgccactaatttccgtttgcgggagttggctttgggctataccttcccgaagcgctggatggaggcaacgaagtttttccgggatgttcaactggcttttattgcccgaaatttattttttatatacaagaaagcgccttttgacccggatctgattctttccacggggaatgataaccaagcgatagaagtgtacgggatgcccaccacgagaagtatgggattcagtttacgtgtcatgttttaattggaagaaagaatgagaggtttaatctacatgataatggggttgatgttcgtctcttgcacgggacgtttcaaggacttgaacacggataatacgggaatcacggatgaggatatgcaagtcgatctgaatcacctgggcataccgttaaacgtgattcagcaagggatttattttaactatgattacgggaaggggaagaattggccttatcagttgatgcagaatctgagtgccgatatgtttagcgggtacatgcacgattacaaacctctaaacggtggaagtcataactccgattataacctgcaagacgggtggaacgggacgttgtgggagaatacctacgcttacatcatgccccagattaaacgactggaggattctacccggttaaaataccctgccgtctatgctgtcactgaaatattgaaagtggaagtgatgcatcgggtctctgattattatggtcctgtcatttacacgagtttcggaaataaaaaaatgatatacctgccggattcgcaacaggatgtttattatcgttttctggatgatttgaaaacggcggtggggatattggaaaatcacgtgaatttagctggctacacacctgaattttcccgtttcgacttgttgttggatggtaaggtcgaatcgtggattcggtttgccaactcgttgcgtttgcgtctggcaatccggatggcaatggccaatccggatagagcccggcaagagttcgtggacgctttcgctgatccccacggtttttttgaagaacccacgcaacaggtggccgtgacgacagacaatgaatatactaacccgttgggcgagattaaccgggtgtggggcgaggtgtacatgaatgcgtccatggaatctattctgaatggttttgatgatccccggcgagaggcttttttcgaaccttgtcccgatgatgttcttttgcaggatcgagatggacgggattcggttcgtatccccttgaaagggcagtatcggggaatccgtcaaggaaccatgtttgctcacacgctttattccgctttgtcgaaaatatacgtgaatgtccggacgaaaccgattctgatgacggctgccgaggtctggttcctgcgggcggaagccgctttgcggggatggacgacggaggaccccggaatttgttacgaacagggcatccggtgttcattctcccagtggcaggtgcccggtgtggaaacttatttacagagtgattgtcgggcgactgatttcgaggatgcctttacccccgggaataatatcaaggctcgttgtttggttactccccgttgggatgatgccgcctctgacgagatgaaactggaacggattatcacgcaaaaatggctggcagttttcccggaaggttgcgaggcatgggcagaacaacgaaggacaggttatccgagattattccccgtacggtataacaatagtcgtaacgggtgtgttgacatggaaaagatgattcgtcgtctgaattatccctcttctattcttgataatgataacgggcaatacgagatgttggtcgatgccttgggaggtccggatcatgccggaactcctttgtggtgggatactggacggaatttttaggcaccttgtttattgcggcaagagaaaaagatataaaattttaggctataaaatcgaaactttatcaagttcttttcgtttctataggtgttgaaaacgaaataaaaacgaacttttaaatatttatagttatgatgaaaggaaatatcggtttagatgctgcaatgattaaatccagcaaaaccattttgaataacctgttggctgatcattttgttttactcgctaaaacttggaattaccactggaatatgaagggcccgagtttcaggtcttatcacacttttttggaagatctttataacggcttgattgaagatatagatagcattgccgagcgtgttcgtgatttggacgaacgtcctatcggttctttgaagggatgtttggagcataatcgtatcaaagaacatgatgatgaaaaaccgcttcccgatgcaaagggtatgctggcagctttgctggacgataatgccgaggtgattcgacaaattcgtaccgatttggaaaccatggagaaagaaggatcaaaggacttcgggacatccaatttcttggaggatatgatcgagaagaaagaaaaagtaacttggatgatccgggctcatttggaataaggatagatttttttgttattagtgaatggaaagggattgctgtgatggtgatcccttttgttgtgtgtataataatattctaatccgatgtttttgtatcttcgtggcgaataattacacgagatggaagatagagagattagcgacatattgattcgttggtacgaggagaataaacgggacttaccgtggcgaaggacttccgatccttacctgatctggatttcggaaatcatacttcaacaaactagggtggtacaaggattggagtactttaaccgattcacggagcgatttcccgacgtggcggctcttgcccgggcggatgaggacgaggtgatgaagtactggcaagggttggggtattatagccgggctaggaacctgcatgcggcagcccggcagatcatgaatgatttcagtggtgtttttccccgtacacgtgaagaagtgctttcgttgaaaggaattggtgattacacggcggcggctatttgttcttttgcctaccggttaccctatgcaaccgtggatggaaatgtattccgggtattggcccggttgtttgatatagatttacccattgacgggggagaggggaagaaatattttacggcattggctcaatctctgttggatgaacgtcgtccggatttgttcaaccaggcaatgatggagttcggggcattgcaatgtgtacccaaatcaccagattgtgagcattgtcctctaaatgggaagtgcctgggattagccgcccggcaagtggagcgattacccgtgaaaagtgggaagaccgtggtgaaaccccgttattttaattatttgtatatacatgggcaaggtatgacccttttatttaagcgaacggggaatgatatttggcgtaatctctacgagttcccgttaatcgaaacggaacgtgcggttacgtgggaggaattgtccgggatggctgtttttcaagagttatttgatggtatcgaaaaggttgaaattatccgggagtatgtggcaaagaaacacgttttgtctcatcgggtgatataccctgtattttatgaaatccgggtcgattcgttttcagagagtatggaaaaatatttgaaagtgcctgatgatcgggtgggagaatatgccgtttcccgattaattcagtcatatcttgaagtgcgagatggtttgttgttttaagaaataaaagttcattgtttgtcgatcgctgttgaaaaaagtttatttttgcactaatgcgaaaaagtgatcgagatatattggatgtgttcgtgaagaaccgtaaggaaggagttcggatgttgtttgatcgatattatcgtcctctcgtgctgtatgcgggaagtttgattgatgatgatacgatggcagaagatctcgttcaggaatttttcgtgcgtttatgggaagatgattatctgaagcatattgaggaaaaggctcttagttcttatcttttttcttctgttcgcaatagttgttacacttacacgcacaagaaggatgtgttgcgtagacgggtggattacacggctattgacgtggccgcagacacggccacggtgctgaatcaggaaattgtggatcgggtgacgactgttatcgctcggatgccggagcaaacgaggaaagtggtggattgcgttctgatgcgggatatgaaatatcaggatgcggccaacgagttacaggtgtctctaaacacggtgaaaacgttgttacgtaatggaatgcgtatattgcgggaagaattaaagggagatgaagaattgattctgttacttatcctatccaagagcttgggagattaaccccttgctattctctgatgtattatgtttggtttattgttacgtgtttatagatcacttaggtggtaatgtcaggtctgtttaatttgtatgatgtctgttaaaatggcggctataagtgggcgataaggcggcgacaaggcggcgatagcgcccaacagtcaggcaacggtcaggtaacagtcactcaaaattagagagaatggtaggagttatcgttttttaagtttattttttcgaaaaaaatgtgcctccattcacccgttttgatttttatttagtcctacttgtaaaaaataagaa

SEQ ID NO: 50 - DNA, 14777 bp, Butyricimonas faecihominis
caaatatagtcaattcaaaagacagaaacaattctaatttgaaagatctgccacttccctggcatttttgggccacatggccaaatctcaaaaatcactactataaataggtgatgcccattctggaatcatttctacatactgttttacaagtcgtcctttagctaaccgaaataatagcattgcctctttattctctatagagttatcgtatatataagttctatcaaccaatttagaaactaaacaacaattagatatcgatttttgataccttgaaatgatttttgaaatgggaacatcatgtcctccttccattacccgaccagcaattcgtgctgcattaattgtaggcgatacggtacaaacaaaaaataaacgaacaaaaaaaccggcttctatagctctacagatataatcgattttatcttcaacagaaagaactgtttcaaaaataagactcttacgctccattaaacaagcttcccttaattcttcacaaaacttcacagctttcattatcgcatccttagaattccaatctccaaacttttcttgagcaataatatccggatttatataaatagaatcctccatccattcatgatgaagaatctttgacgtaacagaggttttaccagaaccattaggaccagctattacaataagcaccggtttatgaaaatcattcattactaaaacttacattatattctttcccccattttgcccgttgcttacggatatactctcttatttcctgaaaaaactttttatgcgcttcttccgatttacgttttgcttcttcagcaacttctttcatcaaagtagtaagcatttcatcagttggttcttccaaactggttaaacgataagaattcatctctttttcagacataaccaaaatatttattacaaatatagtcaattcaaaagacataagcaattcttatttaaaagatcagaaacatcaagccaacattttacaacttacatgccggaccccttctccaatcttctctccccgtccggcatgtaaaatcaccatctcatcaatctaaagttttcccatttcaaccattaaccgtttactattcgacgctttcctcttatccttcgacaacatgaaagcatacacctccagattctccttcacccatccgtcgtccaagccaatcgtcgtcacgccattctcctgacggttccggcaaggttccacgatcatttggtttcccgttttctcgtaaaccaccacgtacaacacgtccgtcgggttcgccaccaccgaccagcgactttgcgcctcctgggtaatcgttatcatatcctgatcctcgttcaacgacacggtcagtgttccatcctgcaggctcccctcggcacacacgatcttctcgtagtcaatcgtcggacgatactcctcgtcaaccgtaacggccttcatattcgctttcacgaaggcattataaaacgtacttcccgcttttcttcccgggaaaccgagttctgccgccggggcaaaatacagcgaagccacctgcaatgctttcatcttcgctcgttgcgtcaactgcccgggagttctgggattacgcatcgtgcttctcttccctcgggcaatactatacccgtttgcccccgcgtacatcgtgatgtttgccactgattttctcacttctcccaatacaaatgatttaaataaagccataatcttaaaatttaaaatgaaacatataaattacaatactaaatgcacgttttctgaaaaatcacacctgtttaccgaaccaaagaaacaatacaagtgaatcctctttcctcgctcttccgtgagttcaatctccgcactctcatcccgacgaacactcccgatcgcctcgggagtcacaatccgaaacctcatgtcttccatcatcaccacgcaccacaactcgtcccctaaacgctcttcccgtaccacgtattcattcttccacgtcaggcgaaccttatcgccctcccggcatccctgcaactcactcggtaaaaacaagttcccggcactgaaatgcacgagatcatacagcaacccctccccgttaaacgcccgcatgttagcctgcaggaaaagattatatcccgaacgacgctccaccactcccaacatctgccagatccgggccaaccatgtctgccggatcaccccgtaaaaagtcgccgtcttcctcatcctctcccggtaatacaattgcaactccgaacgacaatccttcacctctcccggggcagctctcgcgtaaagatgatcccccacctgatagtaaataacacgtcccacccgccccgataaacgattaaacaaatttgaataacaacaagccatacttacctccttttttcattactaaaacttcaacctttttcttaactcatcaaaaggaaacgccggacccggatccgtctttcgaggggtgatgtccgagtgtctcaccaagtacttgatcccgtaacactctttcaacaagctacagatctcctccgtaatcccgaactgcccctcggtaaaagaatgccagtatctcgccctcccctcttcttccgtcgtgtacacctgatcgggagaatattcccgcccgaaactcgaataataacggtcccccacgcgttgcaactccccggcattatccagctcgatcccgatcgaacaatcattcagattcacccgcccagcatggaaactcttcccggcgtgccaagccttcacgtcaaaaggcaacaactggaaaacctccgcgtcccttccgaccaccacgtgagcggaaacactcgtgtccggccggcccaaataaagtgccgatgaaatcgctccggctccaaccgtactatgtaaaacaatcgtatccacacgagatagtttcacccgacactttgaacactgcaagtacttcacgttatccccgaacaacaaattctcaataatttccatggcaccccgttttacttccatttccttgacaacaaacaatccgtcaccttctccccgcttctcccgatcacgtatcccccgagcccgatctccagcaaatcccacaaacgggaactatcggacaacaacgtcgattccatgaacatccccgacaaaatcaccaacgcgaacgccagcatcacgatagggcgccaagacctctgcaaccaatttccccgggcttcttcccccaccgccgccgactgttcccgcaccagctcactcttgtaacgatacaccaaagattgaatctcttcctgaatcttctgcttttctttcgaagaaaccgacaaccggttcacgatgtcaccgatctccctaatcacgttctgtaatacacccataatcttttgtttttaaatttgatataccaaaagtacaccccagaacgcccgttaccaaccattatatccgaacacactcatttatcatccgaatgacaggaaaattcatccgaacagactttttcttcttccccccccatgagatgggtaacctccctaccccccaccttacacagaaataagaaccgcttgataatcagctctccccctgtgcaagggggagttggaggaggtagtttgtagataccgaataagactttttagacagccccttgtttgcaagtaattgattacaatattttatcaagctcccatgctttgatatgcctgataccttcattcaaaggcatagttatttcatcaagagaaattacgactttttcaaaattatcgtcaatagctttgagtgcagaatattccctttcgaccgtagcttcatctgtaagcatataggtgctttgtaagtatatcgtgcgatctgccttttgagcgatgaaatcgacctctttatttctgagagatccgacataaacattatacccggttcttttaagttccaagtagacaagattttccgctaaatatccatagccgtaaccgtatcccggatagagatagttcttgtatgccaagtcattaatgtaatatttggcattccccgacataatatcttttcctttaatgttataacggtcacacttatgaataagaaaagcgtcttcgatatatccgatgtaattcgaaacggcatcataacttgtcttgcgtccctgacttttgaaaaaattgactatgttggcaattgatacgagattggaggcattgtttaccagaaacgcaaagatatcctcaagtaacttcgcatctcgtacattgtatcgctgaataatatcacgtaataaaacagtatcttttattgccgagacataattacgtttgagttcaggtttgttcagcataaacaattcagggagtcctccgctactcatataatccgaataactttgtctgccgcactgttgttgcgtgatacctaaatattcttggtaactgaatggaaacacctccaatgatatatatctacctgaaagtaaagttgctaattctccggaaagcatctttgagttagatccgctgataaacagctcatagctttctgagtaatcctgggaataagagttgactactttttcccaaccatcgatcatctgaatctcatcaatgaatatataaatctttcccaccggattcaactcctttttatacgcctttatcacttcgtccaaatccttgtagttttttagaaattcaagatctgtaaactctttgttgataaagagaatgttgttcggatttattccactatcaataagctctccggctatttgtcgcagaatataactttttccggaacgccgttgtccaacaagcactcgaataagtttactgccgatatatccggcaatgttatccacgtacgtacttcgtttgtatcctaaatctatagaatctgaaccccagaagttatacctccttaataatgcaattttttcgttcataacataaatatttgcacgaatatactcattttcgtttataaacgaaaataatgcacacctttatttattcttacccataccaacaaaaataaaccgatataacttcgatgtacccgtctaaacatctcccccggcaaaatctactattttttcagaaaaacacctcaaattttagtcactctctttacattctagataactccacatcaccttgcacctgaagaagcacatcccgcaacaacggcaaatcatcatgtatcgtttgaaaaacaatttccgcatctatctcgaaataatgatgaacaatgatgtctcgcatcgcttatcacacataaataccctccttctctattcgttctcgcaaaaaagcgttcatgtgatcccgtaaacgcacaatgtcaacccgacatccgaacaattgttccaaagtatttttcaagcttccaagacgaaacaatcccattgggggacactctacatacacatccacgtcactctcctctgtttgctctcctcgtgcaacagaaccgaaaatcccgatacgggatattgcataatgtcccgcttccttgtttttaaactccttcaacaactctatgtactcttttgtggatttcatacacgtgttcctttcttgattactaccaacaaaaataaaaaaataaaccaacaatacaaagcgtaatgggataaggtcaccccacaagaatgattaacaaatttccttccccttacatctccttatcctctcgcccctttttcacccgtcctaaatcccagaaattaaaacacccgaagaccgccgctcggtaaggtggactgactggaagcacgctcttgccgatacagatcgctttcccgataaagccatccacttcgcaaaggttcacgatataactccggtgtacccgccggaacatatccacgggcaaaaaaggctccaacatcaagagagggtaagcaatcgacaaccggggcttatcccgacggtgaatataacaataacatcccgaagcctccacgtacaatatctccgagtaaaaacacctttccctacgttcaccctgacgcacaaaaaaacagtctcgcatgagaccttttgtctgatcattcgtttctttcataacgattatttttatatcccgcaagatgacctttcaacaaaaaatgcctcacgacaaaactgtccgaaaacaaaaaagggtataacgaaagcgtaaaaccactttcgttataccctttttaagaataatactatctctatcgtcttttcaaaccagattatttaataaccggatcccaataggtatccggatgcgtaggatcaaaaatttcatttgcccacatcactgttaccaaattttctgtttccgaaagattaatgatattatgagtgtaacccggaagcatatgtactgcctgaattttatctcccgagacctcgaactcgaacacatcgtcagttccctccttacgttcttggatcagtccatgtcctgcaacaacaatgaaaaactcccacttggaatgatgccaatgttgccctttcgttattcccggcttggaaatattgacactaacttgaccacactttgcagtatgtaaaagttccgtgaaagacccgcgggcatcaatattcattttaaacggaaaagccaccttagattccggcaaatagcttagaaatgtcgagtataatttctttacaaaagaaccggcaggaatctccggcatcatcaacgtcaaaggttgatcggcaaattcatgcaacctatctacaatctcaccgagagtcaccttatgagtaatagggcagtaacaataagttcccgtaacagaaggcaccacatccaagccgttaaactcgcaacgatgtaccttccccttcaaggcagaaatcatctccgccacaagatcatcaatataaagtaattccagttcaaccgttggatcattcacttgaatgggcaaatcattcgcgatattattacaaaatgtcgctacagcggaattgtagttcggacgacaccactttccaaacaaattggggaaacgatagaccaacacttcagcccccgtatctgttgcataatcaagaaacaaatcttctccagcctttttcgaacgtccgtactcggaatcaccaaaacgtccggtcaatgaagcctgttgggaagacgaaagcatcaccggacacacgttcccatgccttttgagagcattaagcaacgtggaagcaaaaccgaaattcccttccataaactctttttgattttgcggacgattgactcccgccaaattaaagacaaagtcacactccttgcaccactcgtccaactcctctgaagtagaatctacatcatattcaaaaacttcgtcaacaacaagatctccccaacaacgagatttcccgtccttgatatttcttaattcggcacaaagattcttacctacgaatccttttgcacctgtaacaagtattttcatgctaaaactttctccaaaccatcttgttaacaataccggtataagactgaatgattttcactactttcgtggaaacattctcgtccacgtaatttggaacaggaataccatggtctccgttttcgttcatatcaacagcacattctacagcctgtaacaaagaagcggaatcaatcccagcgataaaaaaacaagctttgtctatagcctccggacgctcggtagaagttcgaatacaaactgccgggaacgggtgtcccactgaaataaagaaagaactttcctcgggcaatgtcccactatcagaaacgacggcataagcattcatttgcaaacaattataatcgtgaaatcccaagggttcatgccgaatcacacgacgatcaagttgaaaaccggaaacttccaaccgtttacgactccttgggtgacaactataaagaattggcatatcgtatttttctgccatcatgtttatagccgtgaaaagagaaagaaaatttttctccgtgtcaatattttcttcacggtgagccgagagaaggatatacctccctttctccaatccgagacgttcatgaatatcggaagcctctatttctgccaaattctgatgcaacacctccgccatcggagaacccgtcacgtaagtacgctccttgggcagcccacattccgcaagatacctgcgagcatgttcactataagccatgttaacatcggaaataatatcaacaatccggcgatttgtctcttccggcaagcattcatccttgcaacgattacccgcttccatgtgaaaaatcggaatatgcaaacgtttcgcactaatcacactaagacaagaattcgtatccccaagcacgagaaccgcatccggccgggttgccaccatcaacttgtaacttttatcgataatattacccattgtctctcccaaatccgcccccacagcatccatatacacgtcaagatcggccaatttcaaatctttgaaaaaaatcccgttaagattataatcataattctgcccggtatgagccagcaaacaatcaaaatacagcctgcacttattaatcacggcagcaagacgaataatttccggtcttgttcccacgatgataagtaacttcaatttaccgttattcttaaattctgccatattatttcttttttgctagttcttcttgaatatactctaatgctgcaattttcactttagtttcttccaagctcaaccgataggcgttatcggaattaaattcctcgatcgtaacgtgctcaacatctccctctgtaaaaaacttgtcgtaattcaaatcccggttgtccgccggaactcgataaaaattccccatgtccaccgccttagcacattcttcctttgtgagaagcgtctcgtacattttctccccgtggcgaataccaattaccttaatatcctctttcttccctccgaaaagctcacaaacagcttccgcctgaacctgtaccgtacaagccggtgctttctgcacgagaatatctccatttgctccatgctcaaaagcaaaaagaacaagatcaaccgcttcatccagactcatgataaaacgagtcatcgatggctccgtgagagtaatgggaagtcctgctcgaatttgttcgatccaaagcgggataacggaaccgcgggaacacatcacgttaccgtaacgcgtacaacaaatttttgttttatcaggattacacaagcgacttttggctacagccaccttttcctcgatggctttggtgatccccattgcatttatcgggtatgcagctttatccgtggaaagacagataacgctcttcaccccactctcgattgccgcagtcaacacgttatccgtaccgaccacgttcgtacgaacagcttccatcgggaaaaactcacacgaaggaacctgtttcaaggccgccgcatgaaaaatataatctgtacccggcattgcagcgcgcacgctctccaacgagcgaacatctccaatataaaatttaattttatgcgctacctctggaaactttgcctggtattcgtgcctcatatcatcctgtttcttttcatcccgggagaaaatacgaatctctccaatatcagtacgaaggaatcttttcaacacggcattaccaaaactaccggtaccaccggtaatcaataaaactttgtctttaaaaatggacatgataatattttattattaatattttatctaaaaaattttcttatgccacaaattctttctcccttttccaacaacctgagttattctattaatcaatactctccttgattttctctacaatatactccacatcactatcagaaacataaggaccacttggaagacaaagtcccctcttaaataaactttcacttattccattcgtgtaagatactgctgttttataaaccggttgtttgtgcatcggtttccacaaaggacgactttcaacatttacgctatcaagcattctacgcatagcttcaacattcggatttggctcacaatctgtatgtaaagttgaagcaatatgtgttacaccagctgctcccccaacaaccccttgaatcatattcttataagcatctttttctcctttcacttgtaactttggatcaagaataatagtacaaagccaaaaattactatcataacgaggagatgggttttcatgcaaagcaatgccgtccacatctttaaacaattcccgataaagagattgaatatgtttatgatgagcaatatgatctgcagccacaaacatctgcccgcgaccaattccagcacaaatattactcatgcgataattataacctattttttcatgctgataataagggtatgattcacgtgcctgtgtcgcataaaacataatttcacgtttatcctcatcattagcacaaattaaagcacctcctccactggtcgttatcattttattaccattaaatgataaaactccatatctcccataggtactaagcatacggccatcaaacttagagccaaatccctctgcggcatcttcaattacaggaatatcataacgattcgctatttccatgattcgttcacaatcatatggcataccataaagagctacaggaattatggctttaggtttacgtcctgtttgaactatacggtctttaatagctatttccaataacacaggatccatattccacgtatctaattcagaatccacgaaaacgggagaagctccaagataagtaattgggtgactagaagcacaaaacgtaaacgactgcacaatcacctcgtcaccttgtcctaccttacaagccaataatgctaaatgtaaagctgcagtacctgctgaaagggctaccacccgcctatctcctcctatgaatctctcaagatctgcctcaaagccattaacattaggaccaagaggtacaacccagttcgtatcaaacgcttcttttataaatttctgctcttcaccactcatgtgtgccaaacagagataaatacgtttttccattttatctatatttgaaaaggataattgaagacttcttcactctctaaaacaatgggttctacatctacatcacgcaaaaaaacatatggtttttcataatgataataaggaactctctcaaccctatcacaatttccatcttccataatcttaattgtatcttcaataagattgaaacctacatgagccataaccccagtatatgccatatgtcgaatattcacttccgtaactttcatattaccatccttgtcttcctttaaatcaaaagaaagaataccatgtgcagatactccaagtttcttttctaaatacttaacacaatcatcacaaaacttattaatatgatcttcattaaggaaacgtccgaaatgagtattacctgtaacatgggaaggtgccgtattggccatcacatattctacacattctagagcggcaccctttatatattctccgttataataaagcatctcgttagcaagatgacgccctgtaaggaattcacttaccgtaaactcttgaattttagagttgataaacaaccaacttttataactactaatatcatcgagacgaagagaccctaatcctcctgttccgttagttgcacgaatccaacagggaaaaccaataaccttttctacatcttcatagcgcggattatcctgtgtaaccttgatagtcttaggaatgaatttcgtcccctcaagaagttccgccatgatagccttatctttcaacgaaacagaaagcaatttacaccccataaacacgggacatggaaatctaccattcttctcataatagtctccccactcaacaatttcactctcaggttgtacaaaagcgtaatcaatattcttttctttaacaagtttctctatccaagggaagtattctaaggtattacaacgaggacagataaaatattcgtccaaaagtccttccatgaaaaaaccgacagcttttttctctatatcacaaccgatgattttataatcaggatggttttcacgaataataccggcaagagaacgaggtgttaacccaccgatacctgtaacaagaattgttttcatattttttaacttttaaaatgattcataataatacggtagccattttccacagaataattttcttttagaaacgtccaccccttacgtcccatcgcttccctatcagcatgaataaaattatctacaataatggcaaatccctcaatatcattactattgcaacaaaatccgaaaccattatttttagcaattataccaatatctgtatttgaatctgttgcaagtaaaacaggtattcctgaagctaaataattcaatagtctcgaaggataattcggaattgtaaaacgatgatcgaggaatatcatgccaacatcactttggtcagcaatatcttgatattcttctttaggcatataagctaacaactttgcattgaataaattttgtgttttaataaaagtttttaacttattatattcagaaccctgtccaattataaggaaaaatacttttttattgtccttctctttttccaaacaacgcatcaaaaaatcaatgccttgaggtcttccaagatttcctccatataaaaagagaagcgctccttcaggaatgccgtatcgatgttttatctttgaattaatttttttaaattctggtattttcgaaggaattgctaaacaattgggacaaacttcaattttatctagcgatatttctctattatggcttaaaacataattaacatttgcaggagacatacaaccaatgaaatctgatatcctgtataatttcttttctttattccggaaatgcctatatatcaatccctttactccttttgttcccatcatacccaaatccacagcattttgagggaaaatgtctttcaataaaagataagttttagccttagttttctttttaacaaacttaatcgtattaaccaaagttataggaggagtcggatataaaataagatcaaatttaatatcaccataatatttctttatagcttttttaaattttagatcaattgttaatgttgatatccctttctcaaaaatccctatattgcccgtaatatttcctgtagatattcgcaaaaccgtaatccctctagaatcagaaatacctatctcctctgaattccgtttttcttttgcacaagcaacatatatatgatttccgtttttttgaaaaacacgtaacaaatcctcataaaaacttttatggaaaggcgtactaaatgacaatgctaaaaataatacattcatcttttcaatatacttaaaataaaacgtaacactcgtaccctaaaaattgcccatctttcctgaatttggtatttaactcctgaatattctacatatacaggcactaaaaactttttactcctatgttttttaaaaaaactaatatactgctctgttgacatcgttttaaataaagacaattcgcttattttaggtcctctcatactttcctcttgaacgaaagaaacgatttcatcatttttgtcagtattaaaccataagatacgattttcgtcatcattaacttttaaagcataagtctcttttgaaaaactaggaaatacaagtttaccattaaagtaacaattagatggcaaataaaaatttcctaatccatacgcaatcggtttccccttataaaactcagcaccttgcggacaatgagaatgacaaccaactacacctgcaactcctagatcaatcaaatctcttgaaatattccgatgcatcggcataatccacttttcaaggtcataattccaatgcataaaacaatacactttagttaaaggcttgagtaaaatatagtttttaacgacttctataaactcatcatatggcttatcaaccacacaggtattattctcctgatttgaattcgttcttgtatatagcctccaacaatgaccaaaaaatgcataatgtcgacctcgatcttcatattcatatggaagaattaagccatcattttcgcatattccaaaaacaccaatgttattttgttccaaataatgttttgtacgctgaattaacgcaggataatcatacatgtgattatttgccaatgatacgattactttccgggctttactaaaggcttgaacaatttgtggtgaattaaaaagagtaagagtacgttcgatctcttggggttccaaaatattagcctcaagattaaaaataacaatctcattatcaaacacgtttattctattaacacaatcaacaaacgattgtattttctcttcgggacaagcgatatcgcctaaaaatatcataatagaatctagttacgaaaacatttcgtttaaaatatattttttcttccctgattttgcagtagaaatagtactgagatattttatactcaagaatgcatctttaccaacaattacatgaagttcatcaatcatttttttctcattaatagagccattttctatcaccaaacgcatttcataggttttacaagcaatctgggcaaattgaaattgttttatattttgatatctccacattagattagtaatagaatggggagacagagctttaccttcagaatcaaatatcatatctacgattcttccaccaaaagacccaatagctttacgagttactccgtgttcttttactattgtccatgcaccaacatccccagtatcataccttatcataggcatagcataattatataaatctgtaactacaattcttccaacttcattaagctccgcagattcctcagaatccaattttaaaatttcgatataataattagctctatt

SEQ ID NO: 51 - DNA, 14764 bp, Butyricimonas faecihominis
gttgattaaagtaaattttagaattaaaaaatagaaaaatgattaaactgcttactttgttaatgcttttggttgaaggctcggaacgggattcgacaggttgtgacggaacaggtattccggcttgtttacaggaatatttccaacacgtgaaggatagcgtgagagagccggatttgaatgatgtttttatggtggttagccccgtggagaagggaaagggtgtttatcgggtgacgtggaacgatacgatgcagtttacgacgccatcgatcgagtatcatctcgaaacaaagggatattatttcatgcttgatcatgttaatattgacggtagcaagattgttcactcaaactatcggggaaagggagaaaagccgttagccctaccaagattttcggtacggacgttacctaagacatttttgtcgaaggtaaaggttatggatttgaataaacgattcgaggaaatgaaagggagtaaagagaagatgttagagttcaaggaagagttcgagaaaaaacgaatatgggtagtagatgagacttttatgacgggtgatttaatcagactggttgaaacgagttttgcattcgtgactatttaagagtgtgataaatcgagtgagaggggtaggtgtgtttgaaggcggcttttgatacacctctttctttttgttggagaatgtcgtggttcgggaaaaaagaagtacttttgtaatagttcgtgtcattttaatgaaaaagagactatggaaaagtatataggagcgcacgtgagtgcatcgggaggagtggagaacgcgccgttgaacgcccgcgaaatcggggcgacggcttttgccttattcacgaagaaccagcggcagtggaaggcggcaccgctgacggcggagagtatcgcactgttcaaagaacgctgcgaggaattcgggtacacgcctcgacagatattgccgcacgacagttatttgattaatctcggtaacccggatgcggatgcgctggagaagtcgcgggaggctttcctcgacgagatgcagcgctgcgagcagttggggttggatcggttgaattttcaccccggcagtacgttgaagaagatcagcgacgaggaatgtctggcgctgatcgcggagtcgatcaacctgacgctggataagacccgcggcgtgacggcggtgatcgagaacacggcgggacagggatcgaatctcggctacacgttcgagcagatcgcctatattatcgaccgggtggaggacaagagccgggtgggcgtctgcattgatacctgccattctttcgccgcgggttacgatttggcgacatcgggaggattcaccgagacgttcgagcatttcgacaacgtgatcgggttcaagtacctgcggggaatgcacctgaacgatgctaaaaaagagctgggttcacgggtggaccgccacgatagtttgggaaaaggaacgttgggcatagagcctttcaagtggatcatggaggacgaacggtttgacggtataccattgatactggaaacgccggacgaggcgttgtggccggaggaaatacggatgttgaagggtttcgtgaaatgataccggtgcgtgcgtctgtgaaatggttgttgacggcggtggttgtcctttcggagatacctctcgtggcacaagtcttgccgggggaagagggtatgcttgaacggggagggcgcctccccggtgaggtgagcatggaggcgcttgtcgacagcgtggcccggtgggggcggacggaacgggagaaagtgatcgtgctggcgggatggttccgtgagtacatggcgattgacgccgggaagttcctcacgggagggccggacggggattaccgcgaggtgttgaaggagaggaaaggaatttgcggggatttcacggggttgttcggggagttatgcaacaggctggggatcgagaacgagcgggtggaagggtacgtggcggaggatggtcgggagcgtggggaaacgtgtcgccggacgaatcacgtgtggaatgccgtgcaagtggcgggagagtggtggcacgtcgatatgatgtgggccgtgggagcgttggggagagatgcggcgggggaatgggtgttcagacggcactggaacccggagtacgtgttgacgcggggagagcaatttctgaccactcacatgccggctgatccggcgtggcagttgaccgacaggccgtacgccatggacgcgtttatcgaggggaatttgacggagggtgagcggggagattattataattacacggatagtatcgcggccttccggcgcttgccgagggatgaacgacagatgctttttgcccggcgggcgaaccgttttaacccgcggaacaaggaggtgatggcggtgacatactataacgaggcggttttcctgttgaattataaccggaagacgcaggccgtgttgacccgggcgagggcgtatttcaggatcgcggaagagtacgctagggatttgcccggcgtgaaagagagtattgacgagggactccggaacgtggaggctctaattaaatagaggatgaaaatattacatacttcagactggcaccttggaaagcggttgaatgaccgggagcgtgccggagagcaagtggccgtgatggacgagattgtgcgggtggctgacgaggaggccgcggatgcggtgatcgtggcgggggacttgttcgacacgtttaacccacccgtggaggcgatcgagttgctttaccgcacgttgcatcggttggcacggggcgggcagcgtttggtggtggctattgccgggaatcacgattcaccggaccgggtggattcgcccgacgtgctggcacgggagagcgggattttctttgccgggaacccgatgatcgtgtcgcaggagacgcgaacggaaggcggggtgacgttggtccggtcggacgaggggtttgccgagttccgattgccggggttcgattacccgttgcgggtgctacttaccccttacacgaacgggcaacgggccaaacgctacatgggcacggaggatgccgacgaggggttgcgggttttcctgcgggatcattgggcagggttggccaacaagtattgcgacacggagggggtgaacctgttggtggcccatcttttcatggcgagggagggcggtgagttgcccgaagagccggaggacgagcgaccgatcaatatcggtggtgccgatgtcatctatacttcgttgattcctcccgccatgcagtacgccgcgctgggacacctgcatcgctggcaaacggtggacacggagccttgtcccgcagtatatagcggtagtcccttgagttacagtttcagcgaggccgagcaggataaatacgtgacgctcgtggaccttgaaccgggatgtccggctcgtgtcacgaagcgtcggctgacgagcgggcgtcccttggtgcgtggccgtttcgagggggtggaggctgccttgcaatggctcgcggaacatctcgacacgtgggtagaactgaccgttgccacggatattttccttacggctcaagaagtgaaatctctgcacgccgcgcatgacggtattgtttgtatcatcccggatgtgcgtgacgcttctctcgtgaacgatcgtgtggcttctatccacgacttgcgctcggacgttaacgccctctttgccgagtacttccgccagcgcaagggacaggaaccgaatgaagaaatcaggtcgcttttccgcgaggcgttgtcgatggatggcgattcgaggaaaagtgacagttaaaagataaaagttaaaaactaaaagatgaaactttctaaattatcccccgtggttgtcttcggtaagttacaagttctatcattttcaattttcaatttcctatgttgcccgttaaattaactcttgaaggtatttactcctaccgggagcgccagacgatagattttacccgcttgacggaagcccggttgttcgggatattcggtccggtggggagcggaaaatcgacgatattggaggcgatgatctatgccatttacggtacgattgaccgtttgaataatgacgtgaaatataacgtgatgaacctgcaatccgaccgcctgttcgtggacttcgagttccgggcgggagaggacggacgattgtaccgggcgacggtagagtgcaggcggaacaagaagaggttcgctgacgtgagttcgccgaagtacctttaccacgtgtgggagggcgacgagtggttgccctgtatgcgggaagaagtggtcggggcgatcgggctgacggcacagaatttcaaacgggtggtgattatcccgcaggggaagtttcaggagttcctgatgttgcgggacaaggagcgtaccgatatgatgatggagcttttcggggaactccggcgctatgatctgggtgggcgagtggcttacttggagggggagacgacccggcgggtgatcgatttgcggggacaactcacgggattgggtgaggtgagcggagagcagttggccgagcggaaacagcgttacgcggccttgcaggaagagattgccggggtgaaaaaagagattcacgaggggcaggagcaaatggagagggggaagaaagtgaaacaactcaccgacgagcgggtggcacgacaggaagaggaacgaaagctgttggaacaacgggaggcgatggcaggtttgcaggctcgcatggacgagtacgagcgatgtttgcaacagttccagcaaccgttgagccgccacgacgagacggggcggcggttggcagagtctgcgcgggtgttgtccggttaccgggagcaactgaccgctaaacaggccgagcttacccgtttctccgggcaattctctcaattgaaacaggcgtacgagggacgggatgtgttgaaagagcgtgccggacaattggaacggttgctgcatttacgtgcgataagcaaggagcaggatgaattgaaggagcgacaccgcaagggtgaagaaatcgtggtggcgacgaggcgggagatcgaggtgttacaggagcagttacgagaacagaaagagaggttagaacagttgaaccagtcgattcccgatatgaagatgttatcggatattcgggaatggtataatatacaacagcatctccgggaagagttgacccgttggcaggaagagttagccggggtggataaggaaatcgcccgggaggaaggggaggtgcggatggtacaggagcagtatcccgcattcgggacgttacaggccatgacacgcgaggcgttgcaggaggcttgccgggagaggcaggaacaacttgccgccaccgtgcagaagatgcgggaggagtggttacatttaagtacccgccagcgattggtggatttcgcaagggagttgtcggagggtgaaccttgtcccctttgcggggccttgtcgcatcccgcacccttgcacgtcacggaagtcgagggggagttgaaggagaaggccgaccgtgtcgcgggcttggaggaagaagggaagatgttggaacggatgatgtcccgtctggccgtgatcggggaacggttgcgatcggcaggggaacggaaagaacaaatcatccgacagcaggctgttgtgcgggaacggttacgggagcatctgacccgtttcgcgtgggaagggtttacgcccgataatatgcagtacttgacagatgagatgaaccgggtggcgcttttgaataaggagaaaggggagcgggagatggtacgcgggaacacggagaagagcatcgagcagaaacgagtgaatcttgaaaagtacgtcgcccgtcttgacgagatcagccgggagatcgtgcagcgggattcacagaccgggttgttgcgggagcagcaggcggggttcgatgggaaggagtacgaggggttgcccgacacggaagtcggtaaggagctggaaggatgtaggcagcgtttcgatcaggtcgggctggattatcaacgggatgccgcacggttgcaggtgatcgaggcggatttccggaagtgggaagggagcgtggaggaaaaaagtaaggaggtgacccgtttgcagcaggaattggaagaggaagtacaggagttggaacgtttgttgaaagattcggcttatcccgatctggctgcggttcgggaggtgctggctggtaagctggatttacccggggtgcggggagagattaaccgttaccgggagcaggttcacgccgtgcaggttcggaaagcggagttagaggtgttgcttgccggggtatcttataacgaggaagaacacgttgcgctatgtcaacgggtggaggccgcgttggtacgggaacgggaaatgctggcagaacagggagctttagggaaccagattaaggatatggaaacccgtgttgcggcccgggagaagatcgggcgagagttggaaggtttggagttacggttgacgaatttgcagatgttgaaggggttgttccgggggaatgatttcgtgaagttcgtttcgtctatttacttgcagaatctctgtaacgcggcgaacgagcgtttttaccggatgacccgccagcgcttgaaactggagttgagcgaggaaaatgatttcgtggtacgtgatttcatgaacgaggggcgagtgaggagcgcccgcacgctttccgggggacaggtgttccaagcctcgttgtctctggcgctggcattgacggataatatccgccatttgacagggagtagccagaactttttctttctggatgaagggttcggttcgctggaccgggagtcgttgagtgtcgtcttcgaaaccttgaaatccttgcgggccgagaaccgggtggtcgggctgatctctcatgtcgaggaaatgcagcaggaggttccggcgtgtttattcgtggagaacacggtggagagggggagcgtggtgataattgaaaattgaaaatggagaattgaaaatgagaactcctccgccctccgggcacctcctctataaacagaggaggagtttagttactcttcaatctcaagatggtatttttaactctccctctgtttatagagggagtacggcgtagccgggagggagtttaatctaaaatcataaatcaagaaattagttgaatttaaaatctaaaattaatatatgtacgattcgctcatagacagactcatcgacctcgcgattgaagaagatatcgcaacgggagatattacgaccaacgccattatcccggtacacgctaaagcggttgccgaaatgaaagcaaaagccgacggtgttatttccggactggaaatcgcgaaacaagtatttgaaagatttgaaaaagatatagtatgggaacctctcgttactgacgggactgccgtaaagaaaggggatatcatcctgcgcatcgaagccagctaccgcacgttactttgtggggagcgtctatcattgaatatcctgcaacggatgtccggtattgcaacagctacttctcactacatgaaagagctggcaggaacacatacccaactactggacacccggaaaacagctcccggcttgcgggtactggacaaaatggccgtacaccacggaggaggttccaatcaccggatgggactttacgacatgatcatgctgaaagacaaccatatcaagattgccggaggtattccgaatgccgtgaaagccgtgaaacagaatcttccgttaagtatcaaggtggaagtggaaaccacaacattagaagaggtacaacaagccattgacgcgggtgcagacattatcatgctcgacaacatgagtaacgaaactatggccgaagctgtgaaacttatcgcaggcagggcaaagacagaggcatccggaaacatgagtatcccccgtctccaaggtgttgccgctaccggggttgattacatcagtgtcggtgccctcacccactcggttacagctttggatattagcatgaacatcataaaaatgtagaaggtaaaatttaaaatgtaggaaggtacaccctaaattttacattttaaattctaaattaatatttatctttgaagtctcaaaaaacaaggttatgacgcagacagagattatcgacaggataaaacaacttaagaaagagaaaaacgccatcattttggcgcactactatactcgtcctgaagtacaagacattgcagactatttgggtgactccctaggactttctcagatggccggaaccaccgaggccgatattatcgtcttttgcggtgtgcatttcatggcagaaacagcatccatcatctcccccaataagaaagtgctgatccccgcggaaggagccggttgctctttagccgagggagtagccgggtatgacttgagagaatggaaaaaagcaaacccggatggtctcattgtcagctacgtgaacaccacggctgaagtaaaggcttacacggactattgctgcacgtcttccaatgccttgaaaatagtgcaaagcctgccgaaagacaaaaagatacttttcgttcccgacaagaatttgggtgcttatatacaaaaagtcaccggaagggaaatggaaatttggaatggagactgttgcgtacatgacaaaattgacacccagatggtactggataaattggaagaatatcccgatgctgacgtgttgattcatcccgaatccagttgttcgcacgacgaccggatattaaatcatccccgtgccttcatgtattccacggcaggaatcatcaaacatgccaaggaatccccgaaacaacgatttatcattgccacggaattagaaaccatccataaactccaagcagacaacccgaccaaagaattcatcccgattcacccgaaaacgatatgcggacagatgaagaaggttactttggaaaaagtactcgaagcccttgaaaaagaacaatacgaagtacggctcccggaagacttgagagaaaaggcttggttacccattcaacgtatgttagaccttagttaaaaggattcagtgattgacgatttaaagactaggtgattaacctatggggaaaaatcacagaatcaagaatcaataaatcactcaataaatagaatctaaaatttaaaatctaaaatttaaaatcaaaatatgaatgtatcactgaactggttgaaagactatctaaagatcgaccaaagcactgaagagatttgcaaaattctgacaagtatcggactggaagttggcgggtacgaagaatttgaggcaataaaagggggattaaaaggattggtcatcggtcatgtgttgacttgcgaggcacatcccgattcggaccatttacacgtgacaacagttgatttgggaatgggtgaaccggaacaaatcgtctgcggggctcctaacgtggctaccggccagaaagtagtcgttgccactgtaggaacaaccctttacaaaggtgatgaagagttcgtgatcaagaaatcaaaaatacggggtgtagcctctaatggtatgatctgcgccgaagacgaaatcggtgtcggaaccgatcatgccggaatcatggtattacccgaaaataccccggttggaataccggccgcagactatttcaacgtttaccgggacacggttatcgaagtcgatattaccccgaaccggattgacggagcctcacaccttggtgtagctcgtgatttagccgcttatttacaacagacacaagatattcactatactcttccctccgtggaaactttccatccggacagtacggatgctaaaatcaccgtacgagtagaacgtcccgaggcttgccgtcggtacgccggaatatgtatcgaaggagtaaccgttaaagcgtctcctgaatggttacaaaaccggatgaaagctatcggattacacccgatcaacaacatcgtggacgtgaccaactacattcttttcggtctgggacaacctttacactctttcgataaagacaaaataaaaggaaacgaagtcatcgtgaaaagcgttgccaaaggaactaaattcacaactttagacggcgtggaaagagaattgcatgaggacgacttgatgatctgtaataccgagtcccccatgtgtatcgctggagtattcggtggacaggaaagcggtatttcggacacgacaacaaacgtgttcttagaaagtgcttgctttgacccggtattcgttcgcaaaacagctcgccgtcatggtttgaacacggatgcctctttccgttatgaacggggaacagacccgaacatcgtgatctacgcactaaaattagccgccatgatgattaaagaagttgccggaggtaagattacttgcgctcctatcgacatctacccggaacccgtgaaggatttcgaagtgttcataaaatatgctcacgtagatcgattgattggtaaaaaaattgaccatgaggtaatcaaaaacatcctccgttctcttgaaatgaaaattgcggaagagtgcgaagaggggcttttattgaatgtccccccctaccgtgttgacgtgcaaagagaagctgacgtgatcgaggatattcttcgcatctacggtttcaacaacgtggaagtacctgccagcgtaagatccacgctaagctattccgaaaagccggatgacttccagttgaaaaacatcatctcagacctattagcagcaaacgggttctgtgaagtaatgaacaattcattgacgaaagccagttattacgaagacttcaagtgtttcgatcccacgcagacggtaatgttattcaacccgcttagcgcagacttgggagctatgcgtcaatccctgctctttggcggactggaaaacattgcttacaacatcaaccggaagaacaataacctgaaattattcgagttcggtaagggttacaccttcaacaaaaaagaaggtattgacaacccgcaaaaacaatacaaggaagacaacttgctttctcttttcatcacggggaataaaaacatgaccacatggaatgtcaaagagacgaaaactgacttcttctatttgaaagcgtattgtgaaatgatattaacccgtctaggacttcaccccgataacctgaaaattgatgccactgacaaggacatcttccgagaaggattgacgtacaaagccggggataaacatatcgtatccatgggtatcttgagtaaagcccctctgaaaaaagcagatgttaatcaagaagtctactacgctgaattctcgtgggaaaacattctgaaagccatcaaaaacctcaaggtaacctacaccccgctaccgaaatttccttctgtaaaacgggatttagccttgttgcttgacaagaaagtcactttcagggaaatcaaagaaacggcgttccgtacagaaaaatcattactgaaatccgtcacgttattcgacgtgtacgagggagaaaaactcggtgcagacaagaagtcctacgccgtcagtttcacccttctcgacgaagagaagaccctcacggacaaacagatcgacaaaatcatgaacaagttaatgggtacctacaaacacctgttcaacgctgaaatcagatagttacaagtttacaggctacaagttatcattccacttgtagcctgcctttcaattttccattttcaattctcaattttcaattgtatgaagtcccttctcccctcctttatccttattcttctatacttcattgccgaagaattttttggtccgaaaatcggtttgatagccgtgatcgtattaggagccggagagtttttctattcatggatcagggagaaacgtatcaacaagatgacactcttcaacaccctgttcttcattgcccttgcggcaatcagcgtgttgctcgaaggaatttcttttgaaaggatacaacaaaccattgtagaggcagccatgtgtgtactaatcgggatcttcgcattctcgaaagtggacatgactcagacattgcccgaatcataccgcaagacattacaggtcaccccggaacagcaacaagccatgcaccggatgctacgcctgctattttacctgctcgtattacataccgtcctagctttcacttctgcctttatctttgacgaagaaatacatcaatttatagaaggacctctattgtatattctgattgtcctgttttttctcacattatttgttaagaacagactacttgccaaagcagccagtcaggacgaatggttacctatcgtgaacgagaaaggcgaagtcgtcggtaaagctacccgtagaagttgtcattccggctccatgctcctacatcccgtcgtgcatctccaccttatcaacgaacaaggggacatttacctgcaaaaacgcagcatgaaaaagaactttcttcccggaatgtgggatactgccgtgggtggtcacgtcgcactgggagagaaaatagaagatgccttaaaacgggaaactttcgaagaactgggtatcacgaaattcaaggcccgtttcctcggttcctacgtgtgggagagttcccgcgaacgagaactcgtattcccttttctttgtacctctcatgacgccattcacatcaataacgacgaagtagacgagggacgcttctggtctcgcaaagagatcgaacaaaatgcagccgccaacatcttcaccccaaactttttacacgaatacaatcatctactgaaaaaaatcaaataaccaatcaacgtcctaatcaatttgattccaccaagccatacctcgatggacctctttttttattctcttaatttataaccacgtaaacctgcccggcctgatatttaaccacccgtaccacttttcctctctcaataaaagctcccgtatccgacacagcatcatacacctcattcccgatcattaccttccccgccgggcgcaaatctgtgaatgtagtccccaccttaccgatctcctcctttaccgccatatccacacccacgaaaccatcctccactttctgttctgcgtgaagagcaaaattcaatcgtcgggaaccaaacaattttcggctcaaccaaatactcccgaatagtgaaagtaacgaacaactcaccacgaaaaacaacgagcgaataatggcacttgtaaaatccggcaagaaatcaaacgtgaaatcgtcaatccccgccaataccagcgacgctaccacgcaaacaattcccagtaccccggtgacaccgaaacccggtatcacgaatatctccagcagcaacaggataatccccaccacaaacaggatcatctccacgtaatttgccatcccttccaaatacaacggggcaaaatacaacaaacacgctgttatcgctgctaccaaggggaacccaactcccggagtctgcaactcgaaataaattcccccgataataatcatgatcaaaatcccttgtacgatcgggctgatcagaaaccctataaaccgatccatcgtcgtcggtttatactcgtgcaactcgtaattcgtaattccctctttctgtaacacttccaccacgctctccgcaattccgtcacagaacccgtattgtatcgcctcatgcggagtaaacgttaccactttcccgctatccgttaccccctcgaccacaaccctctcgtccaccatagcttcggcaatcctcggatcccgtttccaacgaatcaccctttgcccgttctccatcaccgtatccttcccgtgcgcctgagccgtggcacgaatcatcgatcgcatatatgactggtacttatcgggcatggcatcccccgtttggttcacgactgttgccgcacctatattcgctccttcacgcatataaatacggtcacaggcaatagaaatcaacgctcccgcagaggcggcattattatcaataaatacccataccggtttcggataattcaatatcaaactacgcagagaatcggcatatactaccattcccccgtacgtattcatatgcaccaaaataacatctgcattttcgtccgtggcccggtcaaaagaccttttcaccaaccgccatatactaggaccgatttcgtccttaatatccaccttgtaaaccagttcccgattctcccccgaatcatttttttcctccccggcaaacatcggcaggtttcccaccaacaaaaacaaaactaccaaccactttctcatcatgctatatctttcaatttttgaatattttccttccccaactgttcctcgaccaccaccgttcccgccaccacagaaagtaacgacacaaaactgcaaaccacgatactcccccacgggatcatcaacgacaaggcaaacacagtcccgatagccgtcacgcttcccgcattatgtcgcatataacgaacactctcctttacccgaaaacgctttctctccacggcataatccataaaagcgaacccgtagaaataagcgcccactccaaaggtcagtacaggcataaccaatccggccaaaggaataaaagaaccgaaaaacaacacaatcatcacgagtaattgcaggatcatacaacgtaacgaaattgcaatacctcgtccgatttcccaaaccaattgtttcaggtcaaaagggtactcccaccccgacacaattgcctctgtccgttccgaaagccacgagtaaacgggcgacatcaccaccattaccacgtatcccccgaacgaaataaatagtatataatacaggaa

SEQ ID NO: 52 - DNA, 14738 bp, Butyricimonas faecihominis
aacctgttatgacgccagtcgtacggcagggtagccacgcgcggacgggataagcgctgaaagcatctaagcgcgaagcctgcctcgagatgagatctccttacagggtcgtcgtagacgacgacgttgataggccacaggtgtaaagccggtgacggcaaagccgagtggtactaatcacccgaaagttgacgttcggtgggtgagatgattcgattaacgttccaggcgattgtcaatcaaggtgattggcggttgatagaaaagcatgaataaatgaacaaagatattgtcacgagtagccggagggctcgatgaagtgactggaaaacattaaaaggtgtctatagcgacggtgatccacctcttcccatcccgaacagagaagttaagcccgttagcgccgatggtactgccgataggtgggagagtaggtcgatgccgaatttagaagagagggcgagttcaagtgactcgcccttttttgttttctctcgcttccgattgtggagaacctataacctgctaacttgtaacttgcgacttgccgaaggcaatttatctgatttctggtaactcgataccttttattttgcggtataaatttaaagcgtaagaatccgtcattcctgagacgtaatccgttaccgtttgtattttcgtgtaaatggaatcatcttgatgaactttgtattgttctggcatgacggatagaatattccgggcataataggtttctggtttcagaacagcatcaatatattcttttaatatggtggcaaggattttgaaacctgcaatctgtatttgtgtaacgatattcgtgtgataaatccgggaataggctaattcggtacaggtttcataggcttgtttattggtgcctgttaagtgatgtatcaagctgccttgaaaggttccgttcatgattgcctcgtagttttggcaaaagatgtctgcacaggcattgattaatttattaataatacctgcacgtagaaatgcgatacattcgtttttgtccgtgacaattttgaaggttctggagatcgtctttaaatcttccttgtctgtatctttgtcgtagaaattaagaagtatccgggtagtttcatcataggatagaatttttagcttgtgagagtcttcaatatccatgatctgatagcaaatatcgtcggcagcttcaactagataaacgagtggatggcggacgtattgcaaaggttttgagttgagttggataataccaagttcttcggctacttccttgtatatttctttttcactttgaaaaaagccgtatttgtgtcctttgagggaggctttagattcaaatgggtatttaacaatggatgcaagagtggtaaaggtcatcgtgtaaccacctggcctgcgtccgttaaagctatgggttaataatcggaaagcatttgcgttaccttcgaaatgactgatgtcagcccattcctcgtccgtcagaagttttttcaagtattgcccttctccttccgtgaaaaaataagaaatagcctcttctccggaatgtccgaaaggaggattccccaaatcgtgagctaaacaggccgtactaacaatggtaccgatttcttcgaggatttccgggtgttccaatgcctctttggttttaacaaattgtgcaatcttgtttcctagcgaacgtcccacactagctacttctaggctatgagttagacggttatgtacaaagatattgcccggtaacgggaatacctgagttttattttgtaatcgtcgaaatggagaggaaaagattaaacgatcgtagtctctttgaaattgtgatcggtcatgagagcgaaacatggtgatagtgcttcccggttgataacgtctcgatgataataatttattccagtccatcatggttgttcagattacaaatttataggttacaggtttaagtaaagtatgtcaattggagacctgtaacggttatacaaatgtagtaataaaaagaagaggaagcaaactgcttcctctttcgatctttattttgaaatgaagtggtagtgactaccaaatctttcgaatgctgctttatcaagcgtttctcggtgatcgggatgagcaatattgattaaagtctttgctctttcctgaagggttttaccataaaggtctgcgataccgaattccgtaacaatgtagtgtacatcgaaacgagtggtaacaactccggctccgtttaacaaggtcgggcaaattttactcacgcctttgtttgttactgccggtaatgcaataatcggttttcctccttcgctggctgctgctccgcggatgaagtctaattgaccaccactaccactgtaaaatttaatacctaaagagtctgcgttgacttggcctgtgatgtcaacagaaagagccgaattgatagccgtcattttcggttgttgtgcgatgatgaacggatcgttcgtgtaaccgacatccatcatggctactcctgggttgtcatcgatgaagtcatatactctttttgatcccatcaagaaggttgatacgatcttacctttgtcgaatttcttattcatgttgttgacaacacctttttcatacaagggtaatactccgtcagcaaacatttccgtgtgaatacctaagtttttgtggttgcctaattgggaaagtacagcgttcgggatggctccgattcccatttgcagggtagctccgtcttcgatcaaagaggctacatttttaccgatagcaatatcctgttctgttaacgttgccggatgagcttcgataagtggggtattgtcttcgcagaagatgtcgatgtctgataatttgatgatagcatctccccatgctctcggtacgttcgggttgataacgccaataactgtttttgcattctgtacggcagctaacgtggcatcaacagaggttcccatggatacaaaaccatgcttgtccgggggacaaacttggatcatggcaacatcaaccgggtgaataccgcttctgatcagtttctgggtttcactcaaatgaacgggtacataatctgcatatccttcttgagtaggtttacgcacgttactgcccacgaaataggattctaggaagaagattccttcgaattctgcttctgcatacggggcactaccttccgtgtgcaagtgttgcaacttgacgtctctcaattctcctgcacgtcctctgttgcaaagagcttgaattagaccttggggggcacaagccacactgtgaatgtgaatccggtctccggattttacaacttttacagcctcttcaaatgacactgttttgattccttgatacatagcaagttattttgttttgatttcttatgatttaattattagctaacctcttgaaagaggggtgcaagttaacaacactcttttaattaaacaattttttccgtaattattagtgtccaatttgtgacacggtttttacttacagtagccagcctagaatggcctttcccgtgaaaagataaatgttcaaaccgatgatgtcgttcgttagggtgataaacggtccggtagctagagccggatctatctttagtttattgagtaataacgggaatgctgtaccgaacatggatgcgaacatgatcacgataaacaaggatatagttaccgtgatgggcatggcaagtgatgttaggttgaaacaaagggataggataaaaatgatggaagaacagatgcaggcatttatgaccgcacatgaaatttcttttgagatactctgtaatatgttttttgatgtcagggtgttggaggcaagtccttttaccacgatggcggaagactggatacccacgtttccccccatagcggtgataacaggaatgaacatggctgttgctgggaataaggcaatgtctgcctcgtagaaagaaatcatataggctgcaagcattcctccgaataaaccgatgatcagccacggaagacgtgctttggtctggtcccagatcgtgtcggaagattccacgtcctgtgagataccggacatcatctggtagtctttttctgcttcttcccggatcacgtcaaccacgtcgtcgatcgtgattcgaccgacaagtcggccgatggagtcaactacaggaatggcgactaaatcgtacttctgcatgatacgtcccacggattcggctggttcatcggtggtcacgtaggttacgtccgggttatatatactttggattttggtagatgtcggggaaagaatcatctttttcaatgaaagtcttcctttcaagatgttgtcgtcatcaacgacgtagatgtagaatatttcatctaggttctctgcttgtcgactaagttcgcgtagacaggtgaggacggtccaattctcgttgactttcactagctctttacccataagtccaccggcagaatcttcgtcgtaatgcaacagatcgacgatgtctcccgcttgttcgaggtcttccatgtgtgaaagaacttcttgctgctgttcgttgggcatactacccacgaggtcggcggcatcgtccgtgtccatgttgtccacgaaacgtttggctataacttccggggggaaagaatcgataaatcgttgtctttcgtcttcttcgatttctgccagaacgtctccggctttctcttcatctagcaacagaaacaggaattgggcttctttggtgtccaattcattcatgatttcggcaatatccgccggatgaagaggttctaccaacttggcgacatcttctttattatccgcttttatcagtccctctatctgggaaactaattcttccgagagttcaaactgttgcatagttcatcaattacttgtttgcctgctgaatctctttacatagtgtaatgaaatcctctacacttaattgttccgggcgcaaagataacgtttctgaggcaaaatccggagaaataattgattttaaagaattacgtaaggtttttcgtcgttgattgaaacctgattttacgatattgaaaaaaagtttttcgtcacaatcgagtttttcccttttattccggatgagtcggattacggcggatttaacttttggtggtggatcgaaaacctgttctcccacggtgaaaagatactcgatgtcgtaaaatgtttgtaggaatacgcttaaaatcccgtatgttttgttcccgtgagaggccctgatgcgttcggccacctctttttgtatcatacagacgacttggggtattagatcccggttttctaggatacggaaaaagatttgcgaagagatgttataaggaagattcccgatgatcgaaaacggttctgtgtagaaatttcgaatatctgattttagaaaatccccgtaaataatctgctctttatgggcaggtagctcttcgtgcaggtagtcaatggactcttggtcgatgtcaatggcaagcacggaaaattttgtatcttttaataaatgacgtgtcagtactcccatacccggcccgatttctagtacccctttggtgacaggtagtaaactcgccgtgattttacaagcgatgttttggtctttcaaaaaatgttgtcccagatgtttttttgctcgaacgatactcatagtatgaattcagggtgttatgggttaaacttccaattatttatttacttttgcaaacgacttacaaaataatgcttttattttgatttgtgaaaattattagagtgtcaatcttgacgaattttgtggatgaagccattttataaacaggttataaagttttttgcctttttgctggtaacagtttttttgttctggctggtgtatcgagatcaaaatttcgatgacttgatgaaggttttgcgtgatgatgtcgactatacgtggatatgggtagcgattgttttcggtttacttagccacgtgagtcgttctctgcgttggcagatgttgacgaaatctatgggataccggatttctttcatgaatagttttatgggggtgatgattggttattttgctaatatggcgattccccggatgggtgagtttacccgttgtggagtggtgagtaaatatgagaacgtgccattctcgaagttattgggaacggttgttaccgagcgggtatttgacatgattatgttgctgttgcttactttggttgttgttgtttcgcaatttaaacaggtcgggatattcctggataataatgaagagattaaacaaaagttatacacgatgtttcattccccatggacttacgtggtgttgggagtattgatcgtgggggtggcaggtttcttctggtttgtacggaaaggtactttcttcacccggttacatcattttttatcgggaatgaaagaaggtttattgaccgtgaaggacgtgaagcataagtggttatttatcggtcatacgatttttatctggctgatgtattttctgatgctatacgtttgtttcttctgtttccagttcacctctcacttgggaccgatggttggtttgaccgtgtttgttctttccagttacgggatggtggctccggtacagggtggcgtgggtgcgtggcattttatggtgattgcagccttgatgatttatttaccgcatacggaagaaattgccagcctgtctaagacatttgctttgttgactcacggcacgatgacattgttgtatatcgtggtaggcgtgttgtgtttgttattcttgccaatatataatcggaagtaaatttcatgtttatggatattgttgaaaaatattttaccgggttaagtgagagacaattggaacagttccaacaattggaggggctttaccgggaatggaatgaaaagatcaatgtgatttcgaggaaagatatagatgctttgaacgtgcatcatgttttacattctttggcgatagcaaaggtgatttctttcaaagcggggacaaaagtgttggatgtcggaacgggaggaggttttcccggaattccgttggctattatgtttcctgaggtagattttttcctggtagattctatcgggaagaaaattaaagtggtagagggtgttgcaggagctttaggcttaaaaaatgtgatagcaaggcaattgagagtagagacgatgaaagaaaaatttgatttcatcgtgagtcgtgccgtgacggcttttccggcttttgtagccttgaccagaaagcgtattcgagagaatagtttcaacgatttgtccaatggaattttgtatctgaagggaggggattttgaagaagagattcgggatttcaaggataaaatttctgtttataatattcctgatttttttgaggaagagtttttcgaaacgaagaaattaatttatatgaaattcctcaaataattttctattaacgatttgggaataagaagaattcttcttaaatttgtcgcagtttacatttccacctggttcatgccgggtgattttacttacgtaatgagaattatccaaatataacgtgactatatgtacgatattttagaactgaatgaaaagttactttcagatttgcgtcaaattgcaaaagaactgaatgttaaaaggattgaatcctttaaaaagaaagaattaatatacaaaattttagatcagcaagccatgattgctaccgaggaaactgctcccgttgaaccgaaagagaagaaacctcgcgtgagagtgataaggggaggtgctgaaaaagtgggagattccaaaggtggattggccaaatttaatcggaataaagataagaaggccgatgcgaaacaggagaaaaaccagaatgaaacagtcaaagaggctcccgaaaagaaagatgcagttttacccgtagaggaagtgcagccgatcaatgtcgtgcatagtgatattttggataaggatttggttttcagtcgtacggaaaacggtattgttgtagagaaaaaaggagaggttgttgtagaaccacaggaaacggaagtaaagaatgaaacttcagaggctcctaaacgtgagcaagccggacaaaagcaagaccgtaagtttttcgataagcgtaaccggaaacaaaccaagcgggaagaggtgaaaagtgaagaaggaaaagaagaggtgaaagaggaaaaggcggttgaagaggttgttaaagaggaacaagtggcagaaagacccagccgtccgaagtttgtaaaacggaatagacgtgttgagagagatgaagaaaccattcgtcaagatgtggaagagaatgagtttgaagatgtcgaaaatgaatctggcgttaagggagaggttgaaaatgaaaattatgaaagcgttcctgctgagtttgaagaaagaaaagaaagtcaaaacaagatgcgttttgacaaacgcgataaatattacgagttcgaaggaattattttaaattcgggtgtgttggaaatcatgcctgacgggtatggattccttagatcttctgattataattacttgaattctccggatgatatttacgtgtctcaaagtcagatcaagttatttggtttgtcaacgggtgacacggtggaaggaaccgtgcgtcccccgaaagaaggagagaagtatttcccgttgattaaagtatcaaaaattaacgggaagtctccggaagcggtgcgtgaccgaatcccgtttgatcacttgaccccgcttttcccgaatgaaaaattcaatcttaccggaagtgggcgggctacgatttctactcgtgtggtggatatgtttgccccgatcggtaaaggacagcgcggtttgatcgtggctcagccgaaaacgggtaagacgatgttgctaaaagaaattgctaacgcaatttcagccaatcatcctgaagtgtatttgattatcctgttgattgatgagcgtccggaagaggtaaccgatatggctcgtagcgtgaatgcggaggtgattgcctctactttcgacgagccggcagagcgtcacgtgaaggtggccaatatcgtgttggaaaaagctaagcgtatggtagaatgtgggcatgacgtggtgatcctgttggattcaattactcgtctggctcgtgcttataacacggtatctcctgcatctggaaaggtgctttccggtggtgtggatgcaaatgcattacacaaaccgaaacggttctttggtgcagcccgtaatatcgaaaatggtggttcgttgacgattctggcaaccgcgttgacagagaccggttcaaaaatggacgacgtgattttcgaggaattcaagggtactggaaatatggagttgcagttggaccgcaagttgtccaaccgtcgtatttacccggctgtggatattacggcatcaagtacgcgtcgtgatgacttgttattggaggactacacgttgaaccgtatctggattttgcgtaactatctgacggatatgaattctgttgaggcgatgcaattcgtgaaggatcgtttggaaaagacgaaatctaacgaggaattcttgatctcgatgaatgataaatagttttataagttttataatatggaaaagcgagttcatttggcctcgcttttttgatgcctcaaatatagaatcattttaagtacgtgcttatatcgcaatggtgtagcgggttatgcgtgaatgaatgttcattgggatgtatgaaatggcaatgaaatgtatgttttgcaacatgtagattacaaaactatgctttttttattacctttgcattgcaaagaataaaaaatggagagtttacgtaacacgcataagatcctgatgaaagaaaggacgtcggctatccgtcgcggtttattggatacgatagattctcgtgcccggttgattgcgataaagggaagtcgtggtgtgggaaagaccaatttcctactagacttttgcaaggatcattacaaggacgatccttcttgtctttacgtgaacatcaataacttgttctttgcgatggaaggattgtttaatttcgtggaacgtttctacaagctgggagggaaagtattgttgctggatcagatccataagtatccaaactgggatcgggaattgcgggaggcttatgatcgtttcccggatttgcagatcgtttttaccgcatcttctattttgcgggtcaaatccaacaaatatttgcatggaatcgtggagatgtacaacctgagcggtttgtcgtttcgggagtttttggagctagaaacgggatataagtttcccatttattctttcgaggaaatcgtggaacatcacgaggagatcgtgaatgatattttggagaaagtacgcccgttagctttttttaataactatttgaaatatggttattatcccatatatttggaggagaaatcacatattgattatttactgaaaaacatcaacttaacattggagtttgatattccgtacaataatcaaatcgagctgaagtacttgacaaaattgaaacaattactttttatcgtggcaaatggtaatagtaatattaatatcagtaagttgagtgcccagatcggtgtttctcgtgcaacggtgttaaattacctgcattacatgaagaatgctcggttgttgaccttgttgtttgatcgggaaagtgatgatgagaacggattaaaaccgaatcaagtatttttgcataatcccaatttgctgaatgcggtttgtctggatcagacagattcattgatgattcggaaaacatttttaattagtcaattatgtgccgtggcaaaattgaatttttctggaaatgaagatttgttcgtgaaccagaaatatgaggtttccgtacggcaacaaggagataaagggcgagtccgggattcagtaattctgatgaccgatatgatcgaacgaggtaaaaagaatgttatacccttgtggcttgccggttttgtgtattgagagaaataaaaatcttaaatagagtgatcaactattgttagttaatgtttaaaaaaatggcaaaagaaaagaaatttatcacatgtgatggtaatgcggccgctgctcatgtagcttatatgttcagcgaggtatcgtgtatctatcctattactccgtcatcaccgatggccgagtatgtagacgaatgggctgctaaaggtagaaagaacctgttcggggagacagtaagagtgatggaaatgcaatcagaggcaggtgctgccggagctgttcacggttctttgcaagctggtgcgttaaccacgacttatacggcctctcagggattattattgatgattcctaatatgtataagattgcaggagagttacttccttgcgtgttccacgtgagtgctcgtgctttggctgctcatgcactttctatttttggtgatcatgcagacgtttacgctgcccgtcaaactggttttgctatgttggcttccggttctgtacaggaagtaatggacctttctgctgtatcacacttgacggctatcaagtcaagagttcctttcgttaatttctttgacggtttccgtacttctcacgagatacagaagatcgaagagttggatatggaagatattcgtggcttggttgacatgaaggctttgcaggagttccgtgatcgggctcagaattctgagaaccctgtaacaaagggaaccgctcaaaatccggatgtgtatttccaggggagagaggcggctaacaagttctacgatgcagttcctgatattgtggctggttatatggatgaaatgtccaagattaccggtcgtacctatcgtccgttcgtttattacggagctaaagatgccgagaatatcattatcgctatgggttctgtaaccgagactatccgtgaggtgatcgattacaagcttgctaatggcgagaaagtgggtatgatcgctgttcatttgtatcgtccgttctctgctaaatatttcatggaagctgttcctgctacggtaaaacgtattgcagtgcttgaccgtacgaaagagccgggtgcaaacggagatccgttgtatcttgacgtgaaagacgtgttctatggtcagaagaatgccccggtgatcgttggcggacgttatggattaggttctaaggatgtaactccgggacaaatcattgctgtttacaagaacttggctatgaacgagccgaagaaccaattcactcttggtatcgtggatgatgtaactttccgttctcttcctattgaaccggaagtaaaagtgaactcagaccacatgtatgaggctaagttctacggattaggttctgacggtactgtaggtgctaataagaactctatcaagattatcggtggagctaccaataaatattgccaagcttatttcgcttatgactctaagaaatcaggaggttttacggcttctcaccttcgtttcggggatgatcctattcgttcaacctatttggtaactactcctgacttcgtggcttgtcacgtgcctgcatacattcacatgtatgatgtattgaaaggtttgaagaaaggtggttctttcttgttaaactctctttgggatgaaaaagaggtgggagagcatcttccgaatgcaatgaaacgttatttggctgaaaacgaaattaatttctatattatcaacggaacgaagatcggtcaacaattaggtttgggtaaccgtacgaacacgatcatgcagtctgcattctttaaaatcacgaacgtgattccttacgatttggctgttagtgagatgaaaaaagctatcgacaagtcatacggaaagaagggtgaggctattgtgaagatgaactatgctgctgttgatgcgggtggtttggctgaaaacgtagtgaaagttactgttcctgctgaatgggcaaacttgaaagacgaagtatgtgtttgtgacgaaaaccgtccggaatttatccgtaacgtggttgacgtgatgaacgcacaaaaaggggatgatcttcctgttagtgcatttgctggacgtgaagacggaactttccctgccggaacttctaagttcgaaaaacgcggaatcgctattaatgttccggaatggcaagtgaataattgtattcaatgtaatcaatgtgcttacgtttgtcctcacgctgctattcgtccgttcttgatttctgacgctgaattagctgccgctcctgccggaacagaaaccaagccggctattggtaaggaacttgcaggattgaagtttaagattcaagtatctccgttagattgtacgggttgtggtaactgtgccgatgtttgtccggctaaggagaaagcattggtaatgaaaccgcttgaatctcaagaatctgaaatcgctcgtttcgaatacatggataaaaaggttggctacaagaaagtagttgagccgaataacgtgaaaaattctcagttccaacaacctttgttcgagttctccggagcttgtgctggttgtggtgagactccgtatattaaattaattactcaattgttcggagagagaatgatggtggctaatgctaccggatgtacctcaatctatggaggttcagctccttcaactccgtattgtaagaattatcaatcaggacgtggtgtggcttgggctaactcattgttcgaggataatgctgagtatggtcttggtatggcagaaggtaataaccgtttgcgtgaccgtgctaagagattgttggaagaaaacttgtcaagtttctctgccgaaactcaggctgctgttaacgaatggcttgctgctttcgaggatggagagaagactttagctgtcagcgacaatatgtctgctgcgttagctaaagaaaattcagctatcgctaaagagattttagaattgaaggcttacttcacgaagaaatctcaatggatcttcggtggtgacggatgggcatacgacatcggttacggcggtttggatcacgtgttagcaagcggtcataacgtgaatgtattggtggttgataccgaggtatattcaaatactggaggtcaatcttctaaatcaactcctgttggtgccgtggctaaatttgctgccagcggtaaacgtgttcgcaagaaggatttgggtgcaatggcaatgtcttatggttatgtgtatgttgcacaagttgctatgggatctaaccaagctcaatatttgaaagctttgaaagaggcagaggcatatgacggaccttcattgatcatcgcttacgctccgtgtatcaaccacggtctgaaagcaagcatgggtaaatctcaagctgaagagaagaaggctgttgaatgcggatactggcaattataccgttataacccggcattggaagaagagggtaagaacccgttccaattggattctaaggagccggattatagtaaattccgtgactatctgatgggtgaagttcgtttcaactccttgttgaaggctgctccggaagaagctgagcaattgtttgccaagactcagtctgacgctaaatggcgttatgaaggttacaagcgtcgtgcagaaatgaaatacggcgagtaatactccttaataatagaaaaagatcgctcggaatttatttccgggcgatcttttttgtgtgggattccctgtcaagctataaatacaactcttttttgttatccgtgcctccgttttaatatattttgaaaaatgaaacaaaatgtgcctgcatatagtaaaattacctaaatgcgggtcatttgttaattttaattacttcattagaggcataat

SEQ ID NO: 53 - DNA, 14613 bp, Butyricimonas faecihominis
gagttaaaattattaattttgttcctgcgttaaaccaactaaaatatttgaaacatgacgattgaaaattacattcaagccggcttacagcatttgggggtttactcggaaagtatttccgacatcatctacttcatggccctgcttgtgattatcggtatcatcaactggattatccacgtgcttacccgccaatggctagcacgtatcgtactaaagctgaccaaacggacggcaacgaactgggatgatctcatgctcgatcaacgattctttaaccggctgggacttctcatcgcccccatcgtgatacaaatcgtattcaaggaattcgagtggactcaatttgccttccttatgaaactgatcaatgtctggatcacactctccttcctgctcatcgtgtcgagcatactggacggcatcaaccggatatacgatagttacccgatggccaaggaccgcccgatcaaggtgttcatccaagtgatcaagatatttttctactgtgccgccaccatcatcgtgatcagcatactgatcgatagagaccccgttgcactacttgccggactgggagccatctccgccgtcctcatgctggtattcaaggattctattctagggttcgtggccggaatacagttaatctccaaccgtatggtaaacatcggggactggattgtcatgcccagtagtaacgcggatggtgacgtgatcgagatcaacctcaccaccgtgaaagtgcagaactgggacaaaaccatctccacgatccccacttacaagctcgtttccgagtcattcaccaactggcggggaatgcaggaatccggcggacgacgcattaaacgatccgtcaacatcgacatctattccgtgcattacctcacgaacgaagaccttgaaaacctgaaacaatcagccctgctcaaaagctacatagagggaaagatgaaggagctgaacgagtataatgccaacgtggaaaacccgcttgacaaacgccgcctgaccaacatcgggactttccgggaatacatggaggcgtggcttgccgccaaccccaacatcaacctcgacatgacccacatggtacggcaactacaacccaccccgacgggaatcccgttagaaatctattgtttttcggcacaaaaacaatgggtaatctacgaacgagtacaagccgacattttcgaccacttgtttgccattctcccacttttcaaactgaaagtgttccaatacccaacaaacatggagtggatgcaggaaaactaaaagctataaactaaaagttggaagtcattcacggcctccaacttttatcttttagtttttatctttctagtagcaatcccaatgatacaacacccggctaaaatcccgtttagccaagttctccggacggataaagaaattgcacacgccggaatccccccacacgatcttgtaatcgtccgtctcgtccgaatccaactggaacaacaagattgaattttccttcaactcctgatgatactcccgcgggtcaagctgcgtgaagaagggataccctcccatgcgatgccctcccatatccagttggtcgtaaaccttatccagctcatcctccggggctcggtccagagaggccacccgggcatcgggatttgcctcgttataggcatccaacagcaatttatcgaaacgatagtctccgccccccatcggcatggacgatttctcgaaattcagtcttaattcaccatccaccgggaaaccatccgggtactccacgccatctgtcggcaaaacggaaagtaaggccgtctcgtcttccacgacttcctcgtgataaatcacccggaatcccttctgctcttccggattctcgaaattcaacccgtgggcattttctcccgcaatataaaactggagaattccctttgtcgggaaaccatccaacggcggcatctcgctgaaattcacctgtgccaagaaacgcaagggcaacaactttcgttcttccacctgttcaacagcctctcctgcggctgcggaaggcacggtggttgtgcctccatccaacccggcaaacggcccggctaccacgctcgcagccaccgcaggtgcttgtccttccgtgacaaccgtactccccgcctcctcgtaaggatagtcaaaccctttaggcatataaggcatccccccgatcttgctctcccaaggtttagtcgttccttttgacgggatcagcgtcacgcactctgtcgttgttttctccttgataacccgcagtattcgatctgctgaagtctctttcttcccttcatttcctccacctccgaatattttattaaagaatcccataatatcgtcttattaaatgatttccgtgccaaaaatacaaaaagaaactaaaagttaaaagctaaaaaataaaagttagaaataaaagcctagatttctattaactttattttaagtataagcacactcattaactccaaatattcgttaacataacacatttttaagtggctgaaataaagcatattacaacaaatctacgtttccaccctctcgtaacccgcgccagcaaagggctcagaaggttcatagcctgcttaaagcctgctaaaagcttggtattagcctgctctacctaggctagtaccaagcctaaaacaggctacatttagttaagcaaccagcctaccatccagagagaatagcaagtatatccaaaaaatagttctttttaacgaatctccaaacgcagtaaagtcatatccacgcaaggcctcccgttatcgatgatcggttccgggtaattatccgtgaagaaattcttcaccacgtggtcctgcacgaaaccgtaacgctcgtaataccccacgccaccctcgctcgtccctacccacaagcaagaaaaacgatctttatagtaaccggccagaaaagaaagaatgtacattccgtacagtttcccttgatactccggcaacacggccaaattcttgatttcccccttttcgtcaacgacagcctccccgatcaccttcccgtccctctccaaaacgaacatatcgctctcctccaagtaacggtcaaccatcgcctcgcacgggtccgcatccagtagaagatgaagatacgctttcttatcccccgtcacctttaccattcgctgcgggggattctttaaacgcaggtataggatcgggtaaggtttcccgcaaccgtccgtttccgtgcggcgttccacctcaaaccccatccgggcataaaagctcacggcctgcccgttttgctcgttcacggccaccgtctccgcgtgaacatcctcgatcgcccactcgataagatcacgaccgatgccctttccccggtaatccgggtccacgaaaagcatctcgatagatgtcatgtcataccccaaaaaggctacaatttcatccccttcataatgaagtagcaagggcaacttctcgcaattctcacgcacaaaaggcctgtaaaactctatatctccttccacgaggaaatcatgggtggctcgcacggaggcctcccataattccacacatcgttccacgatttccgctcggtttctcttttctttcattgcatattctttgataaccacatcccgatatcttgttttgccaaggccgccgccatcaagtccgggaacttgtccggggtacaggcaaatgccgaaacacccagttctgccaagaattgggcgttctccttgtcgtagaaaggcgccccgtcgtcattcagagccaacaacacgatcaactgcaccccactctgcacgagagaaatcatcttcttgcgcatctcccgctcgttacccccctcgcacaagtcggtcacgagaaccagcaccgtgtccgcaggacgggtaatcaccgtctggcaataccccaaggcccggtcaatatccgtaccgccacccagttgcacgccgaaaagcaagtccaccgggtcctgcaaatcatccgtcaagtcaactaccgaggtgtcaaacaccaccatacgggtctgcacggacgggatcgaggctagcacggagccgaatattcccgaataaaccacggacgcccccatcgaaccactctggtcgagacacagcacgatgtccttcaacgcccggcgtttccggccgaaaccgatacgaacctccgggataattgtcttgtattccggctgatagttccgtaggtttttctcgatcgtcgtcttccaatcaatctcgttgtagcggggatttcgccgcctgctggaacggttcaaagccccggtaacggcctgttgcatgggtgacgatagctttttcatcagctcgtccaccactttacgcaccacttcccgggcaatagccttgttcttctccggtatcacccggctcaaggacatcaacgttgccaccagatgcacgtccggcaccaccgattcaagcatctctttctcggtcagtaacgaagtcaagttcaatcgcttgatagcgtccttttgaatcacttgtacaaccgtctgcgggaaaaactcccggatgtctcccaaccaacggcttaccttgggagtcgaaccactcaatccccctttacggtcactatcgtacaaagcattcaaggcagcatccacgcgactctcctcggcagagagagaaactcccgttccatccgcctcgtttcctcccagtattaatcgccatcgctttaaaagagcttcttccattttagattttaaattttagattttaaattcctcctacacaggccaacgtttttttgatttcctacttttatcttttagtttttatcttttacttttctcgttccaaatgcctaataaccgctcaatcaacggaattaccttccgggcatcttcaccgttaaacgcctcgctttccgcatttacccgtttcacggcagaagttcccttggctttctcaccgagtttacgacgttccggcaggctgtactcgctgaaggttctacggagtatgggcaataactccatgaaactcccgtcgttcagagtggccagccagctattcaccaaatcccataactgatcgtccagcaacaagatagtacccgatgatttaaggaatccttcaaaccaaaatgccgtgtcggatgccgtgttcccgggagacgtgtaataactcaacgtttgggccgtttcctcgtatccaaggatattcttatcccgcagtaaacgagtacaataaccggacaacaagggatgagaaccccgtgcttcccggatcttattcaccagttccgtccacatctccatcaatcccggttggttcgccgtggccatagcgtaatcgacagccaccaatcgctccatgacctctgctgccgcatcctcgtccacgttcgtgcaagccagcactcccccggcaagcacacgggccatcatggcgttcaacatatcgttaaccttcccgtaatccaagttccgcacactcccgtaacgaaccacgttcaccataccggggatggtcttcatcatctccagcacatcggttgtcgaggcggaaagcgcatccagccgggaagtcatttcttccacgagagcgggcaaatccgcgggaatcacccgttccagcaagtccaccaactcggatatagacgtgatgtctttcgacaaatgggtgttatacgcgataactgcctcggacaaagtatttccccacacggccttctcgatcacggcaagggtctgctccggttcgtaataaacggaccaagcctccttgaaagtccccttcccgtcaacccgtaacggacgggccatctttataccgagcaagttcaggcggtggaaaaagatactccgctccaaatccatcggtttccgcaaatccagctggaattccttcacctcggtcgtgaggggtaagcgcaagcgtttcaataacttctctacatccacgagaagaggaactttaggcacatcatccggtacgctccccatgcgatcactaatcaccaaggcctcccggatcacttgtaacagaatcggatcaccgaatcccatcaccgtggtcacggcatcattgtattcctccaaagaaggacggggcaaaccgcgtaacgcggctgcaacttgtgccaaacgcacggcctcgatcacgtgagccacggaaatatccattcctttcgtccggaaaagggcggccaccttgctcatccaacgggttccgtcgtcatccggataatgccataaatgatcgtaccaccccggggaaacgattcccgccccgtaaccgctccggaaagacaaccgatcgtaagtccacggaatccacgtacactccaccttcactttcggtaatcccttcaataactcgttgtcttctttctgcgtgggcatcttctccagacccggcacgtgccaagccccgcacaccacggctatacgtttgaaaccctctttttgggcagcccggatcatcttacgcatccacgcctcccgcaacaaagtctcccgatcggtcttggggaaatactcccgtaacaccgaaacagcctctttcacggcggcaaacacctcctcgttacgctgacgattctcaaagttcacttcccaccacaattccggatcatcgtacccggccgctttcgccagatgagcaaaaggatcaacgggcagtaattccggaacgtcaactacccgaacttcttccggggtctcggttgcggacgcctccccctgtacttcatcgcactccccctcttcgccggttttcccggccacggcttgttcctcccgttctttccaaagagctaaatgatgcaccaaaggtaagtcaaaaaagcgtaatgacacctcctttttcatggcatagcacatggcctgccattcgggtgaaaactcggcaaaaggataaaacacggcccttcgaggctcgtcgggctgatacgccagcaaggccacgggcggtttcatctgctcatgaagtactcccggcaaaagcggctccgcctccgggggaccttccaataaaataacatcgggttccagttcttccaagtacgctcgtacgttcttggctgaccccggaccatgatgccgtatgcctaaaaaatgtattccatcaaccattgtataaattaaatgactacgtgattgtcgattacatgattccgtgattctacaatcaccgaatcggaaatcactaaatcaccgaatcaatccgatttctaaatctaaaactagtcactataacatttccctagatgcccggtagatgtccttccagccatcgcgtcccttcacgaccgtttcaaggtactcctgccatatcacctgatcctgcacggggtccttcacaaccgccccgataattcccgatacaaggtccgtggcgtttaaccggccatcaccgaaatacccggacatggccaaaccgttattcacgacggagatggcctcggccgtactcagcgtaccactgggagttttcaacttggtcttaccatcttcggttgctccctgacgtaactcccggaaaatggtaaccactcggcgaatctcttccagtgcaggtttctctgccggaaggtccataacggcctcgaaactctccacccggcgacgcacgatgtcgatttcctcgtcgatcgtgtcgggcaaaggcaggattaccgtgttaaaacggcgttttaaagcgcttgacaagtcatttacacccttgtcccggttattggcagtagcaatcacgttaaagccccggatagcctgtatttcacgatccagctcgggaataggcaatgtcttctcggaaagaatcgtgatcagcgtgtcctgaacgtccgaaccgacacgggtcaactcctctatacgggccagtttaccatccttcattgcacgcatgacgggagtttgcacgagagccccctcgctaggaccttcggctaataacttggcatagttccacccgtaacggatggcctcctcgcccgttcctgccgttccctgcacgatcaaggtagaatctccggatatagccgccgccagatgctcgcttacccagctcttggctgtacccggcagaccgtacaacaataatgcccgatccgtgaccagcgtggccacggcgatctccatcaaacgacgatgcccgatatacttcggggtcacctcgaaaccgtttgccagtttcccgcccatcaggtaggtaaccaccgattgcggggatagttgccagttttccggtactttatttgtctcgttcttctttaactcgtgcaactcttcctcgaattgctgttccgcgtgttgtcttaataataaacccatatttttactttttgatatttgtctcttatacccaaacaattttagatgaaagaatcctttaaaaagcgctagccccgtgcggctgaaatctaaaatctaaaatctaaaatcataaatctaaaattaaaacgcttgtattatttcctttttcatcaataacagttgttgcaaacgaaccgtgaactcccagtggctagcactactctcccgtgacgcccctaaagtggacacgtaatcatacatcgaggcaggaaggcgtaaagccagcgcctcacaagtcggacgatcgtaataacaataatccatggcgtaaatcatcttcaacacaccccgggagaatttctctccccactcgccgtcgtcctcgccgaaccattgactgatataaaaattccggtcggctttcccgcttaaattcaattgctcccgctgttccacggatagtaagggaaccaattgcatcaagtcggatgactgaagtacccgttcatctttcagcacgtggtaagcccaatcccggtctttataacccagtatcgtgtccgtcaagtaaatatgttttgaaaaagggggtgatttacgcatccgctgagctgccgtctccggatcacaatcgaaaaactcgcaccaaaaggacaaaggcatacattgtgccatttgtcgcaggatataatcactgtcgctctcgcctttattactactcacttcgtttattcctaacttcttgaattcttccgtgtaagcaatcggatccacagaccaaccaagcaaacgacgataatgcaaatgcttctttaacgtctcggcaaacaagtgcaagattcgggattccgggatcatacgtaacagacgcaacgcctcgtcccgcacggtagaactccggtcaccaccccgtacttcctctaaaaaatcctcatccgctaccgacaaaccagtctccagacaagccagaaactccgcacgatgctgggcagactcgtttttccattcagcacgtaacatctcgataccccgggcaggattctcacgacgtacccgtgaaagtatcagtttccggtcagcatgagtggccgtttcccacgtatcatcatcctcttcctgcaaagcggcatatcccataatgggtaataaccaacgtccccggttacccaccagagagattagtaattgccgctcccgttttgccgtctggctccccggttgaaatacccgtgtcagcacttggggcaaatattccggcggaatcaactgttcccgctctgccgctttccggtaccaaaaaagcaacatattagcatacttttcccccagcaaaatacttagtattgcggccgctttctgaccgacataaggccgcatttccggcccagcctctgaaactggaacaggatcttttaacttcaaaggttccaaacccgaacgatagtaagcgaaaaaagccgcagcccccttatagaagacctcctccccgtctgtagcgttctcttttacccgctccaacgtcccggcaagatcttccggtaactcgccggaagtcatctcccggttagccgttcccaacaaggctatatttatgacattatccgttatactcattgcttaacgtgtaatatttatcttctatccataacgataacactctccatgaccgctccccggcaaggaagaaccccgtgaattcccgtccgccggtcacggcaaaacctttcaatttgccggcctcacccaaggttaacggaatcagatactcgttgctatccttaatccacacctgtttttcgtgcatcacaaggcgtacctcgctaaccaacacgggtacttcatacgtgaaaggattacgggtcatactctcccgatagacttgcatggcctctgccaatcccgcacaacatccttttccggatgggataaagggttctcttgtacctttctgttcacggaataatacccgggtcggggtcacgcccttgtaaaacgccacatcagccgcaacaacactacccggtaataaagcggtttccgtcaaagctcccggtgttaagaattgcaagaagagcgcataacgacaggtttgtcggccgtacaaccaattgtactctaccgtcaaccgatcttgttgcagactttccgaggcaacaaccaaccaatcgtcggaaacctgttccccgttagccaacacctcctccttggcctgcgggtatcccacgagagtacggatttcatcctgccattccggggacaactgatcgaggtgcttgtagctttccgccacgaggtacgcccggcttgctcccgccgtcagctcgtacttccagtcctcaccgaaataatgaatctcctgtaactgccgcatcatccccgccaaaccgggagcctgtgcatcgaccatacgcttggaaatcccagcaaacagggcttgcgcccgctccggaacgtttaacagaccacttcgcacaaggtcctttaaccacccttgcaaatcgtccacaccgttcagcacctttttgtgtcgagcctcctgcctctttgcctgagcctctacatccacgggtttatccgctttttccttcttctcctccgcttttcccgcacgtttctccaaccactcctttacccagtcgggttcttcccctgtcgtgaataaatccggctgagaagcatataaaaacaaaagccccaagctatgtttacaaggaaacttatggctgggacacgaacatttgaaagcgatattctgcaaatcgacctgcgtctggtagggattcttaccacttccctgacaatgcccccataacgcccggtcactcgctccccgtaacacccatttcgccgccgaggccaatcccttcccggctttcacggatgccgcatccggggccaattttataatttgatcttctgataattgcatgtactccaaatttcaatatccattccgacaaatttaacgcttaatccgagacttgaaacaccttcaaccattatctactaaaaaaagattcaggtatcagccatcttacggctaaaacctgaatctttgtatgatcagaaaacacatcctttacttcatccgcctcatcacccagatcacgcaaccacacaccacgatcagtaccggacatatccaacgcaagaatatcttgatccacgcaaatcctcccggggttaggtacgtgtcattatccttggctgccggacgactaacatcaataggatactcatcgtaaacaagccaacgaaacattccatccgtaagtgcgtaattcgagcgacggaactctcgatttgctccaagttccccattactgatacaatcggcatccccaagcacaaagacacgttgttcctttccccgcacgtcacgacgcaaggcataaccggtcacgtaggctttttcctcctcccctaatgccgtgtttagacggggttcttcgagagaaaagttcttcgtttccaactcattccaacacccgtgagttgccgtcgtgaacacgggaatcacctcgaatcccttattttccgtctcgcaaatagctgccgcagaaggcatcgtgaggacattacccaattccaccatacgggcaaaaataggttccaaacttgccccttccggtgtgaatgttgcccaaagataatcagcaacatatccctcacgaggctgcaccagcacaccgggaacaaaagcgaggcccaattgttccagcacgggtgccatgtactcctgccgacgcggttccccgatcaccaccaagtttcccccgtgttcgatatatcgtttaatttgaatcaattcatcatccgtcaaagcttttcgtaaatcagcgataacgagtacatccacatccgatggaatatctcccccttccgtcagcattagcgtatagggcgtgtagccttgattgaccaacgcacctcttgaatcaagaactgtcgtgaacgaagtataattaaccccagagccatcataaatattgcgttcgccatgtccattcaagaaagcaatacgcggactctcggacaccatagtcttcaatacggcggaaatctccgcctcggaaggatactttccctgatcatcgaacatacgtaggaaagctttctgcccgttctcccgctcgatcaagaacacgtagcggtattcctcggcagagaggtcgatcttctccctcatctgttccggggtgagtatgcttttgggattaatatcggaagtcagcacgagtctctctattgccttatccatttcctcgcgggaaagattcatccctgcactattatcgtaataataatagcttttcagtttagtctccggcttgaaacgagtaaatgtctcgaagatattccgggtattaaaccaattggatggcattccaagatagccaaacttgtcaaggagattaacgtaagaagtaatcgtcaagcctccgtccacctgtttcagtatttcctgactgttcggggtgatcgtacgatccttgttagccgtagcatcgtagaaacacttcaattgaggaatcgtggagacatacccgagtagggcaacacaggctaccaatcccacgtatttgcccactttcacgctcatggaacaactccgacgagcaaattgcagtttcagcaccgagaacccgaggaacattcccgaaacgagaataaaataaagtatatcctcgctacaaatcaatccccggatagattcatccgcacgtcctttaagcgagaaccaatacatcacttcacgcaccccctcaatatgttgccacaagctaccgataaagtttaaaaagctaatgaaagttaacgttcctaaagccgcaatgatctggtaagaagtcaaggtcgacatgaaaagcccgatagccgcgtatgtcgccatgagcaagtacaagcccaaccaaccggaaagtacgagcgaaagatcaaaatctttgatcgagaaaaacgccacgaccaccagtaccaacacgctccccatcatgatcagcccataaatcaacatggaaaagtattttcccaatatgatctgcaaactactgattggggaagaaaaaagtaatttaatagaaccactactatattcccgactcataagccccattgttaacaagggaatgtaaagataaagggtagattggatggttgtataaggggcgaaaccaccgatcacgaaaagcatataactctggtacccctgcatttgtccaagagttttcgcgttaacggtatattccagtaagttcgcaaaactaccaaaaacctgaaatacaaatatgactaggattaaccaagctatcggagaataaaagagtgtacctaactccgattttgctattttatatattactctcataacgtttattaaaatttatcgatcaatctttttcctgacaactgggcaaaaatctcttccaaagagattctttccaacgtaatctcgcttaatccccaaccatgacgcacacacgtgtcggccaccacctcggtgatgtcgtcccgcttgtcaaactgcactctcaaggtgtttcgatccaagtgtttgagacgtgtcaccccggggatagccaatatatcctcgtcggcaggcgggttgtcaagtttcacgataaacgtgtccggtttcacgtaattatcgaattcttccagcgtcccggaaaagaccagatgcccgtgttctatcatcttgatatcgtcgcacatagcttgcacttccgacaggatatgcgtggaaagcaaaacggcatgatcaacagcaatctccttgatcaacttgcgaatctcaagaatttgattcgggtctaacccgttcgtcggctcgtccagcaccacgaatttaggactatgtatgatggcttgcgctattcccaaacgttgttgatacccgccggaaagattacggatcaaccgcttgctgaaatgagcgataccgcaccgttccttggccatctctacagcttgcttgattttcttgggttccatcaatcgcaattccgcacaaaattcaagatattcatcaaccgtgtggtccgaatacaagggtggtttctgcggtaggaaaccgatattcttttttgcctccacgggattcttgcgagtatcaataccgttaatatacaccgtgccatccgtttgattcaacacgccgcagataatgttcatcgtcgtggactttcccgccccgttagatcccaataatcccaagattcccttccggttcacctcgaaatttatatcttgaattgcccaatccaccgtgtaacgatgggacaaatgctctacttttacaatagattccatatc

SEQ ID NO: 54 - DNA, 14601 bp, Butyricimonas faecihominis
ttgatgaactctattatttgaacgctagatctaaggttttacttgttcaagatcatggcgaagttgtatctagacgagtaatttcttcatgatatgggatacacaataaagacttgggataattaaaattgcatagataataatatgaaaataacatagatatgagaaaatttgaagaagggcaaaaagtacgttgaagtggaggaagtgcaacaaaataacttttgagggaaaaataacaagtaataattacctatatgggagctgctaagtttcaaataatacgtaaatgtagaatctgtggtcaagagtttttagctaagaccatagattcatggtgttgctctgagaggtgtattagagttgcgagcaaacgtaaaaaagatgaagaggcaagacaaaagcgtttggacgaagttgtaaaaaatattcccaaaggtgaagactatattaaggtgtccgaagcttatgctttgtttggtattagccgtgatactttatatcgcctgattcgcaaagagactattagacacatcaatttaggtacgaaccaaatacgtgtaagcaagtccgaattgatgaagttatatcctcttcgcaaaaagacatcagaaaaaccaagagccattacaaagttatatagcttagaacccaaagattgttataccattggagaaatatccgaaaaatatcgcatccatgagagtagtgtatatcagcatattcgaaaattctctatcccaaccaggcagataggtaattatgtatatgttcccaagaaagagattgataacctatataaaggagagaagaaatgaaaaaggcatttgcaaatacacgtgtaacagtaaagcttcgtaaatcagaatatcgtgaagaatggtatttgtatcttgaggcatatcctgtttttgaaccaggtaatgatacaccacaaagattgcgtgagtatttgaatcgcattattactacgcctgtatgggataagtaacgtaatgcccgaacaagtcgtacgggtaaagtgacttataagcctaaacgagatttgaatggagtcattctatgtaagtctcaattggatcaggagatgtgtatctatgccgataaggtaagaagtatcagacaaacagaatatgataatgcagccctatattccaataccgattctgagcaggctcaacaattagagcgctcacgtagtaactttctcgattaatcaagtacaacgtacctgtcatgcccgtagttctgaatccatcatcattaactggagaagagtacatgaacttttaaaactatatgtgggaagtgatactattccattctcgcagatagacctaaaattcatggaggcattccgcacattcttaatgagtgtcccacaaggtggtggtaaaagtggtacgctatcacagaatacagcatccacatacttttctattttcaaagcatcacttaaacaggcattcattgatggctatttgaccattgacatctctgccaaagtgaagggtattcaggagcaagagagccgaagagagttcctgaccgttgaagaactgaatagcctggcacaggctccatgcgatccactattaaaacgtgccgctcttttttcagcctcaactggtatcagacattgcgatattcaaaaattaaaatggtcggaagtagaagagtttaatggtggttacagattgaactttacgcaacagaaaacaaaaggtgtggaatatatgtctatctccgagcaagcttttgaattgtgcggtgagagacaggatggcgacttgcttgtatttgtaggcctaacagatccttcatggattaatcgacctgtgaaaaaatgggtcgaggcagcaggaatcaagaaacacataaccttccactgcggccgtcattcctatgcgacccttcaactggctggtggtactgatatctataccgtcagcaagatgcttggacatacaaatgtaaaaaccacacagttttaccccaagattgtcgatgccaagaaagaggaagcgaccaagactattaaattggatttgaatagtactaaagaataactaacctatagatttgttaatctactccgacaaggatggattccagcaggaactgcatgaactcagaaaacgtagtgtaccaagtaaaaattcagggaagccgtaaatgacttccttgaatgatgtttttatagaaataagtcctttaatctctcaaacaagctaatggtacaacttttacaccatctggacgagtgtaagccatactgccaccagtaagagtgattaataagtcaggttctcgtagtgggacttgtttctctccctcattatgttcttgaatgagtcttttgatttctaggagatgttttgctccatcatcaatttcgtgactacctaatttgcattcaattagcgcatagcgtccatccgataaatgaagtactaaatcagattccagaccatagcggtctcgataataagatatatggctatcaaaatctgctgtgtatgcccttaaatcacgtacacacatctgctcaaagatgaaaccaaatgttttcagttgtgtttctaaaacctctgcatttaatcctaatgctgctatagcaatggatggatccgtgaaacaacgctttggtgcgcttcgaatagcggttttacttctaatagcaggacaccaagcatcaatatcttgtatgacaaataatttttctaacgcagtcacataatcatcaaaggtatccattgaaagagaaacatcttcggaaccagtaacatcagcaagaatattgcttttttttgccaaagtgctgatatttcttgcatacgacttcatgatcagtttcgctatcttagcatttctttgtttaccatctacagctgaaatatcattttcacatacactgtttacataatctttagcaatgagcatacatgccttttctcccatttttaaagttgcaggccatccaccgcggcacgcaacgcgaataagttcaggtatgctaagtttactggtagcaccatcaatatcataagcagagttattaaataattcatggattgaaacctctccagatgaatctttagattcccatagactcattggatacatcttcattcgagtaattcggccagttccggtatgctttatttgagctttatctaccgtgttacttcctgttaggatatattgcccaggaatacctccactagtgtcaacggcagtacgcactgcatcccaaattttgggcgcatcttgccattcatcaattagtcggggcttttcacctttaagtaacagagaaggcattatgttcgctgtattgatatattcatctgacttgtcagggtcttgcattttgataacgctttttgcatgctgctcagcagtagtagtcttgcctgtccatttgggaccctctataagaattgcgccaaagacctcaagtctttcttgcaacattgtatctgctattctaaataggtattccatacattagtaatattatgctgcaaaaataatgattttgtttgtattacacaaggtgttcggcatttttgtggtgttttgatcggtattcttgtggttttttaatcggtattcttgtggtgttttgcttttgacttgtgataaattcagcaaataaattcttaatattgtttgaatcaaaaattttccctacctttgtactcgcaatggtttccgacttgtaccatgtggtcgcaataggaattaaaagggaatgccgtgagaatcggcaacagttcccgctgctgtaagtctcaatctccttaattggggatatgatgttaaagtactctttgccactggttttcagaactgggaaggcgctttgacagagacaagtcagaagacctgccttgcgtatgggatttacagtctacgggtttatggactaagaatcaacaaataaggcattccctttctggctccaaatcactgctgaaagtctattgcaacgtttgctgtaaatccgattattaactttttaatattggtttatagcgtatgctaaggctttatgtaaaaattctatctattctttcactacttatctgtagtggaatatatcccttatttgctcaagaaaaagatacgctctcatctactcacacattagatgaagtggttgtttgtgccgaccggctacaacgtgaaacaatccctgttcaggttttatcaggagagactcttaaaaaattaagcgtccactccgtggcagatgctgtgcgctatttttctggtgtacaggtaaaagactatggaggtattggaggacttaaaaccgtcaatatccgaagtatgggtagccaccatgtgggggtattctatgatggcattgaattaggcaatgctcaaaatggagtagtcgatttagggcgtttctcactcgataacatggaggcagtaaccctccatacaatcaaaaatgtagagggcaagcgcgacttcagagtattagctaatgccttttatgctaacgccaatcccgaccctaatgcgccagttggtggaagttgtgagcctggagtgattatggtagcatacgatgccaataaagatggtgtgcctaacgataatgagtggtacgaaatagcagctagttcacacgttgatcctacaaaagagacattctatcaaaaaatcaaagatgcaggatttgatgtaaacctctatcgtgattacgagattacgtaccataaaccagccaaggagccagcgtcaaaagatgaatggtctacctatatcagttgggaggacaaccagggccaaaaggactataaagtgaagaatcagttccataagcaatgctactatccgctatggacaaaaggagataaactaacattcaagggtacttgtctgccacaaaatgcgatgaatgaaagtggtacaggaacttactttgttctctataaattcctttatggctatgccgacaacgaaataaattcagctgatgattcggcaattgatattagttgggccgtcaataacaaaggtcagtatgtagagttgccaggtgtggactttatcaagatttacactggcgtaaaccaggaaaatggctggttgggagaatgttcaacagaaataacaggagtggaagatttgcacatcttaggtgtggatattgatactcgcaaataaattattaatcatggaaaagaaaatcaatttacgctttattgtagtggtaggcattattttggtagcagctctgagtcgtttagttcctcaccctgcaaacttttcgcccattggtggtatggcactatttggtgctgcatatttcacgaagaaatattggacattcatcataccgattgtgtcaatgtggattagcgacttaattctcaataatgttgtgtatggtgagtacttcaaccattttgtatggttttatagtggctcattatttgcctatggagcatttgccttgattggagtgatgggcttattctcgttgaagaggataggcattaacagtgtgctcttatcagcattgtccgcttcaatcattttcttcgtagtgtcaaacttcggagtatggctatcttcaggaatgtatcctcatccttggcagggattaacagcctgctatattgcgggaataccattctttggtaataccatattaggtgatttatgttactctgcgatcatgtttggcgcttttgagactgcaagcaaatatgtgccacagttaaaattggcataagattataatcagcaaccaaatctctcgctggtgtcgttactggcgggtggtttacaatttatactattatgatacagactgtagtaaaacgtgacggacggattgtgggctttaatgaagagaaaataattactgctatccgtaaggcgatgctccataccgatatgggtgaggacatggcactcattcgacaaattaccgaccatatagccatccgtggtgaggcgcaaatgaccgtagaagccatacaagatatggtggagatggaactcatgaagagccgccgcaaggatgtggctcagaaatacattgcctaccgtaatcaaagacgcattgcccgaaaggcgaagaccagagcaatgtttcaagagattatcaacatcaaatcaaatgatgtgacacgcgaaaatgccaatatgaatgcagacactcctgcgggcatgatgatgaagtttgcaagcgaaaccaccaagccttttgtggacgactacctgttgggcgaggaggtgctggaagcagtgagggaaaattacattcatattcacgataaagactattatcctacgaagagccttacttgtgtgcagcatccgctcgatcacatactgctgaacggattttcagccggtcatggagagtcgcgtcctgccaaacgcatagagacggcaagcgtactggcttgtatctctctggaaacagctcaaaatgagatgcatggtggacaggctattccagccttcgacttttatctggctccgtatgtgcgctttacatttatagaggaggtgaaggctttggaagaaatctatgaaaaagattttacgcacctatatgaatgtaacatcaaagactatatccaactgccattgacgggtttgacgggtgatgaacgggtgatacagcatgccatcaatcacactgttaaacgtgttcatcagtcgatggaggcctttatacacaacatgaacaccatccattcacgtggaggcaatcaggtggtgttcagttctatcaattacggtacggatacctctgccgaggggcgatgtatcatccgtgaactattggagagtacctatcgtggagtgggtaatggcgaaacggctgtcttccccattcagatatggaagaagaagtgtggagtcagttatcttcctgaggatcgcaattacgacctctaccagttggcgtgtaaggtgacggctcgtagattcttccctaacttcctgaatctggatgcaacgttcaatcgggatgatgcctggaaggagaatgatcctaagcgctatatgcacgaagtggctaccatgggatgccgcacccgtgtatttgagaaccgttatggtatgcagacctctgtggggcgtggcaatctttcgttcactaccatcaatattgtgaaacttgctattgagtgtagagagatagctgacaaggaacaacgcatcgaacagttctttgccaaactggatagtatgcttgatattacagcaaagcagcttcacgaacgtgtggaatttcagaaaacggcttttgccaaacagtttcctttgctgatgtcatctctatgggtaggttgcgggcagttgaagcagaacgataccattgcttctgttatcaatcaaggtgcgttgggcatcggatttatcggattggctgaatgcctggtagccctcattggtaaacatcatggcgagtcggccgaagcgcaagagttgggattacggattataacttacatgcgtgacagagccaacggattttcggaacagtaccagcacaattatagtgtattggctacccctgccgaaagcctttctggccgatttacccgcttcgaccgcaagcaatttggtattctcgaaggtattacagacagagactactacaccaactctaaccatgtgcctgtctattataaatgtagtgcccgtcataaagctgaagtggaggctccttatcacacactgactcgaggcggacatatattttatgtagagatggatggcgatgccacacacaatcctgaggccattatgcgagtggtagatatgatggatagatacgatcttggttatggttcggtaaatcataatcgtaaccgctgtctggattgtggttatgagaactctgccaaggagatggtagcatgtccgaaatgcggaagccagcgtattgacaaactgcaacgcatcacgggctatctggtgggtagcatagagcgatggaacgatgccaagcttgctgaactgaacgaccgtatcactcacgattaacgccatatggagcatttgctggagcaaaaactctccatcctctctgtcgtagaggataccacggtagatggtcctggatttcgcactgctatctatggtgcgggatgcagccaccattgcctagggtgccataatccacaatcgtgggaactaaacaatggcacactgatgtccgtgggcgaattattgcaaatagtgctggccgatgaatttgccgatgtaacctttacaggtggcgaccccttctttcaagtagaggggtttgccgccttggcaaaggctatcaagcaaaactcttccaaaacaatctggtgttatacgggatacaccatagagcaactgatggccaacccgcgatttatgcctctgctgtcgctgatagatgtgttggtagatggtccttttattgaagctttgagaacagaggaatttctgttccgagggagttcgaatcagcgtatattgaaagttaaagacatattagctgagacatattgatattaagagataatcttctcatctatctcgatcttgtgtctgccgatggtcgaacgtagattctttcggatggtatcaaaggtagaatttgagaaccattcaccaaatgtggccatgacaaaacgagtggttgcatctccacctatattatattgataggctatgttccaggcaaagttcttcaaggaagcctgggtgatattcgagcgcctcttgatccgaatgtctgtttgagcaagagcctcgctatttgtcacaaagtagcggacgcattcacagatttgaaaaacctccatttcatcgaggcttaatcgcatgaaggtatcatgagtatattttaggatggcattcaattttgcatcctgggctttctccctctcaaggttatattgattctgctcatattggtattggtgacagaacagctcaatacgtctcttctggatttcgcttttatctgttgcaactgatgtattactcttatacgactcggtacttcttaacgatgtgcttgcgcctattatatatttagcatagtgcaggcaggagatatagaaaagttttaggaggaagtaaccacctactacaataaaaggaatgtagctccatcttattgataacatatcgcacacaccaaaagagagcatcgatgccagcagtaccgatactgccagccaacgagctaagtgtatattgtttcttatccatatctattgatttttatctcgtcggcaaatatataggtgaaaaggccagttttcgtgtatagaatgttgattctatacacaattctatacacttggggcgaaattcagacaatatactaacgaaaaacgagtaaatagtttcatagagcttcttatatcaccatcaatattacaggctgggcaacccaaaaaacaattgaaaatgttgatctcaaaaccattctcaaaacttttttcatttaaagaatagcgcttcttcgatattggtaagaaatctggagtatgggcaaagaaaatttgtgtacctttgcattgctgtaagctttaaatcatcatatttacaaggaattacagcgatcaatcgtggcattttatagcaaattcgccccttgtaggataatgtacaagatgaattttagaaaccatatctgtactatgtaattataaaacattgataatcagatatagttatctttgagcgagtaaatagattattagaaaacaatttaagaaaaatgtatatgagtaatatgggaataaaaaatgaaatagttatggagttgtctatcaaacttgccgaaaaagaactgtgtgataaccatgatgtgaaagttgatgatattagtgaagaacgagatggttgttattgttataaggaaaattgccaagatgagtttaattcattatatgataaatattataatctattgattaatttttgaagtaatataaagaaagttcaggcgtgtccgcaatgacacgcctttttttgtgtaattggggctgggcgtttaaatgttaacataagattaattataggacatactcccatataaaagatcattatagtttagccacattctgttaaaatataacattccataaatattatggatgcgatcttttttttccgttgtaaatcaagtataaatgagggtttcccgacagctctcagacttgctaaataggttttaatttccttctcagaagtgccgaagcagctctcatttctatacgagagtctggttcaaaaaaatacaacttgaatcacttaaatcaactcgccaaagtcctaaagtgttcgcctcgttatctcttgcctgaagaagcactttaaaacataaatttcccgtcataagctttatttttaccgctcaacaataaaggatctgacaattatttcacgacactcttaacaatctctccgccatttcctccgtttacaaaagtagaaaacttttttacatttatcaaaaccaatacatttattcacccggaaaatcagaaaaacaacaatctgcaaaactttaatcactattgaataaatcatggttattcgcgtgcattttggttaaaaaaacgtttcatcttattacgaattacatttattaatgctacatttgtgaagagaatgaattcattctctttgtgttaatttttgcctcatgccttcgggtttgaggaatgggtttcaaattttaaatatgggttattatggcacaaaaagaaaaaaaattcgccgggagagttccggtcgaaactcttaaagagtggggatttaacgtcgagagcatacaacgaaacgacgagatctggaacgatcttgaaagtggacgaaaaacaaaacaacttcttagattttctataaaattaaataacatggacaaggaggttcctgtcgtttgtcgggttcatctgtatgaagacaaggatgggaaggttataccctttcttcacacggttagagcgtctattgacgcgagtaactacaaggggcatgattttacaaaggctgaagccgaagaattattcaaaaaggggcaaattcgcaagcctgtccttttgcaaatagggaataataccaaaccctgtttagttggagttgaccgggaaacaaaagaaattattcacgtcccggtagaaaacattcacgtgaaaaacaatcttctcggtgctgaaattaaagaagaccagatcgcaattataaaaaatggaggactcatcgttgtggagggcatggttaaaaatggcgtaccactagagcctatagctatccgattcgatctgaataaagatgttaattggggggcattatcattcacaaaagcaacaccggagttactacaagaagctcgacgcgatttagaagaataccatcaggaatctaaaggtacaaaacaaaccgttgatatatcgccagatattaggaacaagatgcttgaagcgatagacaataatcaagccaaaaaagaaaagaataacaaaaataaaggtaggggcatttagttaatcaccttgcactttgaacctactaggaagcctgaataatcaggcttctaatttgttatactcaattttacgagggacaacatcttttgaaaaaaagatgcccctggctaaaatgtcatctcacctacattttcccacgtactattgcacgtgccaggggcattaagccttggcgcaatagtagcataacaaataaatgtaggtgagatgatgcaaagataatgaatatatcacatgaatacagatatactatttcaaaatctttccgaaaatccggcatttaacactcccgtggcagaaaagaccatcaatgaaattaaaatactcgatttacgttacacggaagagatcgatatcatatttatgacaagccatgttgcaaaggtcaagtatggcaaaaaattcaatccaaacaatagcaaacagatcttgtctatcatagcaccttgttttaactatggcggtataattgataaagaggggaatatactcctaacagaagaattaacaaaaaaaatcaaggaacaaactgttgaaattggagaaaatagcttaatttcggacagtcctaataaaatagtggattctcttgaaaaagaattagaaacaaaaacgaatcaacatgaagaaagaaacaaccaacaactcaatttatttaacgacctacgggaacgcggtgaagaaatacctggaaacaacttacccgctaatattccagagccttctgaagatggaattactggattcttattgcctgaagaaagaagagagagccatcgaacagaggaacaagttagtggatcaggaagggatatcgctagtggaagagatgatctgggcagaactgatgaacgtatcgttagaagaacttcaaagtttcataccccaagaggcaataaaaacaactatgtaataccggaaaaaccccaagaactccaaggcaatcggtttcaatataacttgaaagtcttggaattcttattagaaattgaacaagaggggagagaaatcagcgaggatgaaaaagcatttttggcaggatattctggattcgggggatttagcggaaattctacatgatgaaaattcttacgcgttccaaaggctggataaatccacgcgagaaagcataacatccttaatggatgtttttcaccaattggatccggatggaagtaaagggggtattgaatctataaaatcatcttctctaacggcttattacacacctatcgaaatcacaagggggatatacgacattcttgaaaaggtaaactattcaaggggtaccatacttgaaccatcgataggaacagggattttcatgggttcgttatcacaaaagtttaaagccgacagcaaactttacgggattgaaaaagattatatcacggcacgtatagcccaacttctttatccggtacccggatccagaactgcgggttagaaactgcatctatccccaataattatttcgatttagttattggtaatattccatttggagatacccgaatttatgattcgaattgggataaaaatgcaaatccaatttataaagctgcacaatgtcgcgttcacaattatttcacggttaaaatgctggaagttgcttgaccgggagcaattctttcttttattacgacttctgcaacgctcgacacgccaggtaatgatatatcagaagatacattcatgaccatgcagaatttctaggagcgatccgacttcataacaaggcgttcaaggtatcaaacacggaggtcgtctccgatattatctttctccgaaaattcaaggaaaaagaagaaattaaacaatcacatgaatttattgaactctctacaaaagttttaccaagtaagaacaattacaataatcaagctgaagagagttacaatcaatattttcatggtcatccggagatgatgattggcaatccaagagccggggggcagtattctggagaaacttttactttacttcctccggagccctgcgatttaagagaagagattaaaacgagaggagaggccattatttcacgggagatacaagtaggaaatacacgagaaactgctccggagagaaaaatacccacgaaaattgaatacgcatcgcaagataatattcatgttcgtccggggaacatcatttctcaggatggtaaactcggtattttagaagagagttttaatgacgagtacgaaagggtacttgttgtcaaaggcttgagtaaaaatattcccgtgtatcaaggtgaagactttatccaactccgaatcatattgaaccggctcatgcgtgccgaattagaaaataaaccggaagaagaaataaacacggaacgacaagcattaaattcaaaatatgacagctatgtcagacgatacggtagattaagagataagaaaaaacgctttatcgaactagacatcgattcattcacgattctagcactagaaaaatataacaaagaagggatctttgcaggaaaagcggatattttcacgcggcgtacaatccatcttatattcttcgaaattatacctccgtattatcaatgttaaacaaggcgttctgaattgtaggtttacacccagaacagggatgacaagcaacctgttaataatcctgccattgatgtgatatttatcaatggcaggtgtttcatggtattctaatattacattgaattctcgttataatacaataaaccacacaaaataaaactcaatcaatcatctaatttttacaaatatacacacatttacatattatttatcaacaataagttatctaacatatcgaatggtatattcacctcaacatctccacaagcccctgcccccaatacatattttccataagtgaaacacaaattttctcccgtaaaattaagagcagaacatgcagcaacagtcggaacttctgtaaaacaattatctggatttttaaatacttgttttaacaaacgatcaatctcatcttcctgttttaaattcaaaatctcaccattcgacaaaaaacatttatttcttaaatcataatttaatgtataatactttgtttc

SEQ ID NO: 55 - DNA, 14258 bp, Butyricimonas faecihominis
atattatactgctcatctctaaaatgttgcgcttaaagaaaacgcaattctattggcaaacggataattaatacccctttcttggcgaacagtagaaagtcgcataatatcattcatataagcatttactctcaatcgctccattcctaacgtacgaagaatacctttatgctttatatcataacccaggctcacagattcacaggtgaacacgttttcatcttgcacgaaacggcttgtcgggcgagtagttgttttatcaaaaatacttttataaagcgattgatccccttctttccgccaacgatcatcataaatacgacgatccacattcccataaagatcagcattttctactcgatccaccaaggtagaattgtagatctgtccaccaatcttatatcggaaattagcactaaacgttaaatttttataggttagagaagttccgataataccctcaagatccggacgggtatttcccacagcaacctggtcaaacgaattataagtaaatgtcgttaatccctgttttgtcaagtaaagttcatttcccgtagccggatcaatacctaaagaacgaacagcataaatatctgttaaagaacgcccttcttcataaagaataacaggagcagactggttttcctcctctgcttttttaatcacctcctcgttacgctttttcatgaaattactgattttcgtaattttattccggttatgagcagcggaaacattcacactccagtaaatctgatcttgaggtcttttaataaacatcgccttcacggttgcctcaaatccccgattttcagtctccccgatattttccttataacttgaaaatcccgttgaagtagcaatagtaacgtctgccaacaaattatccgtgcgacgttgataataatcgatgtttatcatgtaacgactatccacaaatcctaattccaaccccaaattcaacacatgagttgtctgccattttagatccttatttccaattccttttagccaagcaggaatcaatcctgcataatgccgtccggtctcataactatacattgaagtagcttgaaatggtgcaaaattctgggaagcggtaataccataagaacaacgtaatttcaaaatacttattgctgccattttctccatccaagattcattatggatattccagcccgctcccaaagaccaaataggagcaaaccgattattggaaccgaaattagatgatccgtccactttcaacgaaaaatcaaacaaataacgtcggtcataagagtagttgaatgtccccaaaattccagccagacgttgaataccataagtcgcttccggtcttgaatccttataatattgtttcgcaaaagcaatactactcatattatcattcggaaaaccttccacatctactgttttatcatgatttttactttgagaagcatttaaaccaactacagcataaatattatgtttgccaaaagattgtccatagcgcaaattcaggtctcccaagatactaaaactttctccattggaaaacgaagcttttccccttcttaaaaactcatctggagaatttatcggatcgcccaattcttcaaacatcgtatgtgatgcagaataaaaaagatctgaagaattaaattgtttcgtcaaactaaaacgtcccatcaatgtcagattctccgaaatcgtccattcaatagaaaaattatttgtgaaatcagtatatttttcttcatccacggaatgaagagttgcattataaagaggattcttgttaaattgtgatccttccaaaaagtcaggatatttatcatcaaacaatttcactggacggccttgttcatcatacggacggacataaggattcaatgacacgtattgactaaactccccataaggagaatttttcgattcattagctgtaatttgaagatcattcttgaaaagaagacctcctttacgatattgcaagaaaacacctcccatataattattatgacttgatcctttcatcactcccggtgtcatccgtactgaaaaattgataccataacgtatcaccttatccccaccactcaactcgaaattatgacgatgttcgaaagcagttctcaacggtttacttaaccaatacgtatctactccttccattacattcttcagcattcggttgtaatattctttcatttcaatatcattactcaatgaacgcccctcgaaatgtcccgcatccttttgaagttcaagagcctctctcgcatttaacaaatcatagtctgtaaggtcaggcatcaccacagcgtaatctccattatagctcaatctcaatcttccgatctcaggggcttttgtttcgataacaatcacaccattggcagaacgagaaccataaagtgcggctgcggaagcatctttcaatattgaaatactttccacccggtttggatccaagtcgacaactcgctgtaacgatacttcgaaaccatccagaataaataacggctggttcggatttcctttataatttgcatcaagatccggtattccattcgcaccgcgtacctcgatctccggtaaggcattcgggtctgaaccgttcaaattattctccacgattttaaacgaaggatctagcgtacgaagactttgcaaaatattctgattccctaccattttcagctgttcaccggtcactgttacggaagctcctgtcgctaactctttgctcctacggaaaataccagtcaccaccacatcatctaaattttccgtctgttcctctaaaacgaccactaactctttcttcccttgcaaaatctctttatccttcacctcatccatagaaacttttttcgtttccattcctacaaatcgaaatactaggactacgcccttcacttcaccgggcaatgtaagagaatatttaccatcaatatctgttgcacacccgattgtagtcccctctatcaaaatggtcactccgggtaaaggttcccctgccttatcctttacaattcccttcagtaattgttgccctttttgtaatgaatctgcagtagcaaccacctcatccttaatcacgactacatcgttcataatcgtaaatgtcaaaccagttcccatcaacaccgacctcaatgcattttcaagaacatcattctcaatatttaccacttttttctgctcagacctcactttttctacactgtaaaaaaagcgaaggccagtctgtttcttcaactctttcagcacgtgttcaagcgtaacatcctgcatggataaagacacccgctgttgagtataaccggaagctgataccccgatctgtaacaccaacataaaaaataaacatagcctcatgattaacaagcattttttcaaatgaaagggcacaccacgcccatagaaacaattttttttcatacctttgtaatgtttcattaatttattaatgttcacctgataaatacgggtctagtgccaacaaacacccgtatttattttttaccgattataatcgtttttccttccgtcttaaattttacatctccacccgtttcaataaaattcaaaaatacatttatactctcgtaacgttccagatcacccgtgaaatgataatctttcaccactggatcaacatacacgacatctatatcataccatctttctaatgttcgcataatatccaccaacgcagtattttcaaacacgtattttccttcccgccaaccaacatactgcataacatccaccttcttcattttaatttccccggttttctcctcttgcacctgaaaacccggagtcaagataatctcttttttgttttctccggagacatacatcactttccccatctccaatgtagttacaaccttttgctcatcggcataatcccgtacattaaaacttgtacctaaaacggccacagttcccattgaagtatgcacttgaaatgcatgtagctcatccttactcacctgaaaataagcttctcctttcaagtaaacatccctcgttttacccgaaaaatttacaggaaatctcaattcagtctctgcatttaaccacactttcgtaccatctgccaattccaaacaatactctccaccacgaggaatcgtcacggtgttatacatgacctctgccgtctcattatacagatttgccttataaaccaaagtaccggattcggaacgcaatatcgtcccatcactctcctccaattcttgaatattctcttcaagagaaacctgttttccgtctgctaatgttattaccgcacaactttgccccggacaaataacttctgcaacaactggttccaccttgttaatctgttctggtttattattcatccaccatccgataatacacaaaacgacaatcgaaacggccgtagaaacccaccatccgatccggaatgtttttctcgcgttcttttttaatattttgaatttccgatatgcctctctaccatcaaaatcatccgttccttgcaaacgagccacgatcttatcacgatccatttctttcactccatactcctcacataaagaatctaattcctgtttctcctctttacttgtcatcccaagtaaatccttatagagtaaatctgataacctttcgtatatttttaaatcgtccatcatctcattgaggctttatttctattaataaatccccaaaaagaaaaacgggtaccctaaaaatacatttttttcaaaaaaagattgaaaatataaacaaatctgatttcacggcagccttaataaccgcataagcctcctttttgtgcttcttcaccgtattctgggagatattcaatttcaagctgatctcatcattcgtcattcttttcatactcaatagaatgacttcacgtcgtttaggaggcatttcttcaatcactttccgcaatttcctaatcacctcctcaaacattacagccgacaatgactcggattctatttcatccgtaaaaaaagcccattctttcaagcgcttgtcttcccgctctttatcccgtatttctttcaaacaattattgttcaccgtacggtataaataaacattaaaagcggcaatattctcaaaacataaaggagactcccacaatttaataattgctccttgcaccaaatcctcggcctgttctcggttattcaaaattttcatcgcataatggcacaaaggagaataataatccatataaattctctcccacgccttagcatccttacggtttacaccattaataaaattctgaatctccctatccattatatctaattaacaaacaccctacattctagttagatacaaatatatataaattcgagaaacaaacaaattcactcaaaaaatatccttacttctgttgaaagcggaactcatccaccatatccagtaacacagccccataacgttccacgatctttttcccaactccgggaactgccagcaattcctttgaattcgtgggcagcgtgttactgattcccaacaaagctttctgctgcaataccgtgtacacgggcaatttcaatcgttctgcctccttgttcctccaagcacgaagagtttcatataacttcgaatgtagtatatcaggagaaatctccactttctccgctccggcacgtttcgccttaatcttcaccttcggggcatcaattaacgccttcgccttcgcccgtaaataatcttttacagaaaaaccgttcccgatcactttcaacgtttcaagtttcaagttcacctctccccgaaaacgttccatattttgttccaccaacttcctcacctccttgttatcaatctccggaatagcctcttccaagaattttccaaaaatagacatcgtatgttcccggaaatattccgcccccttcttcacccggtctgcgatcaccgggtccgcctcgtaattcccttcttccggcatcaaccgttccaactggttctgaaaccgttcggccaccgccaacaattcctccgcacacttggctcccgccacccggtaacgttccacccaatcgggatacaaccgacgcaactgctcatccaacacccggtacaaataatgtaacctccaccgaatcgtctcgtaatcgaattgttccagcaacaactccctgaaataagactgccgggcctgttgcaattcctccttattcggctccttctgttccgcctcccgcacgaattcatctattgccccgtcactcaccagtgaacgcacggttactggggaactcaacacaagtccctcgaaggtcttgcaacggctcaacgccacgtacacctgcccatgagcaaacgccgcattcgcatccacgatcgcccgttcaaacgtcaacccttggcttttatgaatcgtaatcgcccacgccgttttcaacgggtactgcttaaacgttccctccaccgtctccgtgatctcccgagtctcctcgtccagcgtgtatctcgtgttcgtccattcctccggtgtcacctgaatcttcaggccatcctcttttcctaccacctcgatggaacggtcattaatagccgtgattttaccgattttcccattatagtaacgcttttccggtgatgaatcatttttcacgaacatcacctgcgccccttgtttcagcaccaacgtctcctccgtgggataagaataagtggggaaattatccttcacttctgccttgaacgaataagccctagtggataattctgccattttcacgtcgttaatcctttgtgcttggtggttatgtgttgtcaacgtgatatacccctcgtcatccgaaggcttaaagcccggtacatacctccggttcaacatccccaacaccgcagcatccacccggttctcccgtacccggttcaacaggtccacgaattcccgatcctgttgcctgtaaacgtgtttcaactcgatcgccacgtagcgggttgctgccaaagccttactatggaaaaagaacgccgatgcgtaatgttgtttcaacaacgcccactcgtcctctttcaccacgggagccaactgctgcaaatcaccgatcaacaacaactgcaccccaccgaaaggctcgctcttggagcggtaacgacgcaacatatcatccaccgcatccagcaaatctgcccgtaccatactgatctcgtcaatcaccagcaaatcaatcgtcttgataatattgatcttttcccggttgaacttgtgcgtgtattgcaatttttcacctcgctccaccgtatccgtacttcccggcacgtatggcccgaacggcaactggaagaaagagtgaatcgtcaccccacccgcattaattgccgccactcccgtgggagcaaccacaatcatccttttgggtgatctccgtttcaattcccgcaaaaacgtagtttttcccgttcccgcttttcctgtaagaaacacgttcactcccgtatattccaaaaagtcatacgccaattccagttgaggattactttccatgaatcaagattttacacgaattatcattctattcggccttcacagacacgcaactcgtacaaaggtagaaaaataatctattcgtatcacggcaatgacacacaatcacgtaaacctcttgatattttcgattattttttaggattattctttacagattcatatatttgtagaaattacatacaataccatttatgagatttcaaaacttcatcgtgggcattccgtatcgggttcgtgcctaatttaatcccggaaaaattcctccggacttttttaaaactttcctcctaaccgggaagtatcaaggtattgttttctcacttttaataaattaccatgaataactggaaaaaggtattcgcaattatatggacaggacagtttttctccatactgaccagttctctcgttaattttgccattattttatggctaacctttgaaactaaatcggcagaaactttggctttcgccacgattgccgccatgttaccgcaaggcatcttaggtatgttctccggagtatttattgatcggtggagcaggaagaaaatcatgatcctgtctgacagtttcattgctttctgcacacttattctagcctttttattttatttcgaacaagcggaagtttggcaaatctatctattgttggcactccgatcgataggttcggctttccatgctccttcgatgcaagcatctatcccgttactcgctccagaatctcaattattacgaatcgccgggatcaaccagatgatcaattctgcctgtaatatagccggaccagctttaggcgccctagccattaccacgctggccatgcctgtcgtgcttatgctcgacgtgatcggagccatactcgcctgtacctcgctggctttcgtcaaaataccgaacccaccacccggtgaacacgcgggagaaaacaatgtccttcaagacttaaaagaggctcaacgggaggtagtcagccaccggggaatgccattattattaatactctcgatcatagccacattttttatcatgccagtcagcgtacttttccctttaatgaccctaaatcacttttcgggagatgctttccaaatgagtctgattgaagccatttggggagtcggggccctattggggggagttgccttgagtatcaaacaatacaagatcaacaaaatcacgctgatcaacctgacatatatcctcttgggagccggattcacggcatctggcctactatctcccaatgcctttgtttggttcgtcgtgtttaccgcatttgaaggcgtgatcgggtcattatactttgcctcgttcactgccgttatccagacgaaaatcaacccggcaatactcggacgagtattttccatatacatgagccttagtatgctcccctccatgctcggattaatgagtaccgggtttattgccgatcacgtggggattacaaacacgttcgttattggtggactcgtgatattagctatcggggttatatcattctgcctcccgtccttgttacaagtgggcaaattgaccgttaacgggaaaacccgcaatatctaaagtatataaatcgaaagccacctcgaaaaaggtggctttcaaatatctgatcaattcgataaattactttccggcacgagctttatactctttcaaaccgtcttgcaagaatttcacgaaagcatcccgatctttattataacctctggcgggttgtaatacatgcggtttcaatactttctcattacctttacggctatctaacaagatatagttcggttgagcgttcgactcgaattgcttgatctggaagtctgtattcttctttccaagcgtgtttttcttctttccgtcatactctgacacataaacctcttctgctggtaatttagtcttatcgtccacgtaaagagccacgatgatataatcattcttcagcatttcaagcacacgaggatcagaccaaacgctttgttccatctcacgacagttcacacaaccgtgaccggtgaagtcaataaacaagggtttatcttgagcttgtgcggctttcaatgcctgatcgtaatcgaaataaccatccaacccgtggggcaagtgcaagaaatcagagtatttcacaggttcgttggatgcggcgctagcggcaccttgtgttccacccacctgcacgccactcttcatgatctctttcgcgttgtcacgcacaatacggttaatatcgaagtctatcgtttcttgtggcgggaaatatccggccaaagctttcaacggtgccccgaacatacccgggatcaaatagatcacgaatgacatggtaataataatcatcaccaaacgaggtactccgatatatggcaagtcgctatcgtgagcgaatttgattttacccatcaagtacaatgcttgtaacgtgaacactgctacccagatagcgatgtaaacctcacggtctaacaatccccagtggtaagtctggtctgctaccatcaagaacttgaatccaagggcaacctccacgaatcctaatacaactttcaccgcatttaaccaacctcctgatttcggtagattgcttaattttgaagggaagaaagagaagaatccgaaaggcaatgccacggcgatagagaatcctaacataccgatgatcggacgtaatacagatccgcgtgcagcctctaccaacacggttccaacgatcggggcggtacaagagaatgacaccaataccaacgtgaatgccatgaagaaagctccgatgtaaccacctttatcagcttgtttatccgatttatttaccaaccaagacggtaacacgatctcgaacgcaccaaagaaggatgcagcgaagatcataaatataatgaagaaacaaatattaggcagccagttcgtactcaaccagttaatgaatcccggtcctaacaagaacgaaatgatcaatcctaaagcggtatagataccaacgatagacaaggcgaagaaaatagcttttgcctttgcttttgctttattactatccccatgcatgaagaatgacaccgtcatcgggatcatcgggaacacgcaaggcatcacaactgccagtaatccactaccaaaagccacccagaagaacaaccacaaggaatcatcctcggttgcatccttcgtttcatcggcagcagcaacagtagctttatctgcacctttgttacccaactcaatcgcgaagtccttctctcccggcacacaagcaccttcctgacaagcctggaattcaacgcttcctttcacggtagtaatggaaggatcggtaactttgatcttttgggttatggtgtaattatttgaataataccacacatcgactccgaaaacatcatcatgctttttacttggttcactctcctcggccgtacccactaattcgattccctctcccactttctcaatggtaattgatgtaggcatgggaccacctgccggggttgacatggagtaaaccgtccacccgggttgaatggttgctttaaaggttaaagcgtattcgttatccccggttttcttctgtgaaaacgtccaacttgtcgggtcagacatttgagcgaaaaccgaaaaggttcccacgaacaacgtaaagatcaacgtcaatagtctctttttcataaaaaattatttaataaaacatcaatttgcatgcttctcgaaatcgtatgcattatcacacagtggacgcaaaagtaccatataatttgttctcacacaaattcatggtactattttaacatcgttttaagatggaatgacgaaactgtaagtaaaaacacctactcgggttctatttctctattaaaacgattaaaaaacttatattcgtaaatataaaaagagggaactccgaccacctttaaatggatatggtgcttgaaagcccacttcctacgcaaagaccagaaaccttttttcaaatacgcctccacgaaggggtgtactttcaataccagattcttgattttcttctcttcgaccaagaactcaagctgatcttcaatcttatcaatcactaaaacagcagcatcggccttaccggttccatgacacacgggacaagtctccgtggtcgtcacggtcatttccggacgtacccgctggcgcgtgatttgcattaatccgaatttactcagagggagtatggtatgcttggcacgatcgagttccattgccgaacgcatcttatcgaacaacttctggcggttctccgcctgttgcatatcaataaagtcgatcacgataatacctcccatgtctcgcaattgtaactgacgagccacctcgtcggcagcagccaagtttacttccagggcatttgattcctgatcatcgcccaatttcacacgattcccgctattcacgtctatcacatgaaaagcttccgtgtgttctataatgaggtatgccccgtttttaaacgaaacggtacgtcccagcgaagacttgatttgcttgtccaccccaaaatgatcgaagatcggtacctcggttgacacaaatttaacgataccttctttctccggagctatcgtgctgatataacgcttaatttctttactcaatgctaaatcattcacataaatgttctcgaacgagggattcaatatatcccggagaataacgctggttcggtcaatctctcccaaaatcagcttgggaggctctatatcccgaagatgtttgaacgcggtctcgaaacgttcaacaagttctgttaattcactgtcaaatagctcggcattcttgccttcggcgacagttctcacgatcaccccgaaattcttggggcgtatactttcaatcagtcttttcaaacgcttccgttcttcgaccgattttatcttttgtgacacggataccttttccgagaaaggcatcagaactaggtggcggccggcaatactcaactcggaggtcaagcgcggacccttggtggaaataggttctttcgcgacctgcacggccacatattggccgacagaaagcacgtccccgatcttcccgtttttactgatttccggctccagttttaatttggctacaggcatccccttccgggctatacattgctttatatagctatccaaagaataaaactggggactgagatcaaggtaatgcaggaaggcatccttttcatagccgacattaacgaaagcggcattcaaaccgggcatgattttcttcactttcccgtaatagatgtcacctaccgcaaatttaacgctagtcttctccgttgtcaactctaccaaccgcttgtcctttaacaaggcgattactacttcttccgcttttacatctatgactaactcagtattcactacctgatcaattaatgtattaatcaaaataaacctaaaggcatagcccttaggtttataatctctaactcacaaacgatgactacttctttttgtgtctgttctttctcagtctctttttccgtttgtgagtggccatcttatgtctctttcttttctttccgcttggcataatttcactcctttcttattttacttgatctttcacctgattgacgaaactcttcgaaggcttgaacgaaggaataaagtgttcaggaatcttgatcgttacatttttagaaatattacgagcggttttctcagctctctttttcactacaaaacttccaaaacctcttaaatatacattttttccatcaatcacagaacctttgattgcttccataaaagcttcaactgtagtttgtaccgcagctttctcgataccagtggttcttgaaatttcattcacgatgtccgcctttgtcattttctttaagtatttaatattcaatattatatttcgtttcttctagatttcagactgcaaatatatatcttttccacaaacaatgaaacaaactatcgcatttttgtcaatattttttgtgttctatatctttaattgtcaacatcggacatatcctcgcaccgctttttacaacatccctttgtcttgcccgctatttatttaaactggttacaacaaagttatcacatccagcaatcgggaataaatcacgaatcataacaagatggcatcgggattattttttttctccgaaattattccgtaatttgtgacaaattttaatccatacattatacatggtaaacaaagttattcttatcggtaatgtcggggctgacccggacgtaaaatatctcgaaggaggtgttgccgtggcaagattcagccttgccacgtcggaggtgtacaataataaaaacggagaacgtgtaactcaaaccgaatggcacaatatcgttctctggcggaatctggctcaaatagccgaaaaatacgttcgcaaggggatgatgctttacatcgagggacgtatcagaacccgttcatgggacgaccaaaacggggtgaaaagatacacgaccgaaatttacggggataatttccagatgctatcccggaaacaggataacggggataaacctcaagacacgcacatgccacaagcacccgatttaagcggtggtgacgacagtgacgatctcccgttctgaaagataaaagctaagaattaaaaactaaaagtttgaagtaaacgatttcgaacaaggaaatcaggctttaaacgattagtttttagtttttatcttttatcttttagtttttctatgtatctttcggcgatatttaagtt

SEQ ID NO: 56 - DNA, 14069 bp, Butyricimonas faecihominis
gtatattaaaaagaaacaaccggtgctggaacacgaggttgtttcaagagtaagttaatcagcaataataacttaaacgacacaaatgtatgaaaaaaaatggagaatatgaccctccaaagtacgggtcattgaaaaaaacatgcaggattatgaaagctacattgcttttccttatgctgacagtttgtcattcatttggaatggtctattcacaggaggtgaggttagacatagatttggagaatgcgactttcggacagttcatggagcaggtaaaaaatcaatctgattttactttcttttttcacgatgctatggtcatgaaattgacaaacattactttgcacgtgaaacaagaggacatcgatgcgattcttaccaagtgtctgaaggattcggggatcacttaccgtattaaggatcgtacgattattctttacgggacggatgataacacgaagaaagagatcgaggtgaaagggcgagttgttgacgaaaagggagagcctttaccgggcgcgacggtgaaggtaaaggacgaaccgggagagaaaggggtgttgcggggaaccgttacagggccggacgggaatttctcgttgaaagtgccgaacaataaagccgttctggaaatctctttcgtgggatatgtttcccagacaattccggtggctaatgccgaggcgttgaaaaagatcgtgttgaaagaggtggtagagaatatcgacgaggtgattgttaccggttaccagagaatagaccgtaaattgtttacgggtgctgcggcagttatcaaggccgaggacgctatggtcgagggttccattgacgtgagccggatgttacagggtaaagctgccggggtacagattcaaaacgtgtcgggtacgttcggggcatccccgaagatgcgggtccggggcgcctcttctatttatggaaaccagaaaccgttgtgggtggtggatggattggtgttggaagatatcgttgagatttctgcagatgatttgtcatccgggaattcggagactttgatcagttcggctattgccgggttgaatgcggatgatattgaaagctttcagatattgaaggatgcctcggcgaccgcattgtacggggcgagggcaatgaatggtgtggtggtgatcacgacgaagaaaggtaaaaaaggcacgatgaccgtgaattatagcggtgaattcacgatacggatgaaacccagttattcccagtttaatttgatgaactctcaagagcagatgatggtttacgaagagatggaggagaaaggttggttgaattacgcggacatttctcgggataaaaatggtggcgtgtataagaaaatggctgatctgatttctacctacgacccggtaacaggtaagttcgggttagaaaatactcctcaagcgaaagctgcttttctacaaaagtacgagatggcaaacacggattggtttgatgtgcttttcaggaattctttgcaacaggtacattctttaagtttgtcttccggttcggaaagatctcgtttttatgcctctttgagttattttaatgatgccggttggactctcgctgataaagtgaatcgttacacggcgaacatgaacgcctctttcgatataaaaccatggatttcagttaatttgttaacaacaaattctttgcgtatgcaaaaggctccgggaacgaatagtcgcaggacgaatgccgtggacggaacttttgaacgtgattttgacattaacccgttcagttacgctttaaatacaagccgtactctacgtccgtatgatgataacgggaattacgagtattacacgatgaattatgccccgtttagtattctgaacgagttgaatacgaataagttgaatattgatatgctggatgctaaatttcaggccgagttggaaattcgtccattgaagggattggaagtgaaggctttgggtgcggtgcgctacgtgaagacaacccgggaacatcgaattaacgataagtcgaatgcggcagaggcttaccgggctgatatggatgcacagattcgggataataataaattcctgtataaagatccggataatccgggctatccggctaaggttgtgatgccgaagggtggattttataaccgggatgagaatacgatgctgaattattaccaacggggaatattgaattacaacacttctttcaacgagggaattcatactttgaacgtgatggcgggagaggaagtacgttatacgaaccggacgatagcttttaacaagggatttggttaccaatgggatcgtggtggagtaccttttctggaccctgatttgttgaaacaacagattgaaaacggtgtcgattattacgggatggaagaagaatacgatcgctttgccgctttcttcggtacggtaggatacagttacaatggtacttatatttttaacgtgacggggcgttacgatggttctaacaaattgggtaaatcccggtctgctcgttggttaccgacgtggaacgtgagtggtgcatggcacgtaacgaatgaaaagttcatggagccagttgaaacaatatcccgtttgaccttacgggcgacttacgggttgacggcgagtatgggaccctcaagtaattcgatagccgttttgtataatgacgtggcttatcgtccgaaccaaagtgacagggagaatttgatatatatcagttctttagagaatagcgaactgacatgggaaaagcagtatgaaacgaacgtgggtattgatctggggatttttgataatcgcataagcttgagtgctgacgtgtattggagaaagggatttgacttgattggtaacgtgcggacttcgggaattggagggcaacagacgaagaaggccaattatgcaaatatgaaatctaatggtgtcgagtttactttaaacacgaaaaatctggtttattccaattttagctggacaacgaactggacgtttgctttcaacaagaacaagatcacgaaactggaatctcgtccgcgggtgatcgatctggtgcaggcagaaggagcccctttgaaggggtatcccgtgagaggtattttctctattccttttttaggattgaacgcggaaggtatgccaatattgatggatgctgacgggcaaccttgtacgggagatattgattttcaagagacgattaacttgggattcttgaaatatgaaggaccggttgatccgaaaattaccggaggttttgagaataccttcaaataccggaactggacgttcagtttctttatcaattaccaatttggcaacaaggtgcggttgtacgattatttcaagagcgagtattctgatatgaccgtgatgccgaaagaatttgatgatcgttgggtgttatcgggcgatgagacgaaaacgaatatcccggttattctttcccaacgtcaggagcaacgtccgaagaatgaatataaagaggcttacaatgcttataatttttccacggagcgaattgctgacggttcgtttatccgattgaaagacattagtttgacatacaaacttccggatcgatggatgaagacgatcggtttgggatctgcctctttgaaatgtattgcttccaacgtggccttgttgtatagagacaagaagttacacggtcaggatccggagtttttccgttccggcggtgtggcgatgccagtgccgagacaaattaccttctctttgcgggtagggttctaacaaaagtttgatgaatgaattaaatcgaatatatatgaagacaaatatattaacaggcggtctgatgatgatgttggcagcatcgtgtaactcgtttctggacgttgtacccgacaaccggacgttgttggactctcccgatgcggtgaaagaagttctggtatcggcttatccccaagctcattattaccatatatgtgaggtgatgagcgataatgcgcaggagagaaaggtgagtagcacgcatagccgtgcgacgttgaataaacagatgtattactgggatgacggaacggaaacatcacaggataatcccgtgtacgtgtggacgaattattatgaggcaatcgccgcatccaatatggcgctggaggcgatagaagaggccggggacacggatgaatattctactgccaagggagaggcgttggtgtgtagggcttttaatcattttattctggtcaatctgtttgctgaacattatgatccgaataaagcggaaaatatgctgggtattccgtacaacacgaaaccggagacacaggctattgtttactatacccgtgataacttgaagcgtgtgtacgaattgattgaggaggatctgacaaaagggttgcctttgttgaaagacgaaacttacgaggtcccgaagtatcattttacaaaagcggcagcctctgcttttgcagctcgtttctatcaatacaagggggattgggataaggtgatagagtatacttctaacgtgttgggggctaatccacagaaaaaactacgtgatttgcggcatatcaagaatcgctcggacaaggatgcttatcaacaggattatttctacggggaacatgcttctactttattgatggtatcggctataagttggtgggctcgtgataattattctaccagcttgcgtttcggaatgacgcgtgatatttacacggatttgtattacaacaagaacatttgtggaacatcgggaagttcggcaactttctatattacttctacttatactccttccgatgcggcacagatgcgtaagttcaaggagttgtttaaatataattccgtgggatcgacaaccggtaaaggctatgcggtgggatgtttattgagtacggaggaggctttgttgaatcgggctgaggcctatatcatgaaacatgagttcgatttggccttggaagatattaatttgttacttagtgaaagaatatgggtgaataagaatgacgtggatgcagactttacggcttatcgggtgaatttggcaaagattaaagctttttatgatgataacgagaaatatccggatttggctcctttttacgcgtcggaaattgatgaggatcagatgtcgttgttgaaatgcgtcgtggattggaggcgccgggagtttatgcaggaaggattgcgttggttcgacattaagcgtttccatttaccggtggttcacgaattcaagttcacgggagatccggcgataactcttacgggtgatgatttacgccgggcaattcagatcccgacggaggcacaaggatttggtgtagaacctaatccccgttagtattaatcgtaaatactttagattatgaaaagatatatattgaatttgtttttgttggttatgctcttttccgtgtcggcttgttctgacgatgatttgggaccgtctatttttgatccttcaacggaggaattaaccgagttagacttgtggatgcaggctaatttcacgaaaccttataacattgaggtcctttataaatggttggatatcgagtcggatatggcggcgacactcgtacccccgaccgaggataatgcggcggggttggccgatgttctgaaaaaaatctggtgtctcccttacgtgaatattgccggcaatgattttttctgcaaattggcccccaaacagttgatgtttatcggttcttcccgttacaattcggatggaaccgtcacgaaagggtcggctgaaggaggacggaagattattatttacgaagtgaaccagtttgaccgtactaatgcaacccgtttgaaacgttatatgaagacgatccatcacgagttcacgcatattgctaatcaaacgatcgaattcccgaaggaatatgaattgatcagccccggttacgtggaacagtggaagaacatgaaggatcaagaagcctacgatgccgggtttatttctccttacgcgatgagcgagccttcagaagattttgccgagatggtgggaattatgctttccaatagtcgtgccgagtgggaagtcttgttggataaacctgccacgcaggatggaaaagacaaattgcaacagaaattggaaatggtgttgaattattaccgggatgtgtggaatgttgacttgtatgctttacaagaagaatgcgagaaagctatttacgaggttgttaataatgttaatccttgatacctatgaagaagttaatatatttatggttgttggcgagtgtgttgttgccggcagcttgtacggatgacgatgatgtgttctcggaagaatcgggggtacgtttgcaggcggtgattgacgagtgtaacacgacgttaaggggagccgagaatggttggaaaatggtgtattacccgaaagtcgaaagttatggaggctatacttttcttttcaagttcggggcgaagaatcgggtacagatgatcagtgattttgacacgagtgaagatacggattattcttataattttaatacatcggaaagtgttgttctgacgtttgattcttatagtcctttacatcgtttggccgacccgcagtacccggctcctgattactcgaataaaaaaggttacggggtagagggggatttcgagttcgtggtgaaaaaagtaactgccgatacattatatctggtggggaaaaagaatcgggtagaagtccagttgacgaaagcgaccggggaagattggcagctagttagcatgatggccgaaatgtcttcctgttttgctttgagtgagaacgaaagattgggtatgtcggttcatggcgtgttaatggcatcgggtctggtagagttagatgatatatatcatatctgtgaaatatcttataaagatgaggaaggagatgccgtgtcggttgagagtccctacgttatgacggataaagggtgccagttcatgcaggaaattgaagtggcaggaattaagttttccggtttgaatgttgatttaagcgagggtttcaataaccgggaatttgtttctaacgatgaaggcgggagtattcggttctttatccagaattttgccccgttaaatttgacgagagaccagattccgacgtatgttcccaataagaatattgcatctgtcgatctgttaagaacaacgaatggggatgatgcacgttacgtgattaccgagatgagtgcggaattggaggctcaacgggatattattcggaatagtctgccgaatttcattgatttctatttagaattgaaccggaaagatggctatgagggttccttccggataggagcttaccaaggtacttccgtgaagtattacaattatgatttcaaaaccttcgagttgttggataatagtgtgaataaggttatctttgataatcaggcggcatcttcatcaacatcaggttttacagataaggatttgtattctatcaaaaagaataagaatacaaaagcagtttacgacgccttcttctcgggagacgggtttgtggttatccgggattcggacacggtgtattggatcaggagtttgaaagatccgaatatctggatgaaactggaggaagactaggttcctgtttattgtagattacacccaccaattccctctgaggaagggggagttggaaaactagaaaataaaagttgaaaattaaaataaaatgaatgtattaaaaatagtcgcttgtttgttgtttttcagttttgtttggtgtgtcggttacggtgataccccgttaaagccaaagaaagaagaacaggcaaagcaagctcccgtggacgggccgtacgtgttatatgatgaggtcggaaatgcacgggtgatccgtgtggatgaacggggtgttgtgcgggatagtgtttacgggaaactaccggaaggttttaaactagacgtggtttcgcagaaaggcggccatcgttttcaggtgaaactacatcccgtggagcgtccactttggaagtccggacagcgggagaaaacattgattatttctgatcctcatggagacttggagagtttcgtttccgtgttgtgcaacaatggtgtgatcggaaagaattataaatggaagttcggtaagaatcaggtgattgtcatcggtgatgtctttgaccggggaaaggacgtgttgcccattttctggttgatgtacaagttggaacaggaggcgaaggatgcgggaggggtgatgacttttatgttagggaatcacgaggaaatggtgttgcggggtaacttgaaatatacccggagcaagtataaggatttagcaacatcacttgggatagaatatgccgacttgtggcatgagaagagcgagttggggcgttggttgcgttctcgtaatctgattcaggtcgtgggaaagaatttgttcgtccatgccggactgagcaaggagtttaccggaatgggaaatgccgtgacagaagtaaacgaagagatggcgagatctattttcttgccgaaaaaagaacggcaggagttgtctgccttgtctgattccatctattgtaatcggggacctttttggttccgaggaatggtgaaagatgaggagaaatatagtccttccacgccggaggatgtggagcgtattttggaacaatacggtgtagaccgtatattcgtgggacacacgatatttgatgacgtgactcccttctttgacgggaaagttgtggccgtgaacgtgaataatcaaaagaaccgagaggcaggtaaaggccggggaatcttgatgcagggaaataccctgtatgttatatacgataagggtaagcctcgtaaattctagctgttttatttcaataataataagttacaggttaataacaacctgtaacttgttatttcgcctccggcgaaactattgatacaaaaagcgcttaatactctttttgggtgttttttcaaactcttcgttgtatatcgtaaccttcgcaatctggctgtatgccgggagagtttcgttaatttgtttccggttttcctccatgatggcagcgatggcctcatccgagttcttgttgtcggcattgatagtctcgaagtcaggatagatgagggcagtgagtttgccttctttctcgaccacgatagattcgctcacgtaaggaaggttattcagatgatcttcaatttcttctggatagatgttttgaccactggggccgagaatcatgtttttactacgccccttgatgaaaaggttgccttcttcgtcaatcagtccaaggtctcccgtgcggagccagccgtcgggtgtgaatgcggcatgtgtggccgcctcgttcttgtagtacccgatcatgagattatctcctttggctaggatctccccgacgatatgtgccggatcgggcgagtctattttcagttgcatacggggtgcagcccttccgcaggagccttttttgaaagtttcccatccggcatacgagaggatcggtccgcattccgtcataccgtaacccacggtatagggaaagtttatcgagtgtaaaaattcttctacttctttattcagtgcggctccgccgacgatgagttctttgaaattcccgccgaaggcatcaatgactttctgacggatggaattcttcactttcttgtcgagtaacggcaggttaagcatgagtttaatcaatggtttttccagtgccgggaatacttttttccggataatcttttcgataatcaagggtacggaaataatcaagttgggtcttaccgtggagaatgcgtccgcgatgatcttcggggacggggttctcgtcaggaaaaatacatgagccccgctggcaaactcgtagatgaactcgaaagccaacccgtacatgtgtgccatggggagcatggatataacctgttctccgggtaatttcccaaataccccgaaggcgaacgtgaggttcgaccagaggctgcgataggggagcataacccctttcgagaaactggtggttcccgacgtgtagttaataatggcgagttcttccggtttgtcatacgtgtagttcacgtcttccgggcggaaacggtcggggtatttcttcccgaacagttcgttcagtcgctcccgtgcgtgtgataatgcttggctacgcgacacgagtattgaattatcttccaagcttagaataccttccagtgcttccatcgaggcctcgttcaatccttcccacacgacgctacccacgaaaagtaggcgagcctcggaatgattcacgatattgtgtatgttatccggtttaaattcgtttaggatggggactacgacagccccgtaggttagtgtggcgaggaatgcaattccccaatttgtggaatttctcccgcataatgcgattttatctccttttttaatgcctgcgtgttcgaaaagaatatgtaatttttctattttccgggccacgtccttgtagttacaatttattccgtgatagtcggtcagtgccggacgatcccagttttctttgatactactctctatataatatataaaactttcttccatctgtaagtatactgtcaaacaagtgtcaaagttacgaatatttttcgagatttcgagggaaggggaaaaagtagtaagggggctgttcccaaagtcttattcaatatctacaagctaccccctccaactcccccttacacaaggggagagctgattaccaagcggtttctccccctgtgtaaggggggagttagtgggggtagttatttaaaaatgactttttggacagcccctttcagaagcaaaggttcgattttataaacttatttatatccccagagcttttcttttatcatccggaattggagtaagatcaccaccgtatgagatacttgcccggttgttgctggtcacgttgacgctgcatttcccgttaccgtaaacttccacgtagaagttaaagacatcgttgcgatttctcacgttgaatttgtattcgatgtaatgttttttgcgtttgttaatcaccttgaatgattcgttttcaatctttgctttctcgaactcaatcccgccgccttgtccgtattccgtggagtaggcccgtccgaagaatggcaggcgtcccgtggctatggtgtcgaggataaagagttgtccctcgttggtagccagcgaaacgtagccttcgccaccaatgcgtttctgcccgtatttggagtcgatggtgatgctgctgttacctgtcgggaaggcttgatctacctcgatgtagaattcacggcttttcatgagttgttcgatcttggcgatacccgcggtgtcgcttttctgtttcttttcacccatcgcgaagaggcaggtaaaaaggagtattcctattggaatgattgttttcagtgttttcatgttcttgttgttttttcgtgaatataaatgtcattttaatatatagcaaatcatgtaccacgagccataattcgctgaatggattcacaatatagtaaaaataagggatatttgcaaatttactccctcactactggtacaagaaccgctttatacttcgttttggggtcttctcgaattcctcgtcgtgaatctctatccgggcaatctggctgtatgccgggatctgttggttgatctgtttgcgggtctcgtgaatgattttgagaagtgcctcgcgggatattttgttttgtttcatggcctcggcatccggatagacaagggccacgagtttaccttcccgttcaatcactagcgattctgcgatataaggttgggcgttgagtaggtcttcgatctcttcggggtaaatgttctgcccgctggggccgagaatgagacttttgctacgacctttgatgtagagatacccgtccggatccagcacgccgagatcccccgtgtggagccatccgtcgggggaaagcacggtattggatgcttccgggttgttgtagtacccgtccatgacattcatgcctttggtgagaatttctccaacttgtttgaacggatcgggcgagtcgatgcggatttccatgcggtccacggctctcccgcaggaggtgggacggaacgtctgccagtggtcgaaagcgatggcaggcccacactcggtcatgccgtagcccacggtgtaggggaatttcacggaatggaggaatgcctcgacttctttattgagggcggctcccccgactgcgagtagcttgaatcgtcccccgaaagcatcaagaatctgccgcttgatcttgtggcggatttttcccccgatgatgggcatttttagcatcagcttgatatgaaacttttccagttgcgggagtactcgacttttgatgatcttctcgataattaaaggcacggcgacgatcaggtgcgggcggatgtcggcaaagacttcccccagtatcttgggcgagggcattttttgtaggaaatagatatgtattccgctggcgaaggggtaaatgaactcgaaggccagcccgtacatgtgggccatggtaaggatggatacaagtttttcgcccggcgtgtaacccatctggtcaagggcgtagcggaggttggaccacatactgcggtaagggagcatcacgcctttgggcgagctggtggtgccggatgtgtagttgatcatggccagttcttccggttcctccgtgcggtagtgtatatcctcgattcgcagttccccggggtgctgggtggaaaacaaggtctccagccgggttgtggtttccgagagaaccgggttgcgggaggagatcacggaataatcagccatggcgatgatcccgtccagcgcaggcatactctcgtggtctatgttatcccacacggattttcccacgaacaggagccgggccccggagtggttgataatgtggtgaatcgtgtcgggtttaaactcgttaaggatgggaacggccaccgccccgtaagtgagcgtggcgagaaaagctattccccagttggacgtgttgcggctgcatagcgccactttatctcccggtcggataccgccttcctcgaaaaggatatgtaatttttcaatccaccgtgccacgtctttatagttatgttccgcaccctcgtagtccgtcagggagggaaggtgccagtgttcttttatgctgtattctataagtttcaagaaactcgtttccatgatgttatataattaatattctcttcttatactgaaaattaacttgaaatgtttttctcgcgggtttatttttatccggggagaggtttgtgtatattcgcgtgaaacaagaaaaaatcaggtcacgtgaaaagaaataataacgaggtaagggtggttccgcccgtgttgcagggggtagagacggggaacgagttgttcagcgagttgttggtggacgatgacgaggtggatcgtcgctcgttcagtcgggaggtggttgacggggtagatttgtcggaggtgaacgtgtcgtcctgcgtgtttgatcatgtctcgtttcccggttgccgtttccgggagtcccggctcacggacgtgttgttcgagaattgtgacctgtcgaacgtggacttgtcggggagcgtgttgttccgggtggaattccgttcgtgcaagttgatggggacgaacctatcggacggtgtgttgaataacgtgttgttccggcattgtaacgcccgttacatgaatctctcgatggggcgtttgaaacaagtacttttcgcccacggtgatatgcagggaagtgccttggagagttgccggttggaggcggtggcgttcgacacgtgtagcctcgtggaggctgagttttctcgtacttcattgaaggggatggacttaacatcctcacggttggaaggcttgcggctgggtgtgggggatttacgtggcgtgatcgtgtcacccgtgcaggcgttggatttaacccgctatttaggactggttgtcaaggatgtgtaagtgatgtcagcaaagtacaagggttgttaaatgtgacgggaggttgaaactttcgtcctgcggcatcgtaattattcacgagtgtcttgacagacacgccctttaaaaa

SEQ ID NO: 57 - DNA, 14057 bp, Butyricimonas faecihominis
aaataagatatttattttaggggctatcacggggatgcttactttgggggcttgtggaaattttttggaggaagaatcccagagtgaggtaattccgaagactacatcagacttttctgaacttttgttgggtacggggtatcctgatgatgcagagcctaatttttcttttatttctttgatggatgatgactgtgctcattttttgacttatgccagcacgagtgatccggaaggaacagtgggcacgtccaatgcgataactcagttcccgatctattcatggcaaccgactcttgccgattatgacggttatgatagtgagattaatgtaacggcaagttctaccacgtatgcccagttctattcaaagatactggggtgtaatgccgtgttggattacattgatgatgcgataggaacccaggaagatcgagaccgggtgaaagcagaagcgcttgcagtgagggctttaatgtattttcaactggtaaatatttacggggaaccttataatcataataaggaggcgttgggagttccggtaagattggtttccgatttgacggaaaagcatattgaacgttccacggttgggtatatctatgaagaggtgatactgaaagacttgctggaggcagcccgtttgctggatcctcttccgattatgcgtaagaattaccgggtcaatcagccggcaatccatattttactttcccgggtttacttgtatatggaaaattatacggaatgtattgctgaggtaaagaaggccgaacaacaaggtatccaattattgaacatggtaaataacttggatgtcattgcaaatggtaatctttacacgcccattgcttatacaaatccggaagtagaatggctatttggtccatgtgcggttgcgaatcattgggagtatcaaccggctacggctcctgatttcagggctttatgggatcaggagaatgaccagcgtttcttggcaaattgctttaagtctcaggatgaatcaaataccgtatacatgcaaaaacccaatggatcttcccaattggggcaatccattcgttctgcagaggctttcttgaatcgaatggaggcttatgctctctccggagaagagggattggccttgtctgaattgaatgattttcgaaagacacgaattgtcggttactcggatgttaatttgagcggtcaggctttgttggatgagattcgtttggaacgccggaaagaactttgttttgaaggacatcgttggtttgatttacgtcgtcagggaatgccggagatcaagcatacttacaaggcagaaaagggaggatctgtttatgaatatgtgttgaaacagggtgatcccatgtacacgattccgttcccgaatagtgtcatgttacaaaatagatctcttgtccagaatccttcaagggaaatgagtgcgagacagggagagataaaataataaaacgaacggttatgaaaaagataatatttattataatttgtctgtggggcgtaagtgtatcttgtagcgaagatcataaaataggagcaccggatgaaattcagccggattacgtgttgccgcaaggtgatgcttccgacgaagcgaatgctaggatacaggatatatttgatacgtatggaagttacgtgctttataattactcgtctaaggatgcattttggacgcagacatctgcgggtacaggtacacagacttacgtaatcagaatgggcgaaactcaatacgtggacgagatgcttgattacattcatgaaatctggttacagttttttccggatgactttttgaagaaagggggattaccttaccgggtctttttggccgattcaatctattgggatcgttcagccgtttctccgggatggtatgtttgctataatcagcgaattaatggaaattctgtttctattgcggggatgaataaggatttagccggtatggatgccgtaactaaaaaagcgagaaagaatgaattactatccaccatgtgggattattacattgctcaagggttactgaatgttcctgatgaattttatgaagatacggattacgagaatgctcccgtacttccttcttccggtgcagaagctttggaaacttatcggaaaagaggattcctaccgtcgtcctattataacggagagccggaagaatggtactacggggattatgcttggactcaagcaaaggcgaatgatttgaagtcttttttgtatcatctgcgggaaaagacggatgaggaagtagcttggttcctgaataacccggaatacgagttgatccagaaaaaatggaatattttaattgattactacaagaaagaatttggtattgatcttcggaaaatgggtaatacgactttttaataaatcactgtaaagataattgtttgtagagtatgaaaaagaaatttgtttatgttctttttgcttgcctagccatggttaacatggctttgggccagcaaaacgagtcccgcttgaccttaaatccggaagtacccgtggccggtcagagtttggaattgacctataatccgaaaggaggaccgttagaaggtagatccgatttggtcgggattgtttatatgtataatttttatcactgggagatgggcgatgtgcaattgaagcaggaaggagatctttggaaaggaactttcgagatgccggaaaattgtgcttttatcgcttttaaattccagtccacgtttaccttgcaaccggactcaacggataataataacgataacgggtttatgtttatccccaaaaatagtgcgggtgattatttgccgggtagataccttgcttggggtgtattccggatgccttcgctgggatcggaaaccgggaattatttttccgggaactacaaggagatttctaacgaggccgcgatgatgtggacggatcaggagacaaaacattatcctcaatatggtcgccactttttcgggactatgaaatcagttttgaaaaaaatgtatggggataacagtcgtcccggaatagcacacttgttgaaagtcatggaaagccaaccggatttgaccgagaatgaatacgaggaaatcagtagtacttaccggattgatttgaaaaataaagtgaaagcggatagtatcaatcaggtgatcctcaaattgttcccgcacgggggcttggctcgttttaaccgttctttcgagttgaatgctttgcctgaagaggaatactttgcggctgccgatcagtttcgaaaagatttcccgatagaggcatggaggaagaatccgaatcctagaggattcgtgtataataatttttatcgggagttggccacgaggtattacaaatcggggaattacaagaaactggaagaaatattgcctgagatggatatggtaatgatcaatgatgtattccggaaaagtgtcgagtttgctattcggaaaactcccacgccaccggaaacctatgtcgagatttcaaagaaattcatcgaccagatgattgctaaggtgggtgacggttcgtatcggcagacgatagcagcttctccccgacaagcggaagagcttgctcgcttgtggttgaattactacatctgtgttcatgctcaagttgccgaaaaatgtggtcgttaccaagaggccgtggacatgatgaatttgattgacgaggatcaacggtatatctcttatccggcaggaaatgaggcatacatcgtgagtctggaaaagttaggaaaccatactgaggctttcgaagcaatgaaaggtgcggcaagtgccgggcagatgactccggtaatttatgacaaattaagagagcattatactaccttgaaggagaaacctgccacattcgaggcatggattgcatctctgaaaccgaagcatgaggtagaaaaaatcaagaataaacttcgtgcagaaattatagatataccttttgaaccctttgtcatggaatcacatcagggaggaaaagtgaaatctgccagtttcaaaaaagatgaaatcgtggtgattgatttttgggctttgtggtgtgcgccttgtattgctgctttagatgggatgcagatggccgtggatctttatgctaatgatccgaccgtgaaattttatttcgtgatcacgcaagatgaaccgaaccgtgaaaagatagatgctctttggaagaagaatgatttccggaacatggaagtcctttatgatgcgaatccgaaaggaaagaattcacggaatgtcgtgtataaatccatgtttcccggaacatcgggtattcctcaaaaagccatccttaaaaacgggcatatccgctatcgtgcggaagggtacggtggaagtcccagcggtctgatggatgagatttcttatgttatcgagattcttaaagaggagggaaatcatgctgagaaataatctgattgtcctgttgcttgcagcagcaggacttttttcttcttgcgggagcgggaaccactattcgcttaccgggagtttgccgactcgttatgatggatgtctggttaagcttacgcctgccacgttctttttctccgaggagaaacccagtccagtggatagcgtcaaaattaaggatggtaaatttcggtttgccggaacggtgcaggaaccgaccgtctatatgctgacaattgatggagtggattataagatcccggatatggcttcaatagccgtggtgattgaacccggagacgttacgatagaatacgatacgctgggaatcattatggcgggaacccctgtaaatgaacggtacatgacgacgataggagaggccaagcgggaaaccgtgcgtcaacgccaacttttatggcaggaacgggatagcgtgaagcgtttgccggggagtgtggaaaatgaggtagataactactataatctgaaaagtagtgctattttcaaggagaatgtcattccggcatcagaaaactttattcgagaatacgcgggtactgaaatcggggagttcttcttctttcattgttgcgggaaagatgtgtatagcaaggcttttgtagatgaggtttatccgactattcggccggaaatacgggagcaatacgagactttaatccgggctcgtcaggaaaaacaggattatttcgtgcattcgcagaaagtcacaaacgtgggaatgccctatcgggagattgtggctcgaacaatagacgggaaagagattcgtttatcggattatgtcggtaagaaacaacttattttactggatttctgggcatcttggtgtatcccttgtatccaggaggttcctctgctaaagagattgcaggaaaagtataaaaatcaaggattacaaattgtgggtgtgtccgttgattctgatcgggaaaaatggcagggagctttgaataagcatcagccggcaggcatccagatttccgaattgaaaggttgggaaagtgtttcccgtgttgattacggggtacaggcgataccgtttacggttttaatcgatgcatccggtaaaatccttgctcgcaacccgcatggtccgcttttggaagagatcatcgagaagtatttttctaaaaaatagaaatcatttttaaatgatttagggttatatcccgaaaaactatctttgtttgaaaagtttttcggggtataaccctaaacatttaccttgttaggtaaaaattggcatttccttgggccggaataactttttctgtaccacgtagtatgcgaccaaaacggcagcacccgtcacgatccacgagatgggatagatgaccatcaaggcgtcgaaactgggcaataagggacagacaaggtatatccatagcaatcgtaagacgcaggtaccaaacacggtgaggattgctggtagcatggaatagccaagtccccggagtgcagctccggcaatttcgtatgagcaggcaagacactgtgtcaataagacgatattcatgcgaagtgctgcataatggaatacttccggactggacgtgaagaagctgatggcgaagtgtttttgccagacgaatagcacgttcagcaagccgcaacaggcaacacttaataacatcgtcagacggaaaattcttttacagcgatcaatttgtccggccccgtaattttggctgataaaagttaccgcggcttgactgaaagcgctaacgacaaaataacagtaatactcgtaagtaagggctgcggcggagcctgcaatggctgcagaaccgaatcggttgacggctgcttgtatgaaaatgttggcaatcgaaaacaccatcccctgtattcctgcggggacaccgatttgaagaacttttcgtaattcgggacgattgatgcggaggtgcttgaagtttagtttgaatggcccttgttcgtgtcgcaggatgtatatgatcacgcctgcgctgaacatgttggcaacgaccgtaccaatagcgacgcctgcaacactcatcttgaagacaatgaccaacagtaagtttagcacggtattgatgatcccggcagcaacaagacaataaagcgggcgtttcgtgtctcccatgctacggagaatgcttgccccgaagttgtaaatcatgaagaagggcatcccgagaaagtaaatgcgaagatacagaactgccaagtcaatgacatcatcgggcgtgtccatagcttccagtatcgggcgggctatgagtaaacctaccacgagtagtaggcacccgcttgtcaaggcgatcacggagaccgtgtgtatggcatttttgattccccgttcatctttttgcccgatgtagttggcgatcacgacatttgccccgacggatattcccacgaacaggttaatcatcaagctgatcaccgaactgttgcttcccacagctgccagagcctgatcgctggcaaatcttcccacgacggctacatctaccgagttgaataactgctgcaggatgctacttgccgctaatggcagagaaaacaacagaattttgttcagtaaactaccgtgcagcatgtccatccggaccgcaccttgtgatgatttattatgagtacgcatattttgatattttcatgacgcgaaagtacaggaaacaacctgataatagcatacacggattactttttgttttatcaattttactgatcgggtaatagagaggaataaaaaaatccgcctcgttcgaggcggattctttatatagacttactgtattattagcagtgtccttgagcgcacatagcctcagcaactttgataaagccaccgatgttagcacccttaacatagttgatcttgttaccttctctaccgaatttaacgcaagtatcgtggatgtctttcatgatctgagacaatttagcgtctacttcttcagcagtccagctatatctcattgagttttggctcatttcaagaccagaaacggcaacaccaccagcgttagctgctttacccggagcgaaagtaatgtgctcgttcaagtagttaacagcttcagcagtacaacccatgttagaagtttcaactaccatttggcaaccgttagcaaccaatttcttagcatcttcttcgttcaactcgttttggatagcgcaagggaatgcgatgtcacatttaacttcccaaggtttagctttcgggaagaatttagcaccgaatttctcagcgtaaggagctacaacgtcgttgttgctagcacgcaattccaacatgtagtctacaccttcttgagtaagacctttttcatcatagatgtatccgtcaggaccagaaatggtaactaatttagcacctaattgaactaatttctgagcagcaccccaagctacgttaccgaaaccagagatagctacagtcttaccggcgattttctcacctttttcagccaacatgtgttgtgcgaaataaacggtaccgtaaccagtagcttccggacgtactcttgaaccaccgaattcacggttctttccagttaatacaccaacgaattcgttacggattctcttgtattgtccgaacaagaaaccgatttcacgagctccaacaccgatatcacctgcaggtacgtcagtatcagcaccgatatatttgcaaagttcagtcatgaaactttggcagaaacgcatgatttcgttatctgattttcctttcgggttgaagtcagaacctcctttaccaccacccatcggaagagtagtcaaagagtttttgaaagtttgttcgaaacctaagaatttcaaaccgccaagggttactgacgggtggaaacgcaaacctcctttgtacggtccaatagcactgttgaattgtactctataaccacggttgatttgtacttcacctttatcgtcgatccagggtactctgaacatgattactctttcaggttctaccattttctcaaggatcttgttagccttgtatttcgggtttgcctgataggtatcccatacagtttcaatcacttcttgaactgcctggtggaattctgattcacctacggttctagcctttaaggcatccatgaattctttaatctctgctttcatttgaatattgtttaagtaaaaactttaaaaaaacattttcatttacttgaattatcaaaattcggttcaaaggtatgcttttgtttatgattccaaaaatttttcgagttattttttggtaggtgcaaacgttataatagtttaaaatttcaatcacgattcatgaagtgctatgaatctgtaataaaacctgttaaatgagcgtgtaacaattaccggggagttgcatcacgtgaccttccagctcgagttttaaaagaagtacggagaggtcatgcacgggtatgcgtgtaagttgatgtaactgatcgatattttgttctcctctttttaacagagtctccatgagtaatacttcattatttgttacggggaataaatctagggacatctggtagggtccggttgggagaggtggccagttgagaatccggatcagatccttgatgttttctaccaaggcggcaatattttgtttgatcaacaggttacacccggcgaaggtcgggtcttccggtcttccgggaatcgccatcacgtcccggttgtacgacaaggcttgtcgggcggtagacatggcccctccttttatgggagattcggcgacaagaatcgcctcgctcatgcctgccacgattcgattgcgttggagaaagtttgtcggtaaaatctgtgcgcaagtcggaaattctgaaattaaagctcccccttgttccaaaatcttttcggccatacttttgtgtgaggcaggataaaccatgtgtaggccgtgtccgagaacggcctgtgcttttaaaccgtaatgcatgcacgccgtgtgggcggtaatgtcgatcccgtaagccaatccactgataatattcgggtggtaacctgtttcggccagttcatggagcaacgtgtctactcgtttcttgcccatttcggttgctttgcgggtccccacgatggcaatattcttcgagtcggaggcatccagaatccccttataaaatagtacgagcggggcatccgcgcaatgtttcaaaaggcggggataattcgaatcttcgattccgcatacccggatgtgatgtttttccatgacgtccaactcctgttttgccatctgtaaccagcgggagcgttcgggttggatgtttgtcaggttattttcccggaaaagagtctctatattttgatctgtttcttcgaaaaagccggaaattccgccacattgttggaacaaggaggcaaaaagagcattgttaagccggggtgccatggtgatggcaacctttgtcaggaccgagttttcatgattcatacgccgatatttaaaagtaatttatgacaaaaatacacctttatagtttaaaaagcgaatgaaatggagaaaatgagtccataaggtttgtaaagtttataaggtttataaagtggcggggtgtcctccgggcaaaatctatcggcaaaccaagctgccgtggacaaaggtcccgtgggtgtccaagaactttatggactttataaaccttatgaaccttataaaccctttctcttttgggcatctgattaaaatagtttaattttgtacggaaatacaggatgaatggaaagtatcatttttaccacggatgccagcattgtccttgccgaattgctgggaggaatcaggcacgagaatttatttatcgtggcagataagcacacggtcggtttttgtgatcgcttgtttgagaaggtggattggattccctctcacgtgacggttctggattgcggggaagagtataagtcgattgaaagcgtcagccggatttggatgatgttgagtaaacggggggcgcgtcgatcttccattctcgtgtgcgtgggaggtggtgtcgtgacggatttgggaggattcgcggcttccacgttcaaacgggggatgcgttgcatcaatgttcccacgacactgctggcgcaggttgatgcatctttgggcggtaaaaccgggtttaatttcaacggtttgaaaaacgagattggcacgttctccattccggaaaaagtgattatcgatgtccattttttaagtcatttacccgtgcgggaacgaatgtccggtttcgcggagatgatcaagcatggtttattgtcagaccgggagtatttgacccggttgttgagcttggaatatcaagaaacgagtccggaagattttctggagctgattcggcgctccgtgacgataaaaggtgaaattgtctcccaagaccctagggaacagggactgcgtaaagtgttgaatttcggacacacgatcgggcatgccatcgaaagcttgtctatcatgcggggaatggctcttttgcacggggaggcggtggcattgggattggtggccgaattatacctgtccgtcaaagaaaaaggtttcccggaagaaatttaccgggaagtccggaattttgtcaaacgatattatccgaactatcctctgatggagcatgttgataccttgtatgaattgatgttgcatgataagaaaaacgaacggcggggagtgaatttcacgttactcccgggtatcggggaattttcattggataattattgttcgaaagatttagtggttgaggcattgagccaagtgtaaataacgagtagaattatggatcgagttatcgcgtgggacaagacaaagattgaaggtgtggctgttttaccggcttcaaagagtatctcgaacagggcgctcgtgttatgtgccttggcaggatgcccggtaccggagaatttgtcggatagcgatgatacacgggtgttgcgggaggccctgtccacttcagacaggttggtcaacgtgggacacgccggaactgccatgcgtttcttgacagcttattttgccttgaaaggcggggtccgggaattaaccggttcggagcgtatgaaacagcgtcccgtgcaggtattggtggatgctttgcgggaattaggtgcgagtatcgcctacatgggagacgagggttttccgcctttatggattacttccgcacctttacaaggagggcgttccctgtcgttagacgcatccgtgagtagtcaatacgtgtcggccttgatgatgattgcccctttgctgccgggaggcttgacgctcgatttggaagaaagaatcgtttctgccgcttacatacggatgacggtcggcatgatgcgcttgttcggggtagacgtgcgtttggaagggaaaaagattattattcccgagaaggggtacatcccggtaaacctgcgcgtggaatccgactggacggcagcatcttatttctacgagatggtttctattgtcgggctgggggaaatctttatttcggacttgaaaaaagacagtttgcaaggggatgcgctgcaatatagattgtgggaacaattaggggtgcaaacagaatggcaggaatcgggtgttctcttgcgggttgtcggtgaaaatacggattttttcgaggcggattttactgaaatgcccgatctggctcttacttttatcgtgacttgttgtttaaaagatattccgtttcatatttgcggcttggaaactttgtatgttaaagagtgtgaccgggtagccgcctcgattcgagagttacataaattggggtatgatctggatgtctccgtgcatggcgagttgtcatggaatcgggaacggaatacgttgatttcattggaaatagatacttatcaagaccatcgtatggcaatggcgtttgctcctgtcgggttaaagttacccggtttggtcatccgcaatgccggggtggtgacgaagtctttccctacattttgggaacagctggataaattattgatttaatcatccgattaatcacgaaatcattaatcggtaatcacggaatctatttatttatggaatcattattacaatcttcttattttgcgttgtttttaattgttgctctaggttttatactgggacgaattaattttaaaggaatatcgctggacgtgtcagcggtcatttttatcgccttgcttttcggtcatttcggggtaattatcccgaaagaactgggaaatttcgggttggtactatttattttcacgatcggaatgcaggccgggccgggattttttacctcttttaaagcgaaagggaaagtgctggcaattatcacgttattaatcgtggccacggcagcactgaccggaattgcctctaaatatttgtttgacatcgatacgccgagtgtcgtgggattgattgcgggagcgttgacgagtacaccgggtttggctgccgctattgatgccacgggttcctcgtcctcttccatcgcttacgggattgcctatccttttggggtgatcggggtgattctgttcgtgaaacttttacctaagatattatgcgtggacatccgtgcggaggaaaaacggctggaaaccttgctgcaacaacaatacccggagatcaaaacggctgttttccgggtgagtaatccgaacgcttttgacaagagcttggctgatttgcaaattcggaccatgacaggagccgtggtttcccgtttggttcacgataacctgaccgagatcccaacccctctatccgtgttgcgggagggaaatttgatcaaggcggtaggctccccgaatgctttgcggcagttagaaatcttggtcggggaaaagatgaatcaggatttgcctctgggggatagcattgatatgcagtacgtgctgttgacgaataaagaggtggccgggaagagcttgggtagtttgaacctgcatcagaattatcactgtacggtgacccgtgtgcgtcgttccggtattgacgtggccccgagtcccgatttagttctgcgttttggtgataagttgacagtaatagcccggaaggagagcatgaaggacgtgttgaatcttttggggaatgacaagagacgtttgtcggacaccgattttttcccgattgcaatgggtatcgtgttgggcgtgctttttggaaaggtgaatatctctttttccgatagtttcaccttttctccgggattgacgggaggaattctgatcgtggctctggttttgggttatcttggtaagactggacctatcgtgtggtctatgtccggcccggccaatcaactgttacgtcaattaggattgttactgtttttggcggaagtcgggacctcggcaggcgtgaatctggtacaaaccttcgtgaatagcgggttaaccctgttcggggtaggttttgctattaccttgttgccgatgatcgtggctctgttggtggggtactacggtttccggatcaatattttggatctgatgggaacgatcacgggaggaatgacgagtacaccgggattggctgccgctgactccatgactgacagtaacatcccgagcgtggcctatgcaacggtttatccgatagcgatggtgtttctaattatctgtattcaactattaagt

SEQ ID NO: 58 - DNA, 13893 bp, Butyricimonas faecihominis
atcgtagatgaagtaaaggatgatcaaaatatacatcacgacagccaatacttcagcaccactccaagtgataaaccagtcagcaccgcaatatttcagaatagcactgatcacacccattaaagccccaccagcaataaatccggaagcaattaatgtaccacgttcacggcgagctttattcacattctcgtccttactacgagtacccacgtaccagctaaccaaaccaccaatcaacagcggagtattcaaatccaacgggataaacattcctaaagcaaaagccaatgcgggaacaccgatcatcgtcaagatcaatgccaaagccgctccggcaaagtacagcaaccaaggagttgctccgccttccattaaaggcttgatcacggcagccatcgcatttgcctgcggggcaaccaacgcgttctctcccacgaaaccataagtctggttcaacaccatcattaccccggcaatcgtggcggcagaaacagccgtacccaagaacttccagccttcctgtctcgcaggagttgtccccaaccagtaaccgatcttcaagtcggtaatgaaacctccggccatagacagtgcggtacaaaccaccccaccgatgatcatggcagccatcattccgctcgttccactcaacccggcactaaccaataccagtgaactcaaaatcaacgtcatcaacgtcattccggataccggattcgaacccacgatagcgatagcgtttgctgccaccgtcgtgaacaagaaagagataacgaatacaatcaacgtcgcgatgatcgtgtgagttaaattacccaacacgccaaattggaaaaacacgaaagtagcgatcagcacggagataatcccggacaggataaacttcatggaaatatcacgctgtgtacgctccaccacaccatctccttttttcttaccacctaattcactaacggccaatcctaaagcctgcttgataatactggaagaacggataataccgataacaccggccatagcaataccaccgataccgatatgacgggcataattcgagaagatctgctccggggtcatatcccgcaacaacactgtaattccctccccaacagctaatgtctgtccatcagcgaaatgactaataaaaggaatcaacacgaaccacacggtgaaagaaccggcacaaataatcgccgcgtatttcaacccaataatatatcctaaaccgagtactgccgcacccgtgttcactttaaataccactttcatcttgtcagcaagcacttctccccatcccataatacgggttgagattccttctgcccaccaaccaaaggtactcacgcagaaatcataaagacctccgatcagtccactcacggccaatagtttagcttggttacctttcttttcaccggaaaccagaacttccgtggttgctgttgcctccgggaaaggatatttcccatgcatgtctttcacgaaatatttccggaaaggaatcaataacaagatacccaaaaaacccccgaacagagaagaaaggaatatctggtaaaattgagcctccagtcctaaaatgtaaagagccggtagcgtaaagattgccccggccacgatcacaccggaactagctccgatagactggataatcacattttgtcccaacatatttttcttccccaacatattgcccacaccaacagcaataatagcgataggaatcgcagcctcgaatacctgacctactttcagtccaaggtaagctgctgccgcagaaaaaatgaccgccatgataataccgaatgtcacggaataaggcgtaacctccttgggtttcgtgttcgccggcatcatcggcttgtactcctcgcccggggcgagctcccggtacgcgttatccgggagtgaattcatttgtttgttctcttgctccattgtttctttatagtaagtgatttatttttacaacaccccaaagataacgattttagcgaaaaaacgggaattgtaacaacctttatacaaaaaatccgtaattacgacattataaataccacatcatgaaaatcatgcactatcttgaaatactatccacgggtatcagcgtcatcagcctgatcatcgttatctatggggcgataattgctttttgcgcgttcatccgtaatgaatcccgacgttttaccgggaaatactcgttcacggcaactcgtgaacttcgtgccgatctaggaacttatttactattaggccttgagtttttgattgcctccgatattctaaaaacagttctggaacccagcttgaatgaattggctatacttgggggagttgtaattttacggacagtcctgtccatttttctcaacaaagaaatcaaagaattacaagtacaaaaagaaggaacgggtggtcccgaaaaggattaatccaacgtttggacaccgcccccgttcacaaataacacctgcccagtgatccaactggaaatcggtgctgcaaaaaagaggaccgccccggcaatatcctctatttcacccaatcgcttgattggagtgtgttccaacatctttttctcgatctccggagtcagcacggatgcgagtgcttgcgtttccacggctcccggtcccacggcattaatccgtacatcgggtccgaaatccattgccaagttggctgtcatgtgattcaaagccgcttttgacgaggcataggcactcatgttcggactccgattgatacttcccatggaagtaatgttcacgatcgaaccataaccagcctgtttcatataaggtacggccaactggcacaatctccaagcactgaacacatttaccttgaaaatacgttcgaaatattccaccgtcacccgaaaaggattttcacggcctcccccgccaactcccacgttattcaccagaatgttcaatttaccgaactccacgatggtccgttccacgagattcatcaaatccgcatctctcgtcacgtcacatttcagagccagagcccgacgccccatttcacgtatatcttctgccacctcttcggctgccgccagattcacgtcaccaatcaccacatcagctcccgcctctgccaaaatacggacactcccgcaaccgataccattaccgcctcccgtcacgagagctaccattcccgtcaaattcaacattttattcaaatccatcatctttcttgtttaattttcacacattacgctttttcccctttcaaggttacttcgaaacgagaaaattccaaaaacaagcgacgggaaacgctatctatttcacgtattttcaatctttctgatataggtttactctagtttacaataaactttttcagggtaataaccgtgtttacccgttgcatattcgatgcacttagggattaaagacgtatcaacttcgctacaaagacgtatcaaagacgttcgtgaacgtctttgatacgaacttgataggcttttactctatgattatctggtaattaccttaaatactcattccttcttcatttgataacgggtagtcctatacgcattcttgcatttaggaattcacatttcactacaaaattgtatacaagtaccttaagttacacttctatgtatttttctcttcgccagaaaagaataccattcacgggaatcttgaaaaagatttccgtgaatactttattttatatgaccgatctgaatccctcaggtaattacttccacccggccaacaataatatttccaattgattccctaattcatcattacgcccggctccccaaaccatttccacttcatttcctactttttcctcaaaataattcattacccggaccaattcatccatcatcaaatcctccgcaccatattcaatgtacatcaaatacctagcatgatccgcttcttcgataaccgatcccaattttgtcagcacatctccgattgcatctatggctcgactttcgccgactcccgtcccgatcttcaaccgaaacttattattaccatccataagatgctccacatcccctcgatccagacctaccaaattctctccatgcacgagaggtacaaggtcttttataaatacatttcttaattcttcaactgtgagtgacgaattattaaacaattcctccaatcttttttccatgcaatattattgattaccattttctcaaaagtaatcaatttttggaaattacaaatcctctccctcatcttgaatgtgccacgtccaatcattaatgatcacttgcacggcatgccataggccttccccgttctccccggcaaaatagaaaacaacatcccattcatcctgacgatcaaaatactcttgggtactccaattacgcccggccatcatggtcttgctaaaataatcagtaagacttatattaaacaccggcttattcgtggctttctccgtcacgacaaaacgagtcggtcgatcatccatcaaacgcatcgtgttcaattccacaccgatggccgcaggactgatctgtttgctataataaggacgaaaactcaactcatcatcatccttcaattgattctgatgatcaagatacccgtttgattcaagaatctcgtaatcataatcatccacggcaaatccacctccaccattctccggctgttggaaaataaatcttacggtatttgtattcttgatcaagttaattgtctcgacaagattgatattaccggtaaagtttacatcattgatttcaccataccaaagcggttccaacgctttatcaataataagcgatgacgttctcttcaattttaattccaactccgtgatcgacgtacccggggctaactgaggaacatcgtacgaatcatgcaccccggcccaagccatcaacttgtattctcccaaaggaagtgccacggacatctggtaattaccggtagctaacgcatccccctcttcggcttgttggaaaaggaatttgccatccttgtcgaaaacatagagctccactttatctacctgtttatgaaaagcacagacggatagcatattatagtcatatttaaacttgacaaacaagcgacactccggcaaatcttcattaaaggcatcacaggatacgagtatcccagcaccaatcatcagtagcccaacgatcagtaaatttatatgacttttgaaattcatttctttcttttttggcgttccattctactaatggcagacaacatctcctcccataccaagaggtataagcttgtgagggacaaacgtcgtcccccacaatttgacaaaatcatcgaactgattataattcttcagtttgagtataccaagtccaaggattcacgttaattctgatagacaaatatttgtcctcatcctcatctttcgtacccggatccggtttcggaatattcggataacccggattgtttaccttagaaatatgcacgtcgtaaacagagttacgaaccactccgaattctccgaattcattgtaaacctgatcagtatcgtcatgtttaatcataatcggatagtaatttactccacccttgtagtaagatacggttccatgacggtaagctccataattttccacgttacttcttttcagattaaaattagcaaccacctcatcagctctcgcttcgggagttccactacccctgtcaatcgatacctccggagttccgatagctaccagatacttattcacagtttgggataatgctgcagtatagataatactaggatccttatcctcgctggtgtacttgtacaacaattccgctttaatataatccatcaacaaattccaagtatagtacccgccattaaccataagccaatctgcacctgccatcaattctccatgattcacattatccgcaggattatcgtaaacattcttatccggagtaaccaatcctttcggagagtaaataactttaaacaggacctgagttgtgtaagcccacacgttatgctcggctgtttgggtgttctcaagacaatactccacgttgttcacggatatttcagtcggatgccaagctccggaagctatattcgctgcatccatctcgtaattatattcttgcaaataacttgtaaaattcgggtcggacatcaagggttgtacgtcatgattcggatcctttctatatgaccccagatcatactggtcaaaaggagtgatacatcctctcggagtctcttccatccatgtcttcacacgctcagataccgggaaatatttcttgttcgttgcattcaaaacccaaccgggttcagagatattcgcctgcaaattattagctgcgatattaccgttgtcagtatatacccgaacctttgccacggcacggtctatatgaatagaaagcggttggctctcagcctttgatgctgaattataaagagtcagatctgtctcatctccattgggaagagatggctccaaaccacctttagcattcgtcatcatgaaataagagggtgaggataacgaggctatagccacaatagcttgattaaactcattataagtactaacgttcgtaggtaaatctggacttggatttgcaatcaccagaatccgtttagaagcagccggaactttaaaagccgtccccagaattccttccggttgtccgggttctcccgcttctgtatcagaacctacagtaaaagacttatcagcagtcacattatgtgccgcatcaaagaaaataacccgaagtttactcacggtagattctgccggagttcccatctccttatccgggttattcaatgccctacccaaggccttcgctgcggcagtcttaatatccaaagagatccacgcctccccggtaggatccgttacaatcccgtcatcatcatcatctcgaccgatatggtcattactacacgccgcaaacaacaatactaaaagtgtcgcagcaaaataatacatcttcttcatagttacaaagtttaattgaaaattggttgtttgtttgttaaaaaattgattggtttatttatcaaattattatcaattgattctatctctactcttatttataaatcaccctagatttcatttcctgatcattcgctttcttcttaccaagctcctccaagttttttcctgcaacttcaagcccggcatccgaagctgcctgcaagaatctttcggcagcatcgtagtcacccttcaaaagggccaacactcccgcagcattcgcatattccggtaattcctgatgtttcacctgagccaagaattgacctgccgtttccgtgtctccgcgagaaagtgccgctattgccgcattcaatttagcaacatcatcttccgggaataatctcacggcagtttcaaacacgttgataaactcacgagatccattcgggtaagtatttgccaccaagtacatctcattcaaactcaagttctgcggacgcacctttataatctccttcgcttcctccacgttgaagttcttaacatggtactcaaccttgcaaatggcaacacgcaatcccggataaacatttcgaagcaaataacgataaggcacccctccctgcaacttcatcaaacgttcttttcgctcctgcccgtcatagttatctatgattgattcgaccgcagttttgtaagtgacatcaagattcgccaaggctttgcgcaaaccttcccagttctcaccaccgaaaacgatgtggtaaagtgaaggagcaaacgagtaacgtcttgccagataattcttcaacgccaaagctcgtccttcagacaatcgtttattaccggccaaagaaccttccggagaagcatacccgataagatccaagcggttaatcgtaatatcatggtcaacatgcaattcatcaatcatcgcccgaatcttcgctagctccacgggattattcatgtattccggctgaatataagtctggttcacctcgaagtccagaaaagcctctacttgtttttcccggtttttaattggttcgggtacgggttgcacgtaagccagatggggtaccacccggtaaggaaccggaatgaaatccagcttcacggtatcaatggtctccacttccatccaagccacttccccacaaccacattcatctttctgaacgtccagataggcttccgccatccaagcttcgaaaggaagagtatagcgatactctatcgtttgattttcagccttcacgtttctcaccacttgataatgggccgggtaagccgatcgttccgaggaactcatcagggaaagaacccgctcgtaggttaagtactcgttacgccctttaagcgaaactttgggaagttcaagcgtgtccgaagaggacactaaccgggggataatatctactgccccggcagacttcactttcacgtggtccaagacaatatccatttccacgtaaagcgttttccccgcttgtaacactcgtaccggattgacattaatagttccggtataagaggattttgactgggctgccgaagttaatgtccctagcaagaaggcaatcaacacgcaagccgtgtatcgtatcattattttcatactttacttgattaaatagattagtgaaataccgacctttgtcggaccgaagtaattccgatttccggattttaaccgggaaccgcattcggcacatgggtacttgtcatacacgatacgggcatatcccaatccgagagtggcttcaatcccccaacgtcttttcagaatccaagcgtgaccgacagaaatcccggctccataaagatgtccctcgtaccgattttgtttcatgttctcgctgataaaagaccagtccggcaaattacccacgttaaaatcagcataatgagcatgcaaaccgataaatgtccgccgaaagcgttcacaaaaccagtaacgaacctcaggctgtatgccccaatgtcgcaaacgtgtcccgtcattaaacttccacgggttcagattcaccggcacatccagcgtccacttccgggccaagctaaattccacgcctagattaaaggtcgttgttgcatcgtataacaggtttgtcttcacggccactttctgggcatgcacctcaggaatagcacaacaggcaagtaaaaaaataaatattaatcgtagtttcttcatagtttcttttttagttgatccgcattatcaggaaggatatgtcgcttgagttacataaacttttattctttgagttgatcctttacctatcgagacatacacaattccctcccggcgactagatgatccgttttcttcgattttcaagttaatctttccatcgtccacgtatatataatccgggtcattacggatctccccgttcccgggagctaattgtagccaaccatgattcgcgtaatcctccacgaaagccgaaacataatacccgttattaataaattcaccaattgtcctagcattagcagaaatcatatcttgccttctaaccgagataatcttcctgagattaccaagatacaattcaatctctcccgaatcaaaacctgccaacatctgaatctcaacctctaaaggcgaagtcgttgaaaccggaatctttccatcagcaggagaaacaatcttcaagttgctcgtcaacgaggtaatcgtccttttttccgggaactcggtcttacaatccgtgatcaaagtaaaagccgtgtatattctagttgttcccgcacttgcataaatctcaaaatgagaattcgttacaccaagataatactcgttattactcacaatctcataggctgatttatcttgtaccaaaatagtataatccagattcgtgttcgacgcaagagaagctttgacatcagctatcgaactaaatcctctccccttgatagaagtgatcgtaaaaatatactccgtgttacgctggatattcaacatattccggttatcatccacgagagccatcttgtaaaaaaaggattctccgttataacgtcctcgaataataagataagtatcattcgacgatgtatgagtttcgtaaacatagagaggattatcccccgttgtttgttcttgcggcataatctcgtccgtttccactatatctgatatatacgaattatcccctctatattccactaaattttcgacaccaatattctgttccagtgtttcggttaaattatgcagtctcgaactcttagccacattcgtcaccgtggtaattccatccagtataaaaccgggagccgtgtttctcacgacaatcctcccgacagcacgtttcaactgcatctggggcatggtcaccccggtaccaatcctaggcaaatcgatcaaatcactcataggcaacttttgcccaacataaggcaccgtgttctgcggatctgtcaatgccgccgtatgcaaattctcacaagcataagcaagggtcttattttcaagacaagtactaaagttctccgttgaaaacgcgtatggcatattccccacgtaaaaatgacttgccggatttgccagtatcaacagccgacaggcatcagaagattccgtcaggtaaacatacgttttaccattaagttcatctgcctgaaccgcctctacaaattccgcattcccatctgttccccgaaaaacaagaacccaaattccttgctccacggctgtttcactcgcgctagcccgggccacaggtaacccgtaagctccggttttagtgaatagctcgaacctgattttttcatctgtaaccacaggccctcccctttcatcctcttttatcgaacacgccgaaaaagataataacaacgtaaataatatcaatattcccttatacatcactcatcaatttgaactcatttcatctttcacgcaacggattgaataaccgaatgtcggcaaaatatgcaggtgcccgggattccagccggcaatctccactgaccaaactgatttcacgatacttccttgtgcagtagccgtattcggtcccgtagatgaactccaataatatccagtctcaccaacatattccagatatccaccccgatccaaacgacgtcccgcggccgggaaaaaagtcgaggcattattttccggattataaaccaatgttccccggtaagccacacttggactgtttatggaaaccccaactcccagtcgagctgtaagccttgaagttgttgcaatctgtactttcatcggacgtcgatcatagtaaccatcagcgtaaaaaccaaacaataaatttatatccttattggccacgtacgctggtgaggtcttctccctgatcgctattttctcgttttcttcatctccttttccaacaaggacctctgtatcgggaatggtctccccctgccaaggatttagccataaagattgcctccattccgagaacgcgatattctcttctcccttaatccgttccgtgactgtaattccgttaacatcaacatagccattcccgtacctataattcgggtaaggtccattatatgaaacctgatcaatatacccatctgacgggcgatgataaccgggaggacaaacctcaacctcttccccatagccatactcgtattgctcgtcagacccggacgatgcccatattggaatcttattccagtattgggtagaggtccagtaaccttcgggagaatccgtattatatggcaatgcaggattgtaagcccggcgaataaagtcagccatatcctcgtctgtcttgcttaatgcccactggtaaaaagctcctgcctgcgtgggataatcgacaaacttggcatcccgcttggatgtcttcgcgtacaagcccacgtaatcttctgttttattcttcaattcacgatccgtaatattaaaggccgagaattttctggcataggcacgagacttaccttgtaatggcccgtcaagtatactcgattgcggattcatgatataatcagctgcctccccttgtcggaggtaaagtttatacgacggacgccagccgttttcaaccgtagttgcctgcgtaaaagtcagtgtaaccgtggcatatcttggagccttctccccggtacttcccgcatttggattaggacttctccaaccaacacggaaataaacacgtcccctaccatttatcttagttccaccactttccatttcccccttcttatattcattcggacgcacgggatattcctccggcttaccgggattatccgttccgacataaggatcgaaactaggtgtcgtactcaatataacttgatctttataaggttcgtcaacttccacttcccaataccctaaagcataatcctgtttttccaaacgtggtaattgcgtggaaataatccgttcgccaacctcattttcccggaaaaaagcacctatatatccataaccattccaatggtcaccttgaaaatgcgcaccatactggctcgtattcaccgttatctcccgttgaaggctgttcttcccattctcatcctccgccgacaatatcagccggaaaatagaatgccgcccatcaggatttaccagagaagtctccacgtccatgttgtactcatccaataaaatatccatatacccggttccctctccacgtataacatcataagtatatgcaaaacgtgtcgttgaattttcccccgcagcaagtataagatcgttaaataccttctccgtcttcatcgtcttagaacccgcaacaatcacgtccggcaacaccttcacgacaggcatattcgaagagaatgtaattctggccccgttaaagtcggtaatgttcacacttatatccgaaacattcagataacgattctgcgcttcccatccatgttcttcctttccccaaggagtaacttgaatattgatatttatcgggtccttgataacgcccgtaagcaaaagtgccgaattgtaaggtaacgtgtaattgtcctttgaagcaccactcacgcccgcagtttgtatctttaaataacaggaagggctatgtctctcttccaaatccaccttaaaagtaatagccttactatcatcattttcaggagtaaaattactgaaaggcaaaataaaacgtgtaatcttttttacccaaacaataccacgagaccgctgttccgcgctaggcgtaacacttgtaaaataaccggcatcatccgccaaagtatatttccgggttttatttctaccaagtgatgtattacttgctgacatcaatgtaatcccctccggaacattaaagaaagtaacccctttaaaataatctgtcaaatcttcttctccttccaacacgacatccacacgtgttgccagtctttccaactgcaactcgatctgacgctgtatctctcctccgtccactctcgctccatcctgtcccggaaggacctctacattctccaacttctggaacatcggaatagaaacactcgattgaaaagcttgttccgggtacatgatactttcaagatcagcatactcatagattccatttaatgcatctacaataatcacaatattcggctcattagccaagaatacgaaatcatacgtaccatcatctatcggatggttaattacttcattcagctctgcataatacaatttattgctcacgcatcgccccgtatttttattaaatgcaagaatccgaagtcgctcgatctcgttgtcaagtggatccgttgaattcaacagacgtcctcctcgcacctgtaaatatgccgctgcattctctgcatcatccgctttcaagcgttcttcaatacaggacatcagtagcacagatgccagaattatccccaaaatatgtattttcttaatcattccttccaactataaatagccttatacactcatatta

SEQ ID NO: 59 - DNA, 13849 bp, Butyricimonas faecihominis
gaattttatagattgttgaatacataaataattgtgttatgaaccgaaaagatatgttgaataaacttcaggaacctgagaaagtatgggatatggttgtggttggagggggagctacgggtttaggagtggcggttgacgccgcgacaagaggatatagcgttgtccttttagaaatggcagattttgccaagagtacttccagtcggagtacgaaattggtacacggtggtgtacgttatcttcaaaaaggcgatgtcgctttagtattagaagcattaagggagagagggcgaatgaaggctaatgccccgcatctcgtgaaggatcaggcttttgtaatatcgaattatacatactgggataatttcctgtatttctgcgggcttacactttatgatctgttgtcttttggtttcgggtacggaagaagccgttttatttcccccacgaaggtgatggagtatttaccgacatcggtgaaaaaaggattgaagggaggtattgtttatcatgacgggcagtttgatgattcgcggatggcaattaatttggctcagacctgtgcggataatgggggcgtgatacttaacaaagcgaaggtttccgggattgtgcatgaccagaacgggaaggtcgccggggtgaagttcgtggatatggagtccggaaaagagatgctgttgaaggcgaagagcgtgatcaatgcctgtggaattctcgtggatgacttgatggcgatggattccccggggcatagtaagatggtgacaccgagccaaggagtgcatctggtgttagatatgaagtttttgcagagcgattatgcgatcatggtgccgaagacgagtgatggacgggtgttgtttgccgtaccttggcacaataaggttgtcgtggggacgacggacattatgcgtccggttccggaaatagagccgaaaccgttgaaggaagaaattgattttattctgaaaacggcttctttatacatggacccggccccgacgtatgctgatattgaatccgtgtttgcggggcaacggccgttggcagccccgaaacacgagggaaagagtacgaaagaactttcccgcggacacaagattatagtttccgataataatttaatcacgatcacgggaggtaaatggacttcttatcgtttgatggccgaagatacggtggataaagcgattgccatgaaactggtggatgccagaccctgcgtgacgaaaaaattccatatacatgggtaccggaagaacccgaacctgaaagaccacatgtacgtttatggtagtgatcaggatgcgattatgaagttgatcgctgaaaatccggaatacggaaagaaactgtcagataaatatgattataccgtagccgaagttgtttgggcagttcgggaggagatggccagagaggtagaggatgttcttgcacggagggttcgattgttgtttgttgacgcgagagaggcgattaaggcagccccgctggtggcagaagtgatggcgaaagaacttgggaaggatcaggcatggattgatgaagaagtgaaggagttcactgaactggcaggaaattacatcgcggctaagatcatgttttgatcttagcccggtgtatttcatccggaaagagctgcgagtagtaatggaaacgtttacgataatcagattggaatcaatataatatttattaaaaattaatatcatgtggagttttctgaagcctgagcctcacaaacccttgttgcctaaagagaaaattgaccccacgtacaagaagttacgtttacaggtctttttaggtatatttatagggtatgcggggtattatttagtacgtaagaattttactctggcaatgccctatttgcaggagttgggatttgacaagggagatttaggggtggctctttcggctaatgctatcgcttacgggatatcgaagtttttgatgggaggggtttccgatcggagtagcgcccgtaagtttttgccgttgggactggtgttatcggcactcgtgacgttgtttttgggaacaagtgcaggagtctcttcaatcgtggtcatgtttattacccagtttttgatcggttggttccaggggatgggctggccacctagcggccgggtgatgacgcactggttttccttgaaggaacgggggaccaaaatgtcgatctggaacgtggcccataatgtgggaggtagtttggtcgggatcatgttttccgtggggttggtgtggttcggttcctggcagtctgccacgtttgtttttccggctgttgtggccttggtggttgccgtgattgcgtttattttgatccgggatacgccgcaatcgtgtggtctgccgccgatcgaggaatatcgtaatgattaccctaagaattacagtgcaaagtcggaggaagagttgacggcaaaagagatctttttcaaatatgttttgaataacaagatattatggtatatcgctatcgctaatgcttttatctacttggtgagatacggggtgcttgactgggcgccgacttacctgaaggatgtgaaagggtacgatagcggtgcggtaggctggatttattcggcttacgagatcgcggccattcccggtacgattatctgcggtatcgtgagtgactacgtgttcaagggacggcgggcgatcacgacgatgatttacatggtgctggtggccttgttcgtgtttatttactggcagacggaacatgatctggtgatggacagtatatgtctgatcgctattgggttcttgatttacgggccggtgatgttgatcggggtacacgccttggatttggcgcccaaaaaagcggcgggaacggctgccgggctgaccggctttttcggttatttctttggaacggctttgttagcaaatatcatgttggggtacgtggtggatcacctcggatgggactggagtttcattatcctgttgggagcctgtgctctggcattcatttttacggcatttacagtaagagaagaacaatatctggtaaaggagagtactaacaaacattaaacgctctaaaattcaaaattatgattaaaaagttttttcatgcagtgatggcatgcgggttgatagccttggtcatgtcgtgtgaagatcaaaaattcaacaacataaacgtcgatgtcgacaaggttgaattggatcatttgactcccgatatgattaaagtgcgggattacgtgccggagtacgctgttgtggctcaccggggatcgacgttctggaccccggaggagacggaggcagcgtatcgttgggcgagagaaatcggggctgactatctggaatgtgatatgcaggtttcgaaagatggggtggtgttggcgttgcatgatgacaacttgaaacggaccacgaatatcgagaacgtgttcggggagaccattccttacgaaatcagaaaggcgtattaccagaagatcggttactctgccgaggaggctgatgcgttggtgaaagaggatgccaagaattttgttccaaatcttccggcttattatacctacgaggagctgatgatgctggatgccggtacgtggtttaatgaaacgagtatcgaacaggctcgcccgagttttgcctcacaacatcaatacatttctacgttggaggatctcgtggcttattccaaggggaaaatgctggaacgggacgcacaaggaaaacgagtgttcacgatgggacagaaaactggggagaagatcaagagtttaagcggtacggccgacgtaatcaagtacacgttcggttacgtggatgatccggaggacacgggaaaccgcccgggaatttatatcgagttcaaggagccgtggctgaatcctgccgggttcgaggagattgtctacaaggaactggatcgtttgggaatgaatattatcacgcaaccggaaccggaaagcaacccgttctacgtgaatggcaaggtgaacacggggaacacgaatggcaaggtgattttgcagaccttctcgttggagagccttgtgagggttgccgagcattttgaaggtaaggtcccgatgtgtttcctgttgtggaaaggtacgggagcgacggatatcacgtatgacgatccgctgggttatgcctcgtttattaatttgggcgtgaagtacaaggctcattttattggaccgtgtattgccggagctccgaataattacccggaactgaaccaaccgtggcaggattacttgattcacaaggctggaatgaagaatcatccctacacgtttgacacgtatgaccagatggctaagtatttcggacaatataatttcggtgtcgagattgacgggaaatataaagcaccttatctggatgcattgtttacgaaccattctgatatgagtatcaactatatgattactcaaggctggcgaaagagtccggcttccgagacgttggttgacgcgaaggtggtgttggagagattaggttactaaataattgtttaaatgcagaccagtatgaaaaaatatatattattccctgttgtattagtcgccctcgtgttgtcgtctaatatggtgaaagctcaggccgaggatgtttccaatcctcttttacaatatatcaataaggataaaggaattcgtttcacggcaggcgctcgtttgtttgctgatgtggcttattatcattcggagtacacgccgatgaagtcgggggcagcgctcacggatgctcgcatacggacgtcgttgacatacgggccgttgtatttttacgctgatttcgatttttcgaaagggactttcaagcaaaagaatatttttgtgcgatataattttcacgaatcggtgtacgggattcatagcgtgaaggcgggctattttaacgaaccgtcgagtatgagtctgaacgcaagtttgtataattaccattttatttcccgtgcggctccggccatggctttatcggccgggcgtggtttggggattacctacaagtattatgatgccactttcttcgctgatcaagggcttttcgctgagaacaagtacaatgaccagatttccggttttcaaggagtaagcttgagtggacgctggttgtacaagccgcttaataatgagtttataactctgcatgtcggggcctctttccgctacggacggattaacacgggcgaggtggtgaataacgtgttcaagacgaatatggagttggagtcgaatatgcagacttacgtggacggtacgacggaatttctaaacgcgcaggtgccttgggcgaagaacacgatcacggtaggaccggaagtgctggtggttaccagtaatatgtttttgcggggcgagtatatttacaagagattatacaagaaaagaaatgacgaggctttgttcgagaatcagttgggaggcgtttggagctggactaccttggcatcttggcaggccggaaacccgatacggagttccaagtttcaaggggcgtacgtggaaatggggtacttgctttgcggtgaaggatacggttatgacgatgagtacggattgttacggggaagtaacgagaggggagatctggagattgtggcccgttatagctacacggatttgaatgacattaataaaggtgatttctttttaattggtaagcaggtattttatcccgggggagtggtggcagattacccggccgtgtcaacgagtattggcgggggacggttacacgcggccacgattggcgtgaactacacgttgaaccagtacgtgaaggtgatgggcgagtaccagtatagtaatttaaagaatgtttatttcccgttggataagaatttccatcagttgcagatgcgtttgatggtgtcgttctgataggagagaaggaaaaagtggctgtctaaaaagtcaattttaaacaactaccctcactaactcccccttacacagggggagctggtgggggtagttggcaaatacaggcaggactttttggacagcctccttataaaccttatgactttgtaaacgatgtggacttttttagcgatgtggatttgctttttaattccttttcattatttttgggattcgaaacacacaaacactaattttatcgccgaattatgaaaaaagtcactttgttattgatgaccttggttgctgtaactagtatggcaacaggtcaggttgatgtgagtgcggtcaataaaccgatcgagttgttgaacgaggcaaatacggatatagaaaatggagattataaagatgctgttcaaaaattgatcgcggctaatcggttgaatccgaaattacgagaggtttactcgtctttgaatacagcttgtactcacacgaaccagatttctttgctgaaggagtttctagtgaaaggaaaggggatatttgaggaagatgacgaactttgttattatttggggaatatttatcagaatcaacagaattatgcggcagccattaaggagtattctctggcaatccaatacgctaagaaaaatggggaagaatacgagttggtgtacgcttattatttgaaccgggggaattgttatttgaagcagcgtgaatttgcgaaggcgataccggactatacctattctctcaagctgaacaaggacaacggtgctatttacgcgaaccggggaattgcttatttcagtaccgggaaacgcaaggaggcgtgtgccgattggcgaaaagctaaatcgttgggagtgacgagtgtgaatgcttacattaatcgctattgccgatagcgattgttacaagttgcaggtttatgggttacaggttatttgatttaacttgtaacttacagagtatagctcaacttgtaacttgaaacaaataaagaggctttgggcctctttatttaaaaatatcaatcagtgatgtgaggttgctggtaaagagtttaacggaaatggcaaggagaatgatacccaagaatttacgtaatatataaaccccacctttcccgaataccttttcgaccagcgatacatttttcagtacgaaatagacgacaataatgtttagcgtcaaggcgataataatgttgatgatgtgatattccgcccgtaaagctaacaaggtggttaatgttccggctcccacgatcaagggaaatactaacggtacgatggatgccgttcctgacggaccgtcatttttgaaaatagggattccgaagatcatttctactgccagcacgaagatcacgagagaaccggccacggcaaacgaggaaatgtccacgctgaacaagttgagcaggccatccccgacgaagaggaatgccacgagaagaatatatgatgccaaagcggcttttatggcactaattgtgtgtcctttattttgaatatcattaatgataggcacggctcccgtgatgtcaattactgcaaacaggaccatgaatgcacttgcaagttcttgtatattaatgtctgaaaaactcatatcaaaaagattggtttattcttgattaaaggttatttttgcctacaaagatacagaaacaagaggtgttatcaaaatgaatcaaaatagaaaagttatggcgtatacgaaactaattgtcgagaaacaggataatatttgcacggttaaaattaataacccggaggcgttgaatgctttgaattcgacgattttgaaagaattggatgctgccttcacggctattggagaggatgacagtgttgatgttgtcattctgacgggtgaaggacgttcgttcgtggcaggagcggatatatcccagatgagtacgttgaatgcggtggaggggaaagcgtttggagagttgggagcggctgttttccgcaaaatcgaattgttgaacaaggtggttattgccggtgtaaatggtttcgcgctagggggcggatgtgagttagccatggcttgtgacatccgtatcgcttcggtgaaagctaaattcgggcaaccggaagtaggtttggggatcaccccgggattctccggtacgcaacggttaccgcgtatagtgggattgggtaaggcaaaagaactgatctacacggcagacgtgattgtagccgaggaggcctatcgtatcgggttggtgaacaaggtggtggaaccggaagcgctgatggatgaatgtatggccatggcgaagaagatcgcggcaaaagctccgctggctgtgcgttatgctaaagaggcgattaaccggggagtggagacagatattgacacgggtatttcggttgaaagtgatttgttcgggttgtgcttttcaaccgaggatcagaaagaaggaatgcaggcatttctaggcaaaagaggagcggaattcaagaaaagataaaagctgaaaagctggcgtttgtacgataatagagaatttgatattatatatttgaaggttttaaattaagaggaaatgaaaatttgcgttgtaggtacaggtacgatgggtaatggtattgcccaaacctttgctcaagccgggcatgacgtgttgttaaaaggtcgttcagaggcatctttaggtaaagctcacaaggctatcgagaagagcctttccaagttggtagaaaaaggcaagatggaagctgccgagaaggaggctatcaatgcccgcatcaaggacactatggcatacgaagattgtaaagatgccgatttggtgatcgaggtggttgccgaggatatggcaaccaagaacgagatattcaaaacgttggatgcgatctgcaagccggaagctatcctggccacgaatacttcttcgctttctatcacggaaattgctgccgcaaccagccgcccggagaaagtgatcggtatgcacttctttaacccggtgccgatgatgaaattggttgaggtgattaaagggcagttgacttctcaggaggttcacgacaaggtgatggcaatcgctgcagaagtgggtaaaaccccggtaagcgtgaacgaggctcccggtttcgtggtaaatagaatcctgatcccgatggtaaacgagggtattggaatttacgctgacggtgttgctaccaaggaagagattgacgaggccatgaaattaggggctaaccacccgatgggacctttggcattgggagacttgatcggtttggacgtgtgtctggctatcatggaagtgctgtataatgaattcggtgattccaagtatcgccctcacccgttattacggaagatggttcgtgccaacttgttgggacgtaagaccggaatcggtttctatgattacaggaaataaggtgtaataatttataggaagatgtattaaaactcgttttgatacatcttcatacgaaggcttgttttacttcatcaccttgatagccttccatatatcagaatatgatgtcccgcttctgcctagtacttctgctcgttgcatagcatgatccattttgttgtctttaattagttcggcaacccacttttgatgcttgagaaaattttcctttttgtcgaactggacaatgtatctgcgcaaggaactgattgcgtcacgagaggtggcaaggtgacgattggtcttttcgtagtgaagtaaaaaccaatattcaatagagggcatactacatgcaagcgttacacgggaattattatcgtatttacaatgcaattcctttatacgttttccttctacttgatcccatcgcatgacatcttcatcgaagaagcatattacttctgcgtcatcattaagtccctcctcgatgagtttgtttatctcccccatggattcattaccaaatagacgagggtatagctcaaacttcaagtcaagtagtggcttgaggtgctttaaataccaaaattcagtaagtcctgctccaaccacacgtttctgtagttgccgagtttgtcgagaattaatcttgcgtgccataagtattaaatatttggaagtgcgccaaattgacctttacgataggcacgttcaatctttgaaatcttgttcaatcccttgaattccacgagagaatacaaatcggtagcacccgacttgtctttttccacaaaccagatattatccttgcggacaagatcatcaatggtattaagcaagccaggataatgtgtggttatgagcatttgactctcgttactattcatgatatattcttgaagaataaactcaattaaatttggatgtaacgaagattctatctcatctagtatcaggactgagttatttttgattgcctcgtagatagctgcttcaatgtccattacacgtgttgtaccatcgctctcttgacgagtggataactcgtaagtttccagaccgcgttcattttctaccgtgtgttcaaaacctaagacatgttctttataagtttctggagtaagtaattctttctttttatcttcgggtaaagaatcttgtatctgtagatatttatgaaaataaggaggtaacggcttttcttcagtcttttcactcaatccagtaatattgaagtctgcctgatgaaggaaacgaagtaagtgctctttaaaatttacatcttctcttacctttctcttgctatatttctccatgtttgtaaatggccccaccataggcatgaatctgttgcgaatccattgacggacaccatccacgtgttccattttcatattcacgtgaccacgagctgcaaaaaatgacttgttcggaaggcagtttagagtgagggctttctgttcttcctgatcaatcttctgcactgcaggattgaatgacaatacagattgctcatcttccaatactcgttcaaacactttgattggctgaacagtcttataatatgacaatttttcgtgtataaccaattttgttgtagctgtaagttgataccaatagcgtattccgttaacccaaaattttatactatattcagatggcagatttggcgtttccttatcaagtaaaaacggttcaaaacctgtcggttcatccatactctgtgggtcaaacaccataaaatcgcgaagtgcggagattgcataaagtaaattactttttccgcctgcgttaggaccgtaaacgatcccgagtttaagcaatcttgtgccattaggcattgtcaccacgtgttgagtttcaaatgtggtatcaggggttgcttcgaaactgaatgtcgtttcttttttaaaggataatacattcttgaatataatttcttctatcatgtcatgagaaatttgttgtaacgatgtaaagataatgttttgatatgaattgaaaaaataaaaagacagaaattcattagtctttatctgattttagagtggaatatgctgatttgtgaaataaaatagtcgtaatcgacttctttatggtgtttttaggttcaatatgcattaaactctgacaatttgtactttgccgaccaaccaactaatcgttgtttttcggtctttaatcgttgaaaactctttctaaagtggtcgaattcgaccactttaattgggattatggataacttcccatgtgctaaggaattcgattatataacggtttcttgttcaatgaactgtttactgcgatgaaaagtagaattttctgtaatattttattgtcctagttgtattatttggcgtttttgcgggtgagaatcgtctgctgatggacgggatttgaagttgttaaaattgaatgttagcccgatccagtaagcatgggtggcttctttgctgtaatttgccagacgataggtgtccgtgtttgaacgggcttgccattcggacgtgtcgaagacgtcggaaacggagaaactgacttgaaggcggttgttaaagaaaccttgtttgattgccagatcgagatagtaattctcttcaattttgaattgtggaacctttgttggtgattgataggagaagagggcttgaaattcggtatgttttttagaatttaagtttaattccaagttgcccgaccaagagaaatcgtcaacatgaaggtttattccttgatatttcccgttggcatgagcgtggacgagggatatggaaggtgtgattgtcatccatgaggtgggagatccggatagattaatgtccaagccgaccttgttttccatgctaccattcgtgtaagatagggttaacgtgttgtcttccgaaaataacgtgacaggagtgataaacctttcggtggaattgaaataaagattcccgttcagctggatcttttccccgtgtagaagataattgatttcggcccggctcgtgatttcggggcgtaatagtgggttaccttgctcgaatgtttggtggtcgatcgggtttgtaaatgggtttagttgggtgtaatccgggtgtgcggcctttctagtaaaatgaaaggccagttcttgctgatcagaaggcgtgtattggagtgttaggtgtgggtaaaagtagaatcgatcaaaattatgtttgtccgtgttttccatgagcttggtgcgggtgatatcgtaatcggcgagtatccctattttatagtgccaaaattctccttgttgttgggagtaggagagatgcgccgtgtatatgtattcatggtggttgaggccgtcgttaaggggcaaattcgataaccaattattaaggttttcttccgtgtcgtgaagattgtatcgggttttattccatctggaaaaaaattgaattccggtttcgagttggccttgattttcgaatgtatagaggtaatccatttgcaggcggacgaattccggtttctcgtttccggtggtggtataggtgaggagatcatcgatttgatacgtgcttggacgggagtctttcgtgtgggagaagatcccgtttagcgatagttcgtgtttgtttgtttcgtagatgtgtttgtagaataaggaaccttcaattgttttccggctgaatgctattcgatggtgtaggtcatattcttttgtttgcgtgcgattatttatatcccggtttgtcgtgatcttggggaattgtagtttgagattccataggaaaaggttacgagaagaagggcgcatatctaataggatagctacggaatggcttaaatggtgttgttctgtctctaatagttgagatgtttttgccgaaaaagagcgaaataactcactgctgatttcgatgcgatccgagtgtccggaataatctaggaatagatcccagttcttttgtgtatatcctaggtttacgtttcccgtgaaattgttcgtgaaatcatagttgagggaaactgaaccgctccatgggttcttggtctttttctcgttttcttgggcgtaaatgtcggcattcgtgcaaaaggtaagaaggctgaagagtatttgtgtgatgcgctttttcatatatctacatggttgttttatatgtttgacaagggatatatgtgaaaacttgcgcttgctggggcgttttaagattttttgtaatttgtggtttctggagagaaactcacgagaagtaatggagatgctagggtgataatcccactttttcgatgatgtctcgaagcttagtcgaagcttattcatttggcaatgtatgagctacgtgtaagtttcgaatgaactctgaatgagggagattatttgggttagattacttctttatttgggttggtttagggtgaggatgggtactatgttgaattcgattttatgaatagcgtggtaagacatcgtgatgaatataatttgggtttatatgatttgaaataatgactgtagagcttgatttgagaatgatttagatgtcttaaaacgatcgttttatgatattaataaagcagatctgttaaattgataacctaaaag

SEQ ID NO: 60 - DNA, 13829 bp, Butyricimonas faecihominis
cttttataataattaaccaaagcggctttccccgtctatccaaggagttaaagggtatttcatgctcacaacagagcgttaacgaaatcataattcaccccctaaaacctcaattttttaagggaaacgatttatcggggaatcttgattttatgctgatatttataaaaacaggcataaaaaagaatgtaacgaaggtcatttcagtcccattcgctacattccgtaatgattctatcgggttatcccgcgtaaatagtctttatcgaacttccgatcccggtttcacctctttatccggtgaaacaaaggaaagcgttccgtcggcattctcggccatcaggatcattccttgtgacacgataccctttaacggtttcggttccaagttaaccaacacgctgacttgacgcccgatcacctcctccggcgtgtaatgctcggcaatacccgaaacaatcgtacgttcgtcaattcccgtgtccacggttaatttcatcaacttcttagtcttagccactttctcggcagcgatgatcttacctacccgaatatctatcttcatgaaatcctcgtactggatattctccttggcaggggcggccttcacggatgccatctcgtttgccttcttggtagccaacaatttatcaatttgagcctgtatcgtcgcatcctcgatcttctcgaacaacaatccggcctctcccaattcatgcccggcaggaatcacgccatcacccattttagcccaatcaatcacgtcaatattcatgaactcacgtaatttctgagaagagaatggcatgaacggttccatcaacgtggaaaggttggcagaaatctgtaaacagatattcagaatcgtcttcacccgtccctcgtccgtcttgatcactttccaaggttcggtatctgccaagtatttattacccaaacgagccagattcatcgcctctttcaacgcgtcgcgaaaatggaaggtctccagactcttctcaacacgttccacgatttgcggaatttcagccaagacttctttatcgtaatccgtcaactcgccccgttccggtacccggttggcaaaatacttttgtgtcaacaccaacgtacggttaatgaagttcccgtagatagccaccaattcgctgttattccgagtttggaaatctttccaagtaaagtcattatctttcgtctcgggagcgtttgccgtcaacacgtagcgtaacacgtcctgtttaccggggaactccacgagatactcgtgcaaccataccgcccagttccgggatgtggaaattttatctccttccaaattcaagaactcgttggccggcacattatccggtaatatataagaaccatcggctttcaacattgccgggaaaataatacaatggaaaacaatgttatccttcccgataaaatgaatcatccgggtttccgggtctttccagtatttttcccattccggagtcaggtctttcgtggcagagatatacccgatcggggcatcaaaccacacgtaaagcacttttccctcggctccctcgattggaacgggtactccccaatccaagtcacgggtcaccgcacgaggttgcaaaccgttgtccaaccaagatttacattgcccgtaaacattcggtttccactctttatgctcttccagaatccactctttcaaccaaccttcatactgatccaaaggcagataccagtgttttgtttctttcagttccggtttgtttcccgtgatcgcagacaccgggtcaatcaaatcggtagcgttcaagctagttccacaagcctcacactgatccccgtatgcccgttcgttaccgcaatgaggacatttccccacgatataacggtctgccaaaaattgccctgccttctcgtcgtagaactgcatcgaggtcttttcgataaattttccctcgtcatacagcttcttgaaaaaagcggaagataactcgtgatgcgtcttcgaacttgtccgggaatatatatcaaacgaaatacccaattcctcgaaagaatccttgatgatcttgtgataacgatcgacaatatcctgcggggtcacaccctctttttgagccttgatcgtgatcggcaccccgtgttcgtccgatccaccgataaatgccacatcctcacctttcttcctcagatacctcacgtaaatatcggcaggcacgtatacccccgccaagtgtccgatatgcacgggtccattcgcgtagggcaaagccgtggtaatcaaatttctcttgaacttactcatatatccagtttataaacttttgaactctagtggcgcaaagttagaaaaatattagttaccttcgtactataataacaaaacttcaacttttatgttacgacctatatacctgcagccgggagataaggtggctttaatttcaccctctggcgttgcaacaaaagaacagctggatgcggcctgttcactcctgacctcttgggagttggagccagtacccggacaacacgttctttcccgacacgggagattggcaggcacggatgaagaacgattacatgatttacaaacagcccttgacgccgaggacatccgggccatctggtgcatggcgggagattacgggatgttacgtatcgtacaagaggcggattattccatatttcaaggaaaccccaaatgggtgatcgggatgaacgacatcacggtgttacacgccaaactccattccctcggaatcgagagtttacacgccttcatgccttccgattacaatacaacttccccggaagtggtcacgcaattacggaatttccttttcgggatcatttcctcgtacgccatccctgcacacccgttcaaccgaccgggaatcgtggaaaccgaaatgatcggtggaatgttgcaatgggtgcataacctgcatgacacttgcatcgaacggaacacgagagggacgatccttttcatcgaggacccgtctgacgatctgtacgaaattgaccggaacgtgaaatgtatgaaatacgccgggaaattccaacatctggccggattggtagtcggggaattcggaaaagaatcgaccccggaatttaaagcagaagtgtataaactgattcatgacgccgtggaagattacacgtatcccgtgtgtttcggtcttccggccggacacgtgcgcgacaattttcccctgatcttgggagcaaacgtggaattagtcgttcacccgaaaggagcggaactacatttcccctgatcacgtacaagccatgcacaaaattttattggtaactctatttttaatttacattgcaatgaataatattgtttatccggcaaagctggacaccctataccgggcgattgaccatcgccagtcacaacacgatttgcccttgatcggcatttctgccaatttcgaaaacgggaactcgtgtatcgaacactcatacgtgatttcaatccttcaggcgggcgcaatacccgtgctacttcccgtgcataacgacatcgaaacgctccggaagaccatcgaaacactcgacggattgatgcttaccggaggtggggatattaatccgctgtacgggaacgaggagcctctccccccgcttggaagtattgatgccgccagagatcaattcgatttcacgttggtaaaactggccgccgaccgacaaatccccatcttcggaatctgccgcgggcaccagatcatcaacatggctttcggggggacaaactatcaggacatctattcccagcatgaacagcaattattgaaacacagccagtccatcagccgggaattcggttcccacacggtaaacgttgtcaacaacaccgtactccactccgttctcggaactgactccttgatcgtgaattcataccaccatcaagcagtcaaagacgtggctcccggattccgggtaagtgccacctctcccgacgggatcgtggaggccatggaagggatgcccgggcaccgcgtattcagcgtgcaatggcacccggagaaaatggccgttcgcccggatgagcaaatgatgaagttatttcattattttgtggacgaggcaaccttgtttaagaaagccaaagagattcatcgaaacagtcttatcgtggattcccattgtgacaccccgatgaaattcaccgaaggattcaatttcggggaacgtcacgaggatgtcaaagtcgatctccccaaaatgcaggaaggacgagaagatgccgttttcatggtagcctatcttcatcaagatgcccgggatgatgaatccctgcaagctgccacgcaaaaagccgtggatatcttttaccagatttccgaacaggtaaaactcaacgaaagccaagtaggtattgcctataacgtggatgatttgatctacttgaaaaatgccgggaagaaagccatcttccttgccatcgagaacgggtatgccatcggcaaagacctcaacaatctttccatgttcaaagacatgggaatcacgtacattaccttatgccacaacggcagcaatgatatatgcgattccgccaagggtgagccggaacatgacggattgagcccgttcggtcgggaagtagtgaaagagatgaaccgtctcggtatcatcatcgacatctcgcataccagcgcgaaaacggtgcaggatgttctggaactcagcacggcacccatcatcgcatcccactcttccgcacgagctttatgcgatcacccaagaaacctcacggatgatcagatcagggcgatcgcggccaaaggtggagtggtgcaggtatgcctctataactggttcctaagcaaacaacccaacccgacgattctggacgccgtggcacatatcaatcatatcgtgcgacttgtcggcattgaccacgtgggtatcggcacagactttgacggtgacgacacggaaaaactaaccggttgccgggctgccaatgaagtgattaacctcacggttgaacttctccgacaagggtacaccgccgaagaactgcataaattatggggagataatttattgagagtattgaataccgttcaaaattaaaatacaagcttgcaattttcagctcatgctaaatttcacattttaaaccatgacgatcgaaacgttacaccagaaatttatacacaaactacccggtgaaacagcacaagaacggatgtctccccagccgaaatacgtggaagggaaagagggaatccatcaaggtcatcccattagcagtgccgttatgatgctccttgttccctaccaaggagacttggcgatacctttcatcaaaagaacaaatgcagggaaatatcatgggggacaaatggccttacccggtggtaaaagtgaaccgggagacgggaatagcctgaacacggcattacgggaatgtgaagaagagattggggtaccccccaaggaggtcacggttatcggaaaattaagtgacgtgtatattccattaagtaactttaatataacgccctttgttggaactatcccggaaatgcctaattttgtactctcgaaaaatgaagtagaaaaagtgatcatcattccgttaaaagacttactggacgacaagaataaaacaagtcaggtattgtaccggcaggaacaaaaaatcatagccccgggttacaagatcggagaaaatttcatctggggagccacggccatgatgatcgcagaactggaagccatggtaaaaaacgaacaataacgactgaacgcaagatgaagaacaaattttgtatatacattctcttcctgttactcggctgcatggcttgtaatttttccaccacacaggaaaaatacaaaacacttggcagcgaaacatgggaacgagacagcaattacaaattcgaattcaacatcacgcaacccggcagttatcatgtcagcacctgcatccgtcactctactgactacaaacaaagaaatatcagttgctacttgatcatccgacatcaaggagtagaagtggataaagagaattcagacattatcattgtcgacaataacggcaggtgggtcggccaaggactcacgggactaaaaacagtcgtacaaccgattgaccggattttccattttgactccacgggtatttataccatggaaatcaaacaccggatgaaagataaacaactgaaagggattaaaaacataggaattaaaataaaatccacaacttattatggcgaagaataaattggcgaaatttgccgaaatggaaaccttggaaaacgtgttccaacccacccatgaagaagtattccgcacggattacaagttaaaaggaaaatggggaaaacaggttttcggcaatgatcacccgatcgttttagaagtgggatgcggtaaaggggagtactccgtgggattaggcgaactctatcccgaaaagaactttatcgggcttgacatcaaaggagcccgaatgtggacaggggcgaaagccgcgaaagaaaaaggaatgaaaaacgttgttttcctgcgtactcacgcagaagaactggaatctattttcgcacccggagaagtttccgaaatttggattacctttcccgaccctcaaatggcaaaagcccgcaaacgcctcacgggaacccgttttctctccctgtaccgaaagtttttgaaggaagacggcctcatccatttgaaaacagatagccctttcctctatcaatacacggcagaactggtcaaggtgaaccacctccccgtgaacgtcaacacggatgatctttacggggttggactggatgataagattttaggtatcaagactttttatgaacgacagtggctgtcacgaggtaaaaccattaaatatatccaattttcattggccggatcgtcccaactcatggaacctgaaatcgacattgaaaaggatgattatcacagtgaaacacaattcatgacgagacaattgaaagttgaaaattgaaaatgaaaaaatgaaagaacctgtaacctgtaacctgccaatttgtaactcgccgaaggcgaattctccccgggtattaatggcgatgagcggtggaattgatagcacggtggcagccatgttgttacaagaccaagggtacgagctggtaggagttacttatcgggtatacgatcaaatctcccaagcctgcatggagaaagaaaaggggtgttgcagcgtgaacgccattttcgaggctaaacacatggcccagcaaatgggatttgaacatcatattctcgatattcggaaagattttaatgatctggtgattcggaatttcatcgatgaatacttgcaagggcacacgcccaatccttgcgtactctgtaattccacgatcaagtggggaaaattgattgccatggccgacgagctagactgtgattatattgccacgggacactatgcccgcatcggtcaacaggacggacgttattttctgcgcaaaggtgtggacgagaccaaagaccaaacttattttctctggacgttaacccaagaaaatcttgctcgcacgatctttccactgggggaattaacaaaacctgaagtacgacaaattgccttggagaaaggatacgagaaactctccaagaaaagcgagagtcaggaaatctgtttcatcccggataatgattaccgtaccttcctcgcagagaacgtggaaaactttacagagaaatacggtcccggattgtttgttgacacttccggcaaacgcttgggagaacaccggggattccccaactacacgatcggacaacgcaagggactcggcatcgccctaggacatcccatgttcgtggtcgacatccgaccggaaagcaatgaagtcgtgctgggaacccgggaagaactacaaggaaaaacgttccgggcaaaggatattaacctaatgaagtacgcctccctacccgatggcttcgaagtaaacgccaaaattcgttatcgcaaccggggagcgcaagcctccgtctatcacgaaaacgacttccttcgagtagaatttcacgaaggaatggattcgatcaccccggggcaaagtgcggttctatatgaagagatcgacgtcgtggggggaggaatcattatctgaatacaaaaatttaagctggaaaaagaaaatcgaactctcttcttccagcctaatgtattataatccctcaacctaatcgcgggtacaaaatcccttacccatactcgcgaagtgaaagtgggattattttattccggtacccaagaacttcatagaaaaagaatcaaacacgtccatgatttccggctgacgagctaaagactccgtcaccccttccaaagcgtataaacgggaatatttcaatattttctcggacatcgattttatctctgttgtccctagaaacttctcggcagcccagacaatattatcatacgcttccggttggcgggcaatagcggaaaagcaagctgacagacattttccccgagccgttccccgttccacttccgcctctttatccaatggagtgatagcagtaatcgtgtcatactgagccaattttgccgtagcttgtatcaactcttttgccatttccggctgacgggcaatactttcatataatgaaagggtggaatacatttgattcgccttgtaatcagacgtgaatgtatcaccattatatatagtaacatcatccccctcatccgaacaagcgacaaaaaatagtaggcaggcagccattaacgtggtaacaattcgtctcatttgtaatttaaatttatcagtttaacttgttatctataatcttcgtcaatacctcccgcaacgttcctcccatggcacgcaccatcttcggcacgaaactattggaagtcattcccggcgtagtgttcacctccaacataaaaatctcgtcctcccgcacgatataatccacccgaatgatcccttcacatcttaatatatcgtaaatcatcgaagacaatgtcttgatccggttagtcagttcgggcgagatgcgagccgggataatttcatccgacttcgtaggatcatattttgcctcgaaatcaaaaaactcgttcttcggaaccacctcggcaatcggcatggtaatatccatatccccggccttcacgaccccgcaagtcagttccgtcccgtcgataaatgtctcgatcaacacttcccggcagagagcaaaagcctttttcaaggcatcttccaactgggcagcctcctttactttcgtcaccccgaaactggaaccttcggcattcggtttcacgaagcaaggtaaccccacctcgttgataatctcgttcacgtcgtatgccattccccgaatcaacatcacggaatcagccacgtttaccccgtaactcttcaaataagtattacacgtgtgtttatcgaaagtcaaggcagaggccaacacgttacagcacccgtaaggtacacccatcatatccaaatacccctgcaacaacccgttctcccccgggactccatgtatcgtgatataggcaaaatcaaacaagatcttctccccgttccgggtaaacgagaaatcattcttatccacggggtatttttcctccccgatctccacgtgccaatcccgttctttcagaacaacaagatatttattgtacctagtttcatcaacctcatcatatatattcttcccagatttcatggaaacctcatattctgaggaatttccaccagcgataatggcaatatttttcattttgaattcatcttttataacacaacaaaaatacaaaaaagagaataggagatgacaaaaagtttatatttttgcaagcctcaataacacaaggatatgacaaagataaacgacctgacacaaggcagcatcagcaagggaatttggagtatggcaattccccttatcacggcctctttcgttcaaatggcatacagcatgaccgacatgatctggctgggacatctaggtagcgaaagcgtggccgcagtcggtgtcgccggattcttcacgtggttaggtaacgctttatcattcattagtaaagtcggggcagaggtcacgatctcccaatccttgggggctcgggcaagcaaaaggacccgggcatacgccaaccaatcggccatgttgtcatccatcattgccttgggttacgcttgttttatttatatcgcggctcccatgctggtcgggttgtttcacttggaagagaatatctcggaactgtccatcatgtacatgcgcctgatcacacccggactgttcttcacgttcaataacaacacgtatagcgggctatataatgggcaaggaaacagtaaaaccccgttgaagattgtcgccaccggattaatattcaacatcattcttgatccgctattaatatacgggtacagttttgttcccgcaatgggaacggcaggggcagccattgccacgaccttctcccagttagtcgtgttttccatcttcatttataacctttatttccgtaattcatccatcggaaaactctactttgtcacccggctaagagcccggttcgtgaaacgcgtcgtctcgctcggtttacccgtaagcatgcaaagtgctttattcgccatgttctccttgactctggccaccgtggcggcccaatggggacatatcggggttgccgtgcaaagcgtgggcgcccagatagaggcgatcacgtggatgaccgccgccggtttttccaccgcgttggcagcttttactggacaaaacttcggagcccgcaacttggaccgcatacgcttgggataccattacacgttgaaactcgccgggggaatcgccttgatcgcttgtctcgcctttctgtttttcagcaaagaaatattcagcgtgtttatcaacgaaccgcagacacttgttgcaggaagtgcatacctgaaaattctcgctatttcccaaatattctcagccatcgaacaggtcaccgccggggctttcaacggttgcggacgtaccaccccgcccgccatcgtgggaatcatcctcacgggagccagaatcccgttggcctattacttggtttccttccccacgctcggcctaaacggcatctggtggagcatctcgatctccagcgtgatgaagggcatcgtgctggctatctggtatcaatcatttcaaaaacgcctactaagtggacgctacaaacccactggaatcctaggaaaaatgcacgccgtggcaagtcgtctttggcagcaatttaattgaaaattgaaagtataaaccggaattcaataagaatctcgttcttttcgtgtcaaaacgacatgaaattattacagaaaaaattctgtaatttttcggcataaagattgttgatgtaaaaaataaggcttacatttgacggcgttaaaaagcaacaaatagccatttaagaaacgtataacaataaaaaaattacagaaatgaaagtaacagttgtaggagcaggaaacgttggtgcaacttgcgcgaactgcatcgctgaaaaggacatcgtgaatgaagttgttcttctggacattaaagaaggcgttgcagaaggtaaatcattggatatgtggcaaaccgccccgatcaatctttatgacacccgtatcaaaggtgtaactaacgattacgaggctaccaataattcagaagttgtggtaatcacttcaggtcttccccgtaaaccgggtatgagccgtgatgacttaatcgcaacaaacgccggtattgtaaaatcagttactgaaaatattatcaaacattctccgaatgccaagattattatcgtgtctaacccgcttgacgtaatgtgctactgcgcttacttgactgccaaagtcgattcaagtcgtgtattcggtatggccggtattttggataccgcccgttacagagcattcctagctgaagcattgaatgtttccccgaaagatattcaagccttgttattaggtggacacggggacacgatggttccgctcccaagatacaccacggtttcaggtattcctgtaactgacttgattgaccatgacacgttgaacgctatcatcgaaagaacgaaagttggcggtggcgaactagttaaattgatgggtacttcagcatggtacgctcccggtgcagcagccgctcaaatggttgaggcaatcgtgtgcaaccacagaagagtattcccggtttgcgctttgttgaatggcgaatacggaatgaacaacatctatttaggagttccggtaatcttgggtaagaatggtatcgagaaaattatcgaggtaaaacttgacaaggacgaacaagaattattggctcaatcagctaaagctgttagatcagtaatggatgtacttgacaacatgaaattattttaactaacaatagtacttcacgatcattctttaaaaaaccgttccggggcgccgggacggtttttattttaatcttccttgttgtgaaaaaatcctttcatgacatatcatctattccaagcaatctaaccgtaaataaatggtaatactaccgtttagatctcctaccttcctttcatcgccctttcatcaccctttcatcgcccttccccattatccgagtaacggttgatctccggggatgtaacgcaagagagagattattaccctagtatatcggtagtattaccgtggattccgatacacaatccccctcaaccctcgttcttcaagctttaccttttagtttcctcgcaccattttataaaataattcacacgactgttgatttaatgaaaaatctattttaactttgcaatacaaagaacttttagaatatggaaaataaagaagcgctcgatacattacacgacatcaaagaactcatggaaaaatccacgaaattcatgtcgataagcggaatttccgctattctcgttggcatttatgcctgcatcggaaccggcttggcctactttattctaaacaaacaagactcttttgacaccttgtttaatataccattattaaatatcaacaccacttaccagctcgcatcaatttgcttgatcgcgctgggagtactcgcactctcactcctcaccgcattcacgatgagctaccaaaaagccaaaaaaggatgtagaaacatctttaaagataaatccgtccaccgtttactctggaacttctttcttcccttgctgaccgggggaatcctttgtttctctttaatctggcagcaatactacggattaacctcttccataatgctcattttctacgggttatctctcgtgaattgttccaaatacacctattcggacatacgctacttaggctacgcagagatactgttaggcctcgttgacagtttcgtgatcacccatgcccttctattctgggttataggtttcggattacttcatatagcggcaggaatatacttttattataaagttgaacacaaacagcatccggcaaggccgtaaccaaatgtaaattgcgatccatgaaagaataccttgaaaatataaacaaggcttttgaaagcaaggcacgcctaggaatcatgtccatcttggttgtcaacgaatcggtagatttcgtaacactcaagaatttactcgatctcacggacgggaatctagccagccacacaaggagtcttgaggaattgggatatatccaatgccagaaacaattcatcggacgacgccccaacacgacgttctccgtcacgcagaaaggccgggaagcttttgcgaaacatttaaacgccttggaagagtttttaaagaatcagaa

SEQ ID NO: 61 - DNA, 13587 bp, Butyricimonas faecihominis
aggttttttttagagataattttacccaaaaaataaaagttcatagttcatgccgatatagatattaattcacgtcctattgcacgtattgtttctacaatttcttccaaacgctttttagagggtttcttcgtgccacttacatattgtgcaaataaactttgagacatacccaaacgacgtgctatagctgcagcattcaactccgggtgagctataaacaaatcatataaaggattagattttttctcaaggaaaaatccctcaaaacttaaatcctcatctagttcttcccagcgaataccaaaatcacccacttgaaaattttcacgttgttttggagttgcaaacttcaatctttgatagtcggcaaacctttcacatgcttccctaccgtcagtgatacgtatccatacctctgtatcggtcaaccagactttttctacgatgatattttccatgaccctagcttcattttcacaaatatagctatcatgcacaattttaccgcataccattcaataaacttttcacccccatctctagatctagcaaaccctttttagcctccaagcctcccccgtaaccgaccaatttatggttacccccaatcacccgatgacaaggaacaaaaatcgaaataggattcgcaccattagctgcagccacggcacgaacagctttcgggtttcccaactttttagccaactcaccataagacaccgtttttccgtatggtatatccagcaactcctgccacaccgaattctggaactccgttcccgtaaagacgagcggaatatcaaacgttttcctctggcgagcaaaatattcgtcaagctggatgattgtttcccggatcacgtcagaaacaccctcttcgtaatcggcccctagcgctttctgaatccgtttatcaatagatgccctgcgtttttcaaacatccagtcacacaaacaaagtttaccctcgaaagagccaagaatcagctctccacagggagattcataatgttgaatttgtatcatttcttctactttttattttcgtactttccttcaaccacgaccttttctatacaatcaagccaaatgacaagttataaaagtagaacattattccgatattcccaaactctttcccattaatgtaaaatccggtacccactaaacaactctgttacaatccataatacatattattagaaaaacggcaaaaatataccacaaaactattggaaaaacggcaaataaaaaccatatttgtattagaaaagtggaaatattgacatcattttctatcataaaaaaggaaacgccatgctcaaaaggaagattgacaattatatacagaactattacaaaactacccgtaatgccctccttatcaccggagctagacagattggcaaaacttactccatccgcaaattcggtaagtcgttcaaaagcttcgtagaaataaattttattgataatcctgaggctattgatgttttcaaaggtgcaaaaaatagtaccgatatattatttcgcttgtccgcaatgacaaccgttcccctgatcaaaggcgaaactctcattttttttgacgaagtacagaaatatccggaaattgtaacggctattaaattcttagtcgatgaaggctcgtaccgctatatattaagcggttcattgctaggagtagaattaaaggatttacgctcggaacctgttggctacatgggtatcaaagatatgtacccgctcgatttcgaagagttcatttcatgcataggcatcaacgacaacgtgatcacggctttacgcgatgcatggaaagaccgtactcctgttgatgaatttatccattccaaaataatggaattattccgcctatacctcattgtaggcgggatgccagctgccgtgagcaaatacatcgagagtaataatttacaagaagttatggcgattcagcaggatataattcgtttatacagacgcgatatcacccagtatgatcccgatgacaaactctacatagaagagatttttaatcttattccacccgagctcaacgcaaaaaacaagcggtttattctaaaaaaactaaatgaaaatgcgaagttcgaacgttatcaaaacagtttcctgtggttaaagaatgcaggagttgcattacccgtttacaatgtagaagaacctaaaatgccattattactcgctcgttcacgaaatctgttcaaacttttccaaaacgacgtgggactactcgccgcacaatatgccgaaggtattcaactacgcataataaagggcgataaagacatcaatttcggttctatatacgaaaacgcggtagcacaagaattggtagcacacgccctagagccatactattataataacaagaaacgcggcgagctggactttatcattgaacttgatggcaaagttctacctatagaggtaaaatccggaaaagactacgacacgcatcgcgccttatccaatataatggattgcgatgaatatgaacttcctgaagctgtggttttcaataacgacaatctcaggatcaatggtaagatcatttatgccccgatttatatggtcatgttcctagaaaaaaacaacgttgcccccacacattacaaagtagatttaacaatgctacaataattacaataacacggcaaacattcccccaaacgacaccccaaattttactgattcgtttccagcatccggatcagacaatcccgttgtattgaaaagtttgtatcttcctgctgaacatatttaagcaaacgaatcccatcctgacgcaatttcgacttcaacaaaatatcatcctccacttcctccgaaaatctcaacaggtacacggacgcaagttcaatcttaccaatcctgtcttcctcgttggcataccggtcaatcagttcctgcacatccatcgtcgccagctccttcacgggaaatcccaacatttgctgcgtcaacaagtcatactcgtcccgatcctgctgacgaatcttcttcttgttcaatatagccctagcaattgcagaaataatttcttgaatcatgcgcacgagataatcctgttttaccataataccgtcctccaatatatttacaagcaaaaataaaaaataatatccaggcgaaggaataaaattcactaaatcatttggtttacaaaacgaaccatttcccaagaactactctccccacctcacgacctcgccaatgacaggaatcaacacgtgtaacgagtcgttctttgccatgttcatctcgttccgtaacggctcatcccaatgatgatgggccagcgcatacttggaatgatgcacggtcatcaccttcttcgctttcaggtccaaggctgcccgggtcaagtaatcaggcatcaagtggatatacttccatccctcgttatactgtccgttttcaagaatggccaaatctatacccggaaaacaatccccgatccgggcaaaatgtgtgtcgtaaccaccatctcctgccaaatatatcttccgggaaggagtttcaagcaagaacgaggcccacagcgttttattggcggaaagtccccgccccgaaaaatgccgggccggcaaacaatgcatgacaaaaccggaatccaaacgaacctcttcctcccaatccaactcgataatacgctccttgtcgaacccccagtactcgaaatgctcgccgacacccaaaccgcaaatcaccttcccgatccggtctttcaacgcccgcacggtatgataatccaggtgatcccaatgatcatgggaaataacaaggtaatcaatatccggcatatcctccggatgataaacgtccgttcccttgaacggcttgttaataaaagaaaccggggaagccatgcagaacaccgggtccacgagtacccgttttccatccacttgaaccagataagatgaatgtccgaaccacaccagcacgtcctcttccgggttgatctgccgtaaatccgttttcaccacggtcaacgccgtgtccggttgcagtccggtcttatccttaaaaacgaaatccagtaatccctgtaaacgccccttgtccgaggtcattaaaggagtttcatgtatattgcggaaagccccgtcccggtaattcggcgaacgttcaatccttgccagccgttctccccggggaattctcccgaaacttggctgattcacgaaaacaatcccgacaatggccataaccaccacgatcgacagaataatccatagtaccatacgctttcttgaactttttattaatctcataaatacaactcaaaattaaatttatcgcaaaaataagcaaatactcccaacccgcgtgtacacgaattactggtattcatacctaaattacggtttacgcttccccgtgattcccgaactttccctaaacatcctccctaatccccgcaatcacgaaataacattccggaagtaaacagagaacacccaacacccattgttatcgaagataaatgcaagaagaatgctcgatgaatgcacgatggtctaaatgaactatctaagaactatctcgaaaaaatcaaccattatcagaccaaagccaaggtaatcataaggttatactatctcttgggtattgcatctccctttcactcccgccattcccccactgcggaatgacggggtaacgctattagttgagagtagaaacgagcttgtgatagtaacaccccgaaaaaagggtagcacaacccattcattaccatctgtaaaccaaacgaatcaaggcttgtatatcttgggtctcgtccgtccctccccttccaagtattccactttaaaaatgttcacgcaaaagacaaagattgacaggagcaaaggtccgaagatcacccccatgaagccaaacaaggaaagcccgatgaccaccccgaaaatcgtaatcaacgggtgagtgtccgccatcttcttctgcaacatgaaccgaaccaggttatcgacattcgagatcacgaccagagcgtagaccgccaacccgatcgccatcccccaatgccccgtcattcccatgtacagcgccagcggggcccagatcaacgccgccccgacaatcgggataatcgtggcaaaacaggacaagaatccccacaacacgggactcggagccccgaatacaaaatatcccagcatggcaatggccccttgaatcacggcaagcaaaggaatcccgatcgcattcgacttcacgatcatgttgaactcgtgtaatatattctttttattccgttgattaaacggcaggatctcgctcacgtactcctccatatcccgccccccaatcaacatgaaataaagtacgaaaagcaacaccaccacgttaatggcaaaactactgatactccccatcagcaactgaccgactttcggcaaggcagccaatatcgtatctatattccctttgctcaaaagatcataccctactttttcccggatcagctcagccacatgttccaccggggcaatcaagctgtgcggatccaggtttatggcctgtaacttgttcacgaatacccacacgacaatcgatagggggataagaaaacaaagaatcgtctcgcataacagaagaatagccatgatactacgtttcatccgtttcctttccgtcaaatacaacatctggttacgcagaaggatataaatcgtcatggcacccagaatcccgctgaaaaacggcaaaatttgaaaaaatataagaatccccagcaacagaataattgccacgagggaatatctccagtattgttctttaagactcattttatcacaatttaagttcacgatatgcccccaaacagatgtccgaatgatcatccgcccggttatcgtgttaacgaaaacgacgaaaaaatgtttaattttatatcccccttttacaataactgacaaactctttccctctcatacccgacaagacagcacgacaggctaactcaaggccctccgcatcttctcccgatccagaatgataatttcccggcgattcacggaaatcatcccctcgtcagccagctcgtacaacaccttggccaatgccggacgggtcaccccgaaatattcggccaattcctgctgtgactttcccaacaacacctttttcttatcggggaaggccagttccagaatataatgaatcaattttccccggatcgtcttgaatgacaggaactgcaaacgcccggtaaggaaagttgtccggttcgcgttcacggacagaaaattacgcaggaaactttcataacatcccatctgacggaacacggattctttcgtggcgataaacacgttggccttctccgaaacggtggccgtcaccggaaaatgattatcctcggcaaaaaggaacgccggggcaagcgctctcggcgcccggatcgtctcgattcgtaacatggctcccgaatcatccgtcatttccgcctcgacttccccttccagcaagatataaaggaacctgcacacgtctccctgccggaaaaccacttcccctttcatatagctcttcacgctataatcaaatccttctataaactgctccctctcccgttcgggaattcccgtgcataaagggcaaccgaaaagtcgtgctatatccatgctctgttatcttttaaatgatacacaaatgtatcactttcttctttaacaccttatcttacttttaacctttttcattcactctcgtataaattattgaaaattaaattcacgtttgtaatttatattacaactattgttttatcgcacccgtacattcgcgacaaacaattaaagaaattatttatcaaacacactagaccatggaaaaaatgttttgttatcaatgccaagaaacagcaaaaggaaccggatgcacggtccgcggcgtatgcggaaagacatcggatgtagccaatttacaggacttactactatttatcctaaagggaatcgcccactaccgggtacaactccgagccctcgatgccgttgaccactcggcagatcgctttattctcgatggcttgttcatgaccatcacgaacgcgaacttcgacaagcaacgtttcgtggaaaaaatcaaagaggctatcaaattacgagaacaactgaaacagaccttcctcgacaaaggcgggaaaaccgaaaagatcacgttcgagggagccttctggacagccaacacgttggaagaaatggaatcgaaagccggatttgtgggagttctctccaccgaaaacgaggacatccgttctttgagagagatgctcacctacgggatgaagggaatggctgcttacacggaacacgcctataatctcggacacgagaacccgtccatctacgaattcattgaccggggactagtagccaccacgctccctctgtctgccgaccaactcgtgcagatggttcttgaatgtggtaaaaatggcgttgatgccatggccttgcttgataaagccaacacggacacttacggtaacccggaaatcacgaaagtggacatcggcgtgcggaaaaatcccggtatcctaatcagcggtcacgacctgcgagacctgtacgaacttttggaacagacggaaggtacgggggtggacgtctacacccatagcgagatgctacccgcacactactacccggcattcaagaaatacaaacacttcgccggaaactacggtaactcgtggtggagacaagtgtatgaattccaacatttcaacggcccgatgctattcaccacgaactgcatcgttcccccgcatccggacgcaaattacaaggaccgggtgtacacgaccggatcggcaggtttccccggattcaagcatatcgagcgcaagcccggacaaccgaaagatttcagtgaaatcatcgaacacgctaaaagatgcccggcaccggaggccatcgaaaccggaagtatcattggaggattcgcccacaaccaagtgttcgcactggcagacaaagtcgtggaagccgtgaagtccggggctatccgtaaattcttcgttatggcaggatgcgacggccgaatgaaaggccgggaatattacaccgaattcgcccagaaactcccgaaagacacggtgatccttaccgcgggatgtgccaagtaccgttacaacaaactaccccttggggatattaacggtattccaagagtactggatgccggacaatgtaacgatagctactcgctggcggttattgccttgaaactgaaggaaattttcagggtaaaagacattaatgaattacctatcgtttacaacatcgcttggtacgaacagaaagctgtcatcgtgttgttagccctgctctatcttggagtgaagaacatccacctcggaccgaccttacccggatttctttctccgaacgtggcgaaagtactcgtggaaaaattcggtatcgccgggatcacgactgcggatgatgatttgaaattctttttggaaaattaatccacacgacctgatttaaagaagtatcaaaagtttataaggtttataaagttcataaggtaacggaagtctttcggaccgggttcatcggtagcaaagctaccgtagagaaaatgcccgctaggctcaacggactttatgaactttcagaaccaaaggttcaactttacaaactttataaactagagggtgtgccaaaaggcttttgacacgccctcaaaattatctgcataaaaatcaaccagactgaccattgtcgaacaatcttttcgctgatgagccgataactcatccacacgggacgcacaataacaagccacctcccagaaacggggggatcgcttattctcgttctcccgacaacacgagagggctcgctcgtaagcatcaagagcctcctcatcccggcaaacctcccggcaaaaatcccccatacggatcaattcccggatcttttcctgcatccgttcgctatcaagaactgccgtcctgtaagccttgattgccgcatcaatacctaaagtattcaaatgaacctgtcccctactcgctgccgccactcgctttttttcttttattcttcccatgcaccaattactttgattagacactctcacacccataaaaaaagagacacaaaccaacatccctcacggatgtatatggattcatgtctcattttctagaaacaaagataaagagaatttttgaaatatcctatattcattttgttaaaaccaatatctttgcatacctaaaaataaccaagtatgattcaggtaaaagcggattacatacacgctcgaattgcagagggagaacaccagcaacaggatttcaaattcgagatttccgatgctcgcaagatcgctaaatccctttccgcattctccaacacggacgggggacgattgctcgtaggagtaaaggataacggcaagattgccggagttcgctcggaagaggagatttacatgatcgaggctgccgcaaaactttactgcaaaccgcaaatagattgtgaaatgcacgtccacaccgtggaagggcgtactgttctcgaagtcattgttccaccgggagaacagaaaccctattgtgccaaggatcacgataaccgctggtgggcctacatccgggttcgggatgaaaacatacttgccacccccgtacatatcaaagtatggcaacaagtcggaaccccgaaaggagtattcgtacattacacggaaacagaacaaatgttactggattacctttcttcacacgactcaatcaccctgaaccagtactgccacatggcaaaaatatctcgtcccaaggcagaaaacacgctagccaaattcatccggtttgaactcatcgaaccgtattttgacgggcagcgtttccttttcagacaaaacgaaaagagttcatgatttcaactcacccacggaaccgggataactcgtcaatcatcattcgggcaaatcgttcggatgctccggcatcacccaatttctcgttcacctcatcatatccgtccaacatctgatgtcgtttccctccttccggaaggattgccgagagttcccgcaacaggttcttctcgttcaatttctgcatcaataattcggttaccacttctcgaccggcaatcaagttgaccaacgaaatatatttcactttaacaaaggtcttaaacaggaaataactcaacgcccccccttccccactgtaacaaaccacttggggtgtccgcaaaatcgcagtttccagcgtggccgttcctgacgtgaccaaagctgcacgagcctgtcgtaccaaccggtaggtctgcccgtaaattatccgaaccttcacgtcctgcaaataaggtgcataatcctcgtcactcattgacggggctcccgctatcacaaactcatgatcgggaaaatgttttaccatagttagcatcttcggcaacacgtgtttcaattcctgcgaacgactgcccgccaccaaagcgatgatcggtttaccggacaagccatttacctgcacgaactcattgaatgtttcgttcttgaaaggacggtcgtgaatagcatccaccaacggatttccggcatactgcacggaataatcataccgggcataaaagtctacttcaaacgggaaaatcacgaacatacgatccaccaaccgcttgatcttcttcacccgtcccgtgttccaagcccagattttcggggaaatataatagaacacgggaatattcgcatccttgataaatttagccacccggagattaaaaccaccgtaatccacgagaatcacaacatccggctgccataccagaatatcctggtgacaagcgtcgatatttgccttaatcttgtccagatttttcaagactgtcaggaaacccatgatggccgtgtccttataatgacgaacaatctcacatccggcctcccgcatcaaatcacctccccacccgcggacctttgcatccgggtcaaactttctcaatcccttaatcagattagaggcgtgcaaatcgcccgatgcctctcccgcaataacgtagtatttcattggcttttttctattctttgggcaaacttacaaaaaaattatcatttataaatataccggataaaaacaacatactcgagtaacattgtagtacataaaacttgacaaccatgctcccattcattataaatttcttatttttgcaaatagatgaacatatgataagaactgatttttggagaacgacattattatgaataaaaaagaattagatattgcctatttcctttcattttgtattgaacaatacaaaatgaaacaaggattatctggtgaagagacgattagcctgttcgagaaatataacgtcttatcatacttatcggataactttgaagtattacatacacaaagccaacaatggctgatggaagaaatcaaagaatacattaccaaacaaaagaaggcaaactaatgaaactataccatggtagtttagaaatagtaaaagaaccacaaatccgactagccaatcgtacattagattacggaatgggattctatacaacaacttcccaagaacaagcagaattatgggtaaaacgaaaaattggagaaaggaatgaaaaggggattgttaatatatacgagtttgatttatcttctgcagaaaaattaaacgtattacgttttacagaaccgacggaagaatggctggattttgtaatggaaaatcgaacaaacaaagattatcgtcataattacgatattgtttacggtccggtagcaaacgatcgtgtttacgcagccttcgccttatatgaaggaggtctgcttaataaacaggaattaattcaagaactaaaaacgtatcttttagtagatcaactcctgtttcacacggaacgatcactatcctatttaacctttttaaaagtaaaggaggtattcaaatgaaccgggaaattacagacaaaaatctttacttgttactgccttccaaagtcagcctttttgtacaactgtatataaaagaacatggcggttctatcatagatgccattcgacaattttatcactccaatacttacaaggcgctagaaaaagagaacaccaaattatggcattatggttccgtagctttatacgaggaattcatggataagaaatgaaaaaactctatctttgcccctcgctagcaaatttaaagtagatcgcatatgaacattgttgggaagagagtggcatatatcacgttaggatgcaagttgaatttctccgaaacctccacgatcaagcacagccttgaacaagaaggagccgtgactgtgggagaaaaagatggagcggatatattcgtgattaacacgtgtagcgtcacggatattgcagagaaaaaaggacggcagatgatccggaaaatcatccaccgaaaccccggagcctacattgttgtggttggttgttatgcccaactcaaagcgcaagagatcatggacattgaaggtgtccacctcgtactcaacgcgcaagacaagttcaacgtggcccactatttgaaccacctcgaagaacaggaacggcacgaaccacattcctgcgatattttcggggttaaaaccttcgatcttgcttactcgtacggggacagaacccggtgtttcctaaaaattcaagacggatgcgactatttctgctcttactgcacgattccctttgcccgcggacgtagtcgtagcgctgccatccaagacgtgatcaaggcagcccgtgacgtggcatccaagggtatcaaggaaatcattcttacgggagtaaacacgggagatttcgggagagagacaggggaaacattcctcgacttgatacggactctggatgagctggaagaaatccagcgtttccggatctcctccatcgaacccaacctactgacagatgacattattcgtttcgtggcctcctcccggcgtttcatgccacacttccacgtacctcttcaatccgggagtaacgaagtgttacacttgatgagacgacgctacgaacgagaacttttcgcagagaaagtacaggaaatcaagacacttattcccgatgcctttatcggggtggacgtgattgccggaatgcggggagaaacaccggaggccttcgaagatgcccgccaattcattgccggactggatgtttcccagttacacgtgttcccttattcggaacgttccggaacaaaagcactggacatcccgtatatagtcccgcaagcggaaaagcatcgtcgggtgaacgtactcctagacatttccgaacagaagttgcacaatttctacacggcacacgtgggacaaacccgtccggtgctgtttgaagaaagcgacattgccggatcaatcggcggattcacggacaactacatccgggtggaagtcccctatgactcttccctcgcaaaccggatcgtacccgtagaactaaaaaccgacattttcggctcgtaaatgccggacttcacgcggcataaacctccggaagaatacaaactttacggagtaattttatat

SEQ ID NO: 62 - DNA, 13575 bp, Butyricimonas faecihominis
ttttcatactcaatttcttataagttctctattcggacgaatctcattttgaagttctcccctgttaaattcaattgcataatttggaattggcactatccaagcggcatgatcctgagtgtaagcatttaattcatagtaaccgttttcataccaagtcattgaattcgcctcgtaatcattattctgatgacgaatacggaaattctccggaagaggacgaatgctatttacagcataacggcgcaggtcaaaccaacgatgtccctcgaaacaaagttcacgacggcgttcatcacgaataaaatcaatcaatgcctcccccgtttctgtcaccgacggtgcaacagcaaatcgtttagaaagaagtttttccaactcggttttcgcttccccttcccgatttaacatcgccaacgcctccgccttatttaaaatcacctcaggcaaacgaatcagaaaatccataccgacctcatccgtatcactgtagtctacccaagtcttatatttatcgggtatcgctgcatgtaaagaactcttaaagaatgctgttctacgcaaatcccctgcagcataacattccaacaaatcttctgacgcttgaaatgaaaatgcttgattaaccggggtagaaccactccaacctgatgtataactcaagaaagtcaggatcattgaatttcctccttgagtgaaaattgtttcgggtgatgtccaagagaccacattttgcccgcttgtccaattattcaaatccatcaccgaataagctccgcccatagcctcattggctgccgcaatacaagcctcgtagttttccatgtacaagtaaactctagacagtaatgcattagcggcagtttctcctactcgcaatgttgaagaaggagtgatccctttcaaacaaacggcagcccgttgaagatcctcgataatcagcgaatataccgcctctaccgagctacggctaaaatatttatcttccacatgctcggaagttttcaaagggactccggcatcttttgatgccgtggccttgcaataaggcatgccataaatattcaccaacaaaaagtagtaaccggcccggagaaaacgcgcttccccttccaccctgttcaatagctcaatatcctcctctttcgaacggaagtcatttgccatataaatgattgagttcaacacacctatatttttgtaaaatttttcccaatcattatccttgtactgagtgttctctaatgtcagaaacgggtcggctccccaatgataaaaagaacccaacacgttacgcggataactatccgtgtaaggtaatcccccggatacaaattcttccgcatcatcatccatgacatgtagccaaggataattcatcgtaagcccgctactgtaactcatcgtctcctggctacttacataataactactctgaaatgccataaaacactcccctctaagtaactcgtccaaatcctgtgcagtctcggcgtaacgttgattctgcgaatactcatccaaaaaatcaccgcaagaaacacaaccaagggtgaatacacttaaaatatagattaaaactctttttttcatcgctcaaattttagaaagtgatactaagattacatgagtaagtaggacgcaccgaaagattgacattcggtgacgatcctgactgagtaggatcttgtccccgtaactttttatgggcaatggtaaacaggttcgttccggtcaggttgatataagccgacttgagacctaacttcttacagaatcgctcatcaacattgtagcggaaagagagggaagacaaccgcagataatttccactcaccacccgaatatccgaattgtcatacatctcgtaaatattattcgcgattcgatgtgtcatattcgttccactagtccaccacgggttggagtgagttcctgcaacggtattcaacccgggaatattggtatgttcctcatcacccggctttctccaacgattcacaaattcccgtcgcaagttactatgcgggttaggattggttgttccgtattcagtacacaatttcagtaaccggattttattccccaaactataagtcaaattaaacgataaactaaaattacgataccctaaatagttcgaaattcctccttgaagataaggttcacgccgtcccgatctttccatcacttctagaaagacatcttctcgttccattccgttgtattttttagacaactcctcttgcaattcatcctctgctccgtaaaaaatgggggaaccgtccacagagcttaatcctttaaaacggtatgaatagaacgtattcaaaggttccccagcaatctccacgtccccagtcaacatatcgtcatactcaatctcatcccgcaagacattattccggttatttatcgcactgttcaccaattcgttcaacacttgtcccaactggggatcaattcgccaaacaaatcctctctttcctccatcaagaccgacacggttgatcggggtgaaatttaaactcacctcaatacctttgtttacaagcgttccgctattcaccacatattgtttgataccgttaatttcagaaatagtctttgtcagaaatgcatcccgagtctttttataataccaagaaaacgagccgttaatcttattctttaaaaacgagaaatccaaggtcacattcgtggatgccgtcttttcccaccttaagtccggattcgggtaatgagcaactttcgaattaaattcaccatatttcccagtgtaatcaactccttgcgtgataatcatattaggagtctggttgctcagcatattcccctgataaccaaaagatccccttaatgccaaatcatccacccaatcaacagattccaaaatatcccgttttacattccaacgaccggacaaagcccaaatcggcatcattcgatcattcgcccgtgatccgaataagttggaagcctcccctcgaatatgcagattcaacatataacgattgtcataatcgtacccggccatcgcgtaccatgccaccgaattggttaaattttccgtaataacacctaaagcatttggggaaatcataaattgactatgatatttcgtgtaagtcgtgggaatagaagaaaacaatttaccccgatctcgatgatacccccgtcgtgtaatattaaaaccatcgtatctttgagaattcaattctaacccggcagaaccactcacattatgcttaccttctcttcccacatccttggcgtaattcgcttgcacacgtgccatccaattagtattgcgaacttcactcttccgtaattctccaccaatgggacacatatcattctgcaccgtctgttcggcacgcaactgatgcacgtaataggagtcttccgtaaaataaatctcttgatttgtgttacttaccccgtaagacaaagttccttccaatttcaaatcatctatgacattgtaactaacatgcgcctgcatattaattgcgtttccgttggtttcatccccggaattatccatttcgttcaacacgttgaaagcatacatcggcatcgaaccacttgatgctcgttgatagaggtaacgagatccatcgggattaaaagccggaatggcacggttcatattataggcgtagtccaacacacctaattccgagggattgtaatcacgcttcgatacattcccttgaagctggaaccgtgcggcaaaacgctcgtaattcgctgataaatttaatgttgtcgaatatcgtctattgctctcaccctttatcgcacctttctcatcgctcattccgagagaggcataataacggatattggccgaacctcccgacaagctcaacgtgtggttatgtgaaaacacatcctgacaaacaacatcaaaccagtccgtgttcaatgtttcgtaatatccaaccaaacgattgaactctttataatcgattgccccattgtaataatcctgtatcgcggcctcgtatccggtccaactatcaacattattgtaataaactccccgttctaccaactcccgcgaaacatccacccgctctttcgaattcatcaagtaaatagcccggtcgctgtaacgaggtcttctcgtataggaagctgttccagaataagtaacactaggcggaccggctttcccttttttcgtcgtgatcacgataacgccattacccgcttttgccccgtaaagagctgttgcagaagcatctttcaacacgtcaatctgttcgatgtcatccgggttcaaacccgaaatcgcattacccagcaagttcacgaagtccaaatcgttaatctgagcaggatcaacattcaccggatcggtcaaaaccaccccatctaacacccatagcggttctcgactacccaaaacggtcgaagttcctcgtattcttaatttcggagcggcaccaacctgtccggaattctgcataaaaatcataccgggtatacgtccttccaacatttggtcaatcgtgtttactcccgacacttttatatcgtccattctaatcgtttgcacggcacttgtcaatttccgtttatcaatattctgatacccggttctcacaaccacttcttccagttgttctgcagactctttcagaaccacgtgaagcgaatcctgtcccgtatattgcacctcttgcgtttccattcctataaatgagaaaagtaacgacacattctgcatcttaggcagtgtcaacgaaaaccttccctttacatctgttgacgtacccaaggttaagcctttcacgataaccgttaccccgggcagaggatgtttcttctcatccgtcacgctcccaacaatgcgaacctctttttccccctctttcacctctcccggaacaataataataactccttgttctatccgataagataaattcaccttgcccaaaaccgcatccaacacccgttccaaatcttcatcaacaaatttcgcggacacgtctttcacttttttcaattcattgtgattgaaaaaaaacttgtaacccgtttgttgtctcaattcctgaataatctccaacatactcactcgctccagatctaaatttatcttcttttgggagaatccattcccggaaaccttcaacaatagaaacagcgtaaaaacacatattaatctcataaccagaaaccatttttttacacacgcctccctaacagggatgccatcatctcgtttttttttcatacatttgtcttgttaatgtaaagattactaaatttaattgacacagcaaccggctaggtggtaccaacacctaccggtttttcttatttcattttcacaataatcactctatctttcagttcaaattcaacattcgtagtcatggatataatatccaagattacattacaattactatacttctccaaatccccggtgaacacaaggtctttagcctccgcattttgataaaatacagtaacatcataccatcgagccaattgtttcatgatctcatccaaacgctccccctctattatccactttccttcggtccatgccgtgtatatcctcgtatccactttttccacgttcacgctatttgtctggacatcataggtaatctgttctccgggagctattgtccttgcctccgtcatcccttttccttgaaaagcgacacgcccttctaccaaggtggtttgtacataatcttcacccgaataagcatttacattaaatacggttcccaaaaccgtgacatcaccgccatccgtttcaacaataaaaggatgttccacatcttgagccacgtggaataatgcctctccctccaaacgaacacgtcgttctttcccctcgaaacgatccggaacacttaattttgaatcggagtttatcatcacgctcgtgccatccgccaacaccaaattatactcaccgcctctaggtacgataattttattatattctatcgctttgtcaacctgaccattaggtttgaatttttctatcgcttgttcaaaggcaatagaatccgttaattttacccgttgaccggaattaaagaccaacacggcctttgtcgttcccggctcaatggatatgccccccgagacgaaggtcgtttggggggtatcatttcccagaaaccagtaaccaagtcccacacatagagggaacaacagaattgccgcatatttaacaatcattctccagatatgtgttttccgggatttatccgcataaacgacaaattcatcccacgctcccttggaatccaccacgcgagtttcttcccccgtgtaataggtttcaaaatatcgttttgccttacggtaatattcccggttaccctcatcttctgccagccatctctcgacctcttccctctcttcgtctgtagcaacatccatgagatgtctcacgatcatatcccaatttatgtgccttctatcatctgtcatgatactttcaattaattattcacgtacaagacacatccatttgaaaaacggagtacaagaaatatgattttcttcaaaaatctttagaaaccttgttgtaagtattcaacgagtaggaaaatgggaaccaacctctcacgcaacatacgatacgctcgctgtacctgagttttcactgttgtctcggcaatatttaattgttcggcaatctctttgttcttctttccttccaccacttttaataaaataatctcccgacacttatcgggtaacgcatccaaagcttcttgaaggcgtcgatgcacatcctcgtctataaccatatcctcggttccggagaaaagctgtgcctcaaacaatttattgttatgctcatccctgatcttccgatcccgtatcgcatttaaacaacgattccgcaccgaggtgaacaagtaagctttcacggaagtagccacttgtaatgtcccggcatgattccataaatggaagaataggtcctgcactaaatcccttgcctcttcttcatcatataaataactctctgcaaacaggaccattttggcaaaataatactcatagaggtatcgaaacgcctctttatcgcgcttttttatacgagctaaaatcaaatcctcttctgcatccatgagtacatctaaattgtatggacaaatttatgtaagaaaatcgaataatcacgttcactcacgagaataaaatgaaaatcaacatcgccaaactctctcctaattcattgcgaacaaacgcataggcccgtttcttctgggttttcacggaattctcgctaatcccaagttgctccgcaatatccttcactttcgccccctccatactcataaacaatacttgccgttgctgttccgacaatttatctatcgcctcgtagaatttattcacaacatcctcttcaacggcaagttccagaatcacttcgtcatcttgcccatctaaaacggcatctccccatttttcatataaagcttgtgcaattcccttatcccgaatggaattcaatgctcgtgtgtaaattgtccggtacagataaccgaccagcgaaggcacatcaggaaattgcgttccggaatcccatatcttaataaagcaatcttgaacaatatcttcggcggaaatatcgtctttcacaattttcgatgcatagttacacatcgcaggataatactttcggtacatttcctgccatgcactctcccgctttttgttaatactttcgatgaatcgacctgtatccataaagttatgcatctcccgttttgaacatcacttaatacaaagatgcaaataaaactttataactacaaattcatcgacctttctctaaagatgttcccataaatcttccacatctttccgggaaagtaccgtgtaatccatccggctctgaacgataacccgacaagccatctcgaaaaaaagagcccgttcaagcacttcatcaaaatcacgaccacacaccacctgtccgtgattacttaacaaaacggcatcatgatccttcatcgcctcgatcacggcattcgccaattcaagggagccgggacgataatagggaacaactgccacttcgcccacatgataaggaacttccaacgtcacgttaaaatttgacggcttatttttcatacaagccaccaccgtagcatattccgactggaagtgtaacaccacgtttacttccgggcgctcccgcaatatccctaaatgaaaaacactttccatagaaggacgtaccccgttttccacttgcccggacataatatcacacacggcgactttctccggggtcaaaaccggtaaccacgaacccgtgccggaaacgagcatcttgtctcccactcgccaagataaattaccactactgcaaagcatcagccgagcctccccgtaccgatgggcttgagccacaaaaatttcaatctgttcttttgtgatcataaacgtgttataagactttatccaaaagtataagaaaaagtattcccgcgcaaacaaaacccagaattcctacacgcaaagaattccaggttcataaagcacacgcatttaatctataatccgggcaaagtattcaatatttccaatgttttcccatcagaaggtcgtggcatattcgcatttaaaaatttaccatcttgatctatcagtaggaaccggggaatccccttgcaacgaatagcctccatgaaactcttgtcgcctcccatgtgtaactggattcctcccaattgtttcgcttgaacaaatctttcccacgctttctgactatcatcacaagaaatactgacaaaacagatgttgcgcccctcaaattcctcttccaactttttcagatgagggatctcggcattacacggcccgcaccacgtggcccatacatcaatatacacgtattttcctttcaaatccgacaaactcacttcttttcctgttatatccttaaaagtaaacggtacggcaggttgtcccttgaacaaaaccttatttgcatcatacacacgctgatattccgcaacataatccggtctatgaaccctctttcgaaaaattcgatccattccttccgcattttccataccatgtattctcacgtattccatgacactcttcaccactaaattttccaccaaccgcttatccctgtacttttccgcctctttcaacacatccattagcaagatataagcatcccccgtttgtccatccagattgtggaaagcaaataaagctcttctaatggattccggatactcgaagattccccaagcttcttttttctcaacgaccacacgccttaattctgagcgggatttttccgacacctgtttcccaccatgccccataattacccaaaaagccaactggtaattgcgctcatggagaatacgttccctctctcgttttgtgaaattcacatctaacccggctgttaataacgcttcctcccgctcttccaccatctcttgcaatctaacccggaagggttcttcctctagttcgtattcccgccattgaatatcccggtaaagcctcttgttcagataattattaatacctgcaccttccccttcgaaatgtaattcattcaactcggatttagcctgccaaggcttaccgggttccacccataccgtgtactttttatcccccacccaaaggcgtccgtactcacctcccgacagggccattttccaaacggccttgtttgaaccatcaagttccaacttcattctccccccatcgcaagtttccaacgcgacttcccgggtgtcatcctccggcatttgaaattcgaaggcggtctcccgcaaggcgacaatcttctttgcttttcgtggggcagacggaccattttctattcctttcaattgtcgtaacattgtttccgttcggggatcagaaggacgtgtcatctccaaacgcgacacccaccctttccggtccaacaggataaaacgaggaatccgatctactcgaaaagccgttatgaaagaagtatcattaccaacccaccattgctctcccgacatctttccattttccacagctcccttccaccgccacacgacatgatcactggaaatacccacgaacacgatattttgtccttcaaatttcttttccaattcttgcaaatgagggaattcctttcgacaaggatagcaccatgacgcccacacgtcaataaaaacatattttcctttaaactcttctaacgacctagattgtcctttcatatcttcaaacgtgaaagcgggacatttgtctccaactctcacccccgtcgtatctacaggacttccgtacaccaacgaagacaccgacaggaaacataaacaccaaataaataattctttcctaacgctcataataattcatatttaaagctttaccttgatactacattcaatcttttcttttgcctacatacaaccacatcccgaattatactttctaaaaccaccatacctcagccgtgcaactgaatcccgacaaaactcatccttcactcacagtatcaagtatctcggttacccactaacttcacgtacacaatacgctcgtattcttaaaaattcaatgattcaagatcttccataaaagttttatccaaatttgactttttcatcataacaaaaataccatgattaaaaaatacactcaccgatggatacaatacttcattcgcaactattccaattcttttttcttcaccgatcagattattcacttgttttactttgtccgccacttgatcatatttttctcctgtaattcctattttcaaagcattttcccgattcattttcaacacataacgaccattttttttatcaatccaagaacccagcacggcattatcaacagtcctcgctcgtaattcattcaacacaatcattttttcattttcttccagtttttgaagatatctatttaccaatcgaacaaatccagtaacataatccatgtattctttagggacgtccagtacaattgggacctgcaaagaatccccctttacctccggttttaacaatcgcccatatcttaatcgctctccctgttgttctattgttaattgttctccaatatgcactacaaaaagttttttaggagacaattgttgtctatttacggtagaacatccacccaatattccacctatcaacaagcacacagcaataatcttactcataataatttcattaaacgttaagactaaaatccgtatatatacatataaaaaatgacacttgcaatctccaacccattgtaattcaaaattcttaatgtatatctttgtttatacgaacaattcgacataagaagttcctgcccaatggttaactctcctggaccactaaccttcgctcccccacgataaatctcccaacgaaaagtactataataagaatcattttttagtcgaatagaataacctgtcggatcaaacttatatgcttccaatataatcccggctggtaagacaccttctataccaaggcaatttattccccaaaaagaagcgaatgcattacaattatctccagctagcttggtaacctcccattcccatttaatattacaatctatagtattatatccgacctctcttgaactgccccgaaataacttccagtaagaataaattgacgattattatttaataaatctttaaaacctatactccacactggagaatctgctcctccaacgacaacaatcgaaccagaacctcgaaaagcacaagttgtactatgtccatcaggaagttgcatctgacataaaggcatctcgtatccagggtattgactcggaactcgagataacacggaatctctagcatccatccgataaattggaactcctcgttttttagcatctgctaatgtaccgttaacatcacatattaatttacaaaatttttcatatgcatcaatagaaattcctaattccaccgcctctgccgttgaaattgacaaattatacaaatcatcctcaacaactaaatatttaaccaaaatactatcacattgttctggagacaaaactatcgacctatcactcaaattactattattcacacaagccgaaaataaacacacatacaatactataaaatacttcttcataattatttttaattaaataattccataataaattacttctctaaagcgtaaggaatgaactgccctaacgagaatttaaacttatcatttgtggtctcagccagaagtttcttagccaatttcaatattctttgttgttggtcttcattcccattacgcttaatcgtcaaagacaacgggaagaacatcgccaataaatgctcgtgttcaatctggggtatattcttctcacaaacctgcaaaagcttttccacgtccccacttttttgggtacgggcaatctcaacaaacaattttaaacgagatttactcggaaactcgtatttctccatctctttctcgaccttatctattgcctccatgccactctggcggtcacgaccggtaatcatgttggtcaattgaagatcaaaagctgtcgcaattttctcgttcactcgctcagccccaatacttttctgaaaacgttccgcattcgccagcaaatactccatattaggagatccgacttgtgtcagaacaggatgttcgtagataaaccagtaggccgaatctacccgttgcgaatcatttaatttagatattaactcgttcgcaacttgtacggttaaaggatcatccacggccaacaaggcacgggcatatttcactaataatttcacgtcccgatcacctttttcatatttcaccgcaagaatcccgatcgccttatcctcatctaatccctcggcaacccgtttgataaaatcctccacagtctcactccctcctacaatcctatgctgtacctccccctttgtattcaaaatcaaaaatgtcggaaaagctgaaatctcataccgtttcataatttcagcaccttccccttcttctgtgttatacttcacgcaaacaaaacggggattcaaatacgctcccatctccggtttcggaaatatcgtattcgccatgtacttgcacggcatacaccacgatgtatacgtgtctacaaacaccaatttattttcagcctttgctttctccaaggccttagccaacgtcaattcctcgaaattcgtttgggcaaaagcccccatttgtagcataaaaaatgctacaaaaacatacaatattttattcatccctgtagaaattttaataaaacggttcccgcacgcaccaaagggaaccgcctccattatgattaactatatctataaatactattaaaaagcctccaactagaggtataccaaaacataaatcgtacttttccttcaccatttatctcctgatctggcaaaagcgtcaatccctcatttattgaccagccaaaagaatgtatcgtgtaacttgttcccgaagttgtagccaccataagtcgttcgaactgattatcatacagtggaggattccaagaagagtcattgtaatcataattattacc

SEQ ID NO: 63 - DNA, 13547 bp, Butyricimonas faecihominis
tctatattatacatccaacggtttgaaaatacttgaactttttgttattcaatgaataacaatcaaatggaacaagtatgttgaaacttaacgacaaaagtaagaaaaaatatcatacaaacataaaaagaggcacttttgaaatgcctctttttatgtttgatggtctcaacttaaatcatgccatcgatgagtctcagcttttcttgcattaatgctagtttgtggcgagcgctctcgatcttgttggagaattctttgaccagactctcggaattgcttgatttggagaagaatccaatattgttttcccaagcgtgaaggtctgtttccagttgcttgatcttgttgactaatttttctctttcttgaatgatcttgctgtccttgtcatcactgttgtcgaacgtgttgattttggacttgaatcgttcgatgtttttctcgaattcgtcgatgtcaagctgatcaaaatgatcgttgattagtttacggaattcgttttgaacggtttctttttctttgatcggaacaaatccgatttctgcccagcgggtttggaaggctttcaatgcctcgatgtcatcatcgttattaccggttaatttgaaattgcgtacttcttcgatcagttctcgtttcagttcaagattcttttcctgatcggaagagacatgtttgaattgagctgattttcgatcgaagaaatgatcacaggcagaccggaaacggttccatatcttgttggatacttttttggatacggggccgattgttttccattctttttggtactcgatgattttcttcgtggtcgtaccccaatccgtgctatcctttaacgcctcgactttctcgcaaagttctattttcttggctaggtttttattctgcaaggtctgtatttcttggaagtattgacgtttcctctcgaagaaagcatcgcaagcagcccggtaacgtttatacaggcgattgcgctccttgatcggaattgtcccggcatgtttccattcggtttgcagggcaagaacggtatccgtggccacgttccattcggagagtttttcgaaggaaacagatgcgtaattttccagtttcacgcaaatctcttctttgattttcaagttgttgtcctgttcttcccggaggttgtcaaagaaacggtggtaagcgctgttgatcttgtccgtcacttctttgaatcggttccaagtttcttcttgaacttctttggcaactggtccgatctctttccattgcgaatggagagattgcagttgtcgaaaggcattcccgatgttattgtcttcgagtaaagcgttggcttgttcaatcaaggcattcttggcatctagattttttttcagatcaagatcccgcaactccttgttaattttaatataattgaagaagttctccacgtgatggtgatacgtttccagcaaatcacttgcttgagcttgcggaaccatacccgtgtttctccatctgtcttgcaaatttctgaaatcttggtatgttttgttcagtgattcctcgtgttgaatcagatcctttaattcctcgataatctggagcttttccttcaagttctgttctttctcgccttccagctttttgtaatattccgattttttctcccggtaggttctgtacacgctataaaagcgttctttggaattgtcctgatagtcgaatgcctcagccggactcccgtctttggtaaaatcggctaatgctttatcgtattctttttgatactgggcctcgaaaacttggggtagggaatccagcaccttcaggcgttgcacggggaaatcgtcgattaaagacttcatgtgagaaataatctcgtccgtgttaaaactggagaaatcccataccggaacttccttttcgggggctttctctatcggtgtaggttgaccctgaactgaaacctcttcttgtgtttcatcatttaaagtatccggagaaattggctcgttgttattcaactcttcggcttgttgtaagttttcttgctccataactgttcgtatttttacgcattcaactcacgaaattaatgattaattctgataatgccaatttataatgagtaaaaaaagcgagagaaagttctttttggatttcaattgcaaagcacgtatctttgacatttataattgatgcttatgttttcgtatattctgtatggttttgtatggttgattagtttccttccgttccgagtcctttatctggtggcggatttgaactatttgttactttactacgtgattcattatcggcgtaaggttgtgaggacgaatttatgtaattctttcccggagaaaagcttgcgggagatcaaggcgatagaacggaaatattacaagcatttggccgatttatctatcgaattatataaactgtggcatatgtccgagggttcgatccggaaacgttgcgtgtttaaaaacacggagttaccccagtcgtattttgacgagggaaagagcgtgatcggggtgttagggcattatggtaactgggagtggatgtcttcatacagtttgtgggaaacgggggcggattttttggccttgtataaaccgattcgtgataaagtgacggatcgcatgatgaaacaaatccgttcaagattcggggcggtactcgtggcaaaggatgacacgttaagggttattgctcgttatcgttcggaaaatcgtttgtttttggctggttttatcggtgaccagactcctaacgggcgtaatttgaatttctggacgcgctttttaaatcaagataccccggttttactcggcacggagcggattgcccggaagtataatattccggtggtttcggtgcatatgcgtaaggtgaaacgtgggtattacgaggtcgagttcgtggatgtgtgtgccaacccgtccgagttaccccaagggaaattgacggaaatgcatactcgattgttggaatcttttatacaagaagagccggagttttggttgtggtcgcataaaagatggaaacataagaagaagttttgaatttaaaatttagaatgaaatcaaaaagcgttgggcttgtgtggctggtatctaaaatcataaatctaaaattagaatggcgaaacgggtagctgttattatattgaattggaacggggagaagttgttacgggagtttttaccttcggtcgtgaagaacacgaatactgatttggggcgtgttgtcgtggtggataaccattcgacggatggttcttggatatgtctggaacaagagtttccggacgtggaacgggtgttgttcgaggataatttcgggttcgccgggggatataatcgggcaatcgagatgatcgaggcggaatacgtggttcttttaaatagtgacgtggaggtcgcccccggttggttggaaccgttggtcgccgtgttggaccgggacgagagggtggcagccgtgcaaccgaagatattagcataccgggataaaaagaagttcgagtacgccggagcagctgggggatacattgattatttaggattcccgttttgccgcgggcgtgtgatggataccacggaacaggatgatgggcagtatgatgatgaggtcgatgttttttgggcaacgggggcctctctatgtattcggcgggacgtgtaccgtgcggcaggagggttggacgaggcttttttcgcgcacatggaagagattgatctttgctggcgattgaaaaatggagggtatactttaaaggtggttccttcttctgtcgtctaccatttggggggaggctcgttgccgatgaatcatccgagaaagttgtttttgaattaccggaataatttattgatgttgcataagaatctgtgtgctaaacagcgtaagaaaatcttttttgcacgagttttgctggacacgatggcgggagggctttttctgttgaaaggtcaatggtccaacacccgttcggtaatccgggcatacaaggctttccgggagatgaggaaagcctatccggttcctgaaagttctataagtctttcgggaatatatccccggagtatcgtgttggaatatttcttgcggggtaaaaagaagttctcggatttaaattttaaatgatggtaaataaacctttgacataaaatgttgtcataggggtgtaggctttaatgatatgattagaaagcatgaacgagataagtgatgaagatattgtaagaatgtttcattccggaaatggagaggaaaaagcttttcggttacttgtaggaaagtatagcgagaggctttactggcatatccgtaaaatcgtgatagggcatgaagatagcgatgatgtgttgcagaatacctttatcaagatttggaaggggttgagggagtttcgttacgaggcgaaattgtttacatggatgtaccgggtggcgacgaatgaggcgattaattttttgagtgaaaagcgtcggaagacttatgggaactcgcaggagattactcccatgctggaaaatcagctggaaagtgatagttttttttgtggggattcgatccagcgggaattgcagaaagccgtgttgaaattgccggagcgtcaacgtctggtatttaatatgaagtattttgatgacatgaaatatgaggatattgccgaggtactggatgtcgccgtgggaacgctgaaggcaacttatcacaatgcggtaaagaaaatagaggaaagtttgaagatttcggatactttaccctcgttcgaatagttattggataatagaaaatggaaggttatggataatttggatgagaaatataaatcaaagaacccgttctcggtgcctgatcgttattttgacacgttgggcgatcgggtgatggaccggataaaggatgaggaagggaagacacgggaaacgagtttgtttcagacgttaaaaccttatctcggtttagcgggattattcgctttcgcaatgatcgtcgtacagttgctggttcctaatctggtggatgaaaatcggatactgttaaagaatggagagcaggcgaacgtgacggcacaagcagaggatgagaatattttcgatgcggattttaatccatctcgtgaagagatcatcgagtatctgtcacaagagactgatccgattgagtttttatacgcggagcgtaggtagaattgaatgtacaagcaaaatatatgaaaaagataagtttgattatattgatggtggggtttggtttttctttatttgcccaaagcgggaaattgagtgaagacaaacggaaagagttcgaggctcaaaaagtagccttttttactcaagagatggatttgaccccggaagaggccactaagttctggcctttatataacgagatgcagcagaaaattcgtgtcgagaatgataaaatacgagatttaacctgccggaaagataaaaaagaggtcccggaagtgacggaacaacaagctttgaagaatttggagatcatgttatctgccgaacaggctgtacgagatattaagaaagaatatatcgagaagttgaccaaggctctgtccgccaagaaagtgtggatgatgattcaggccgagcagaaattccatcatcaattgtggaagaagatggggaaatatcctgcacccgcgcagaaatagttgatcgagtggggaaattcgtggctggacgtgaaaaaaaagaaaaaaatcacgtcaaaagcttgcaagaacaataaaaagcactacttttgtcagcgcaattggagagatgggtgagtggctgaaaccaacagtttgctaaactgtcgtacgggatactgtaccgggggttcgaatccccctctctccgccaccaattttgaagctcattttcggggcgtagcgcagtccggtagcgcatctgctttgggagcagagggtcgcaggttcgaatcctgtcaccccgacagatagacagccacgagagtgactgttttttttatttgaataaatgcgtatctttgtccctataaatttaatacttacacgaatgaagatgtctaaataaacaagtcggttgtaaaaccggtaaagtctccaaagtctacgtgataggagcatcgggttttattaattgttttatgtgcagcatacaattgtcttgaagttgtagtgagccgacttttaatttaggaatcatgtgtaccatccaaagtattcatttgttattccgaacaggttacgtgaaaacaagtttttaaaagaacttgtgagagattcgtgtacatgtttccgcccgaaataagtcaatccggtattcattttttttatttgaagttttatgagtgagattatagtgaaacaggttatgtatagccatgcagataaggaacttttgtttcagaatatcagttttcgggttccggacggaagtaaggttgcattgatcgggaataatggttcggggaagtcaacgctgttgcggatgcttgcgggtgatttgcaacccgtatcgggagagatcattgtctcggagaagccttattatatcccgcagcacatgggacaattcgattcgtggaccgtggctgaggcgttgcaggtggagcggaaaatagaagcattgcacgcgatacttggcgggagtgttgatgtagagtctttcacgattctaggagatgactgggatatagaggagcggagtcgttcggcgttggagtattggggattactgaacgtgaaacttggtcaaaagatgtcttcactgagtgggggagagaaaacgaaggtttttctggcagggattcaagtgcattcaccgggggtaattttgttggacgaaccgacgaatcatttggatagagggagtcgagagaaattgtatgatttgatttgtcggggaagtgcaaccctgctcgtggtgagtcatgaccgggtattgttgaatttgctgtcgacgatgctggagttggaacgtaaagggatagtgctttatggtggaaattatgatttttataaagagcagaaagagatacatttgaatgcactgcgtgagcaggtcgaggagaaacagaaagagctacgtctggctaaaaagattgccaaggatgcggcagaacgacagcagaaacgggaagttcggggagaaaagcaaagtttgaagaaaggaattccccggattatgatgaatacgttgaagaataaggcggaaaagtgtacttcccatttgagagatgtgcatgagggaaaaatagatgcgatttccatgactctttcggaaagccgggcggccttgccgggtgtggaacaaatgaaagtagattttaacccgtcgcgattacacgagggaaaaaccttggttacagctcgtggcgttaatttcagctatgacgtggaattattgtgggaacatgcgctttgtttcgagatcaagagcggggaacgtgtcggtttggatggaaaaaacggttcgggaaagacgacgttattaaaattactactcggacaattggagccgacagaaggcgtgttgagccggggggattttaaatatgtatatgtggaccaagagtgttctttgttgcgggacaatttgacggtctatgagcaggcagaaggttttaacgagcagaatatcccggagcatgagttgaagatacgattgaatcgtttcttgtttccccgggaggtctgggataaaccttgttgtaaattgagtggaggagagcggatgcgtctcgtgttgtgttgtctgatgatcggtaataacacgcctgacgtatttgtgttggatgaacctacgaataatctggatatattgaatattgaaattataacttcgactattaaggattaccggggaacagtgattgccgtctcgcatgatcggagttttatggatgaaattggggtgagcaggtatatagaagtataaatgtttttttatcatcttataaaaaatgatctgttgaaaatccatcaaaggcacttttgaacaaattcattttgtttagccttccagtttatgtagagaaccaagtgtaatctaaccgtgaagtaatggagaaactacctctcgttcattgcttattcagagcttaaccggaacttattttatctgggctgcatgagccacgagtaagctctgaatcagtttcgaaaaagaggtaccttctctcttaattctcggtaggattactattacttcttttattttaacgcacacacgaggagccggataatgattgggtttacatcttggtttacacggggggggattttgcttacatcattgcttacatgagggggtaaaaaccatgaaaatggcctgaaatgaaaaaagcacctacaatcgtaagtgctttaaaatgagagcggaaaacgggactcaaacccgcgacccccagcttggaaggctagtgctctatcgactgagctatttccgcgaataagtggggagagcaggattcgaacctacgaagacgatgtcagctgagttacagtcagccccagttggccactttggtatctcccctttgttcaaagaacagttgcttgttttaagcgggtacaaagataggtagttttgcggaattaccaaatattacgtggaaaaatcttgaaaaaaatgtatttcgtggataaaagaatacgaggagctttcggtaccgaaaactcctcgttacatcttatcgtcactatgagacctatttacgaggacgataagtaatgtcaatggttctttcttcctcgaaacctttgtacttgatgtgtaactgtacggaatctcttacctcgttaaataattcttttagcgggaaactgacataaccgtaaagacttttgttttccggatctccgtatgcattatgtctgaattctaacagggttttcccgtccgctgttaattcttcatgctttgtcaggttgaccatgtgttctttagcgcctccggcataaaagaatcggaaggtgataaagtcgttggcaatccagtattccggtaattcaatcggatccatacccaagctgtcactaatggcttcggtatagggtacaataggtttggtaagaagcttttgcaggtcgtttactcgcacgtaatgatctacactacttcccggatttgcatcttgcaagatggtaaaatccgcgtacacacgcatattattttctaagtaacgtaccggtacatttgaaacggatgggtacaatacaggacctttgtccagtataattctgtaatcctgatcacttgttttttcaatcgtaccgacttctaaccagaatttgtccaagctatacccgtcatcattacaagatgtgaaggcgaatgttgccgagagcaaaagaataattagtgtcactactttttgatacttcattttaaatccctttttattactcgttgttttttagttttcattacttagatggataattgcgtgaatggttgcgtctaataatgttaaaatcaatggaaaaaggctatcatacatcgtatgatagccttgatcccttgtttttgccgggatttatgaatttagaaaagagtttttttcagggagaacaggaattccaatcccccgtcttttctattttttgccgaaatgtctcctttatggaaaagaacggcgttcttcacgatggagagtcctaggccggaaccaccgttttgcctgctgcgtccttcgcatacacgatagaaacgttcgaaaatccggttcaagtgattttcttctattccttgccccgtgtcatagtaggagaaataataaaattccttgtcttccatgtagttgtttaccccgatcgaaatatgatctccggcataattgatggaattttcaatgagattccggaatatagcataaaccagcgttttatttccctcgataaccgtctggggatttatctcgttcttcacgttgatcccgtgtgctacgatcggggaatgcaggtcattaatgacctcctgcaaggtgttgtgaacattcacttgttccttgtcaaaaagttcggatgcctcttccgtcttggtgatcaaggcaatatcccggattaagtcggataggcgaacgatttgtgaatgcgtacgttccaaaaagaaatgttgcttgtccggggtaatatggggttgttccaaaagggtctcgatataaccgcgaatactgcttaccggagttcttagctcgtgggcgatattattcgtcatctcctgttttaggagcctgtttttctcgttatcagagatgttgtttagggtgatttcgaaactgttatccgtgaaaatcaatagttttacggcaaaatgtttgccagccttgctgatcttgttctggtacacggggatattggtggtatttgggtttaccggggtgttcttttgcaagaattcgtttagttctttgaaatccggttgttccagaagtttttcgactttgaatgtcggttcgtctaggataatgttcaagtactggataaaatgcgtgttggcatatatcttttcccggttagcggagaagatggcaattccctcgtcggagtagtggaagtgacggagaagtttctcctgttccacgttgatctgcttgttgctctcttctaaaagttgatagttatgaatgatcttttcaccgatctctcccagttccgtattcgggaaatgaatattgttgtaattaatgttgtgattgtcggccgaaacgataaaatctttcagtccggaaattgctttcccgaaacgatcggagatataaatcagcgagatcagcgtgataaagaatagtagcgtgataaaatacaggaatatgttgtccgtctttaaaaagttctggatctcgatgtcgtaagggagagccacccggataaaataattcatgtagtctttggcaaaataatagtactcgaccccggtacttttagaaagccggatggcggttcctgttttttggattaatgccgtttggatttccggacgctgcaagtggttttcgatctcttgttccttgtcgagactattgtcataaagaactttaccatcatgatccactattgttaatcgtaagttggagggcataagtacgagtacattctttaaagaatccatttgcccgttgtttatcagatgatgttgttgaacgtaacgggcgatgatgtcggaataatcgtccagcgtggtacgcaaggtctccgttttataggctttttcccggttctgttggaaaaaggtaatgacaaccgtgaagacggcgaatacaatgaagaagtaaatgaacaacttctgtttataggataatttcattggaaatagtttttgtattaacgtttaaagttccacgcaatagccgtacccggaacgatttgcgatatgttttccctgttcgcccagtttttttctcagtcgggtgatgtgtacgtcgacggtgcgttcaagcacgtagctgtcgtcactccataccttattgagaatgtcttcgcgggagaatatttttccgggagattgtgccagcatgtttaatatttcaaattcctttttggtaatcgggatgagccgatcgtggatggagacacattttgtacttaaatcgatgtgcatctcacctatatcgatcacctgttttttattggcagcattcaacgaacctgctcttttcaagacggctttcactcttgccgaaacttccttgatcgagaaaggtttggatatatagtcgtcgcccccgatattgaaaccggtgagcatgtcattttccgtgtctttggccgtcagaaagatgatcggggttgagttgtgaagatctttccgaagtttctccgccatcttgaaccctgacattcctcccatcatcacgtccagcaggattagatcatattcctcggtcagcatctttagagcctcttccgcggagggtgcggtgtcaactaggtaaccttcgctctccaagttgaattttaaaatttctctcaggtcctcttcatcgtcaaccactaatatccgttgtttatccattgctctaaaatttagttgttatgaatatgtttcgcgtttttcccttccatcagataaatggccgcttcagcaatgtttgtggcgttgtccccgattcgttcaatgttgtatgacattccactaagggaaagggcatccagcatatcttgatctttgatcgttttgccgacaaagtgaagaggtatcccgtgaatgatttctttgtggttgttgtccacgaggtcatccgtccggataatctcttttgccaaattctcgtcttcacacgtaaaggcaaagatagcattttgtgtcattttttttaccgtttccaattgtaataaaatggtcgggtggaaagatgcgtaaagagaaccctgtaattcaacttcccggaggaagtcggcaatattgagcaagaggtcaccgatacgttccaagtaggccgtcatatcatgataggacatgatctttcggcaatcactggctctggggcagtaaagtacgatggagttgatgacttcatccctgatttttacttccagaccgtcaatgataacttcattatgttcgatcttcgtgtataattcaccgtctttgttgtcgtgggttgcggtgataacgagttccatctgttgtagtacgatggtggataagacttcaaagtcttctttaatcttttctaggtatttttctcttatggtagtcatgtggtgtaagctaaaagttataagctaaaagttaataaggaatgtgtttatagagggagttcgatctaaactcataaatcaaaaattgttttatccgaattgtcccgtcaagtactcttccgtgcgtttgtcacttgggtttgtgaacattttctgggtttcgtcatattcgattaaatgaccgaggtacatgaacatcgagtaatccgatatacgagctgcctgtgacatattatgtgtgacaatcaagattgtgaattcgtttttcagatccagcaacaactcttcgattcgattggtggcaatcgggtccaaggctgaggtcggctcatccattagcaaaactttcggttttagtgaaagagcccgggcaatgcataaccgttgctgctgaccaccggaaaggaaggtccctttcttgaatagggagtctttcacttcgtcccataatcccacgtttttaaggctttcctctactaactggtctttttcctgcttgggaagagaaatcccgttcaatttatacccggcgatcacgttgtcataaatgctcatcgtggggaacgggttcgggcgttggaataccattcccgccatgcgtcgtacttccatggggtttgtctttaatatattttttccgttcaggagaatctctcccgtggtcttgatgtccgggtacaattcgtgcatccggttgatcgcccgtaacaaggtactctttccacatccggaggggcccatgatagccgtgattttcttttctgcaatatccgcgctaacttcttctaccgcgttttttcccggggtgtacgaaatggaaacttttttaagttgtaatataggatttgtgataacc

SEQ ID NO: 64 - DNA, 13528 bp, Butyricimonas faecihominis
tattagtgctatgcattatggtgacggccatggcctgtgatcgtagtgatgattcgaattttgatgttttgcttcccgataaaccttcatttgatgaatcgacagtttatgggaagcggatgaaagagttttttgataaatatgggatatggtgtcaatataatgtttctgctaatgatttgttttatacgtggaccggaagtgagaactggacatcaagtgctcttgattatgaatacgaggaggctaatgccgaatacatcgttaaggctctggatttcttggagaatgaagtgatgataaatatgcctgttagcattcttgatgaatatttaggattatatattgcttttgaaggacgagtgttccattcttgtgagttggaggatggtctggattatacttcaaaagaagattatcccggtatagaagaggaatttgaggagtccgcttatgggtggaacggtagccgttatttgcttttagcccctgttggtcctgaatttgataaaacagataaagaaactttaaaacgtgaatggacggcattgattttttatgaagcattgaaaaatttaccgaatcctgatgcttttgaagataaaaatagtgatgcatgggatgcttttgcttatttctattatgattatcttgttggtgatcatgaagatggttgggcttataatgattatttaggtaagtatcaaggtccttatacagatggtcttgtgagtccgggaccaatttcttctgcgaccttaatggatggttatgatgacgaagagaatggaacagggttttatgcaatgatttacaagtggtatggtaaatcgagttgtctggatgcctttgctgcttacgtggggtatattatgtacgcatcggcggaagaaaaagccgaaatccgttcacaaagtgataatgttctggtgaatgaaagattagttaaggaatattgtaagaaacacttgaattgggatattccagaattaggagaaaaatgatgaattaatttgataaattgtataaacgtgaaaaaactatttattttatgcgtgagcctgtttataacaggcctcacgtactctcagacagtctttatggaaaatgaatcgtgggatgccgtgaagtcgaaggctgtaaaggagaatcggatgatttttatggattgttatacctcttggtgtggaccgtgtaagggattagcacagaatgtatttccgcaaccgaaagttggggaattcttgaattctcatttcgtgtgctgtaagtatgatatggaaaaaggggagggaatcatgctgtacaaaaagtacaagaataacataccgggattcccgacgatgttggtgattaatcctgctgatgaaagtatcgttcataaggtggtcgggtacacggaaccggatgctcttattgcggctttgcaggatggattggacgggaagacgttggctgtattccagaaacggtatgatgcgggagaacgttcgttggagttgataaaaaattattgtaaggctcttgacgtggcgtacgatcaagagatgaaagaaaaagtggtgagggagtatattgagtccatgccgttggattcattgatgagtaaagagttgtttgaaatgtatctgccttacatggatgatgcttattcaacacggtatgagtatgttgtcaagaacttggacaagtatcagtaccggctcaagatgaatcgctatgatatagaatcacgcttgcaaagggcaatgtcggatgccgtacgggagatcgtgaacgtgacgcttgcgaacacgaatgctgacacgttggccttgatgaaggcgaaagaagaaaagttgaaaaagttgttgcaggggtccgcggtgagaggtttcagtgaaatgtatgctaagcttgccattaatgatgtacggatggaaggggatattctggttcttgatgcgatccttgatgcggataaggtattgctggccacgagagacgagtatgttttccgtccggccatgtacaagtatatgattgaatatgctgatgctaaaacgcagaaagagattatccggaaatatctggcgcttgtacaaaagaaacaggaggttgcggacgagagaagtaatggtaaagtgactcttttcacggaaaacgattatgatattttggctatcgggtactatcgtttgggggataagaaaaagagtgaagagtatgcgaagaaatatgaggaacgttacaagttgcgagttgcggatataaaagagacgtttaaagatgagaagatgcaggccgaggttgatgcagaatatctccggagaatgaatgagttccatgctaaagtcggcatgaagtgatatgtttcgtacgaagaatgataatgatgtcgtattataaaaatggaagtatgatgaaaaatgtgtgttatgggttatgtgccgtgcttttgttagttatgggatgtaaccgggaaaagacttacacgatttcgggaacatgggagaacgggagtggaaaggtcgtgtatttgaaaaaagaactcggggagaagcagtttcagatcatggattctgctatcgtgaaagataatcagtttcagatgacgggggccatcccgcaagtggataaacatatactggcacttggaaaggatgaacaagaggttttattggacggggaaccgatcggggtggttgcaacacagatgacgaataaaaatggggagaagattgatgcttacaaggtaaccatcaagggaagtcatgaacaggaaattttccgtacggcccgggatctttctttgggaaaaagcatgatgggattggccggtatgtttgcgatggtacaggtaaaagatgattctgtgaaactggattccacgtataaagcggtggagatgatgaaaaaagcgattgatgaaaggatcaaaaacttcgtggattcgaacagtaatagcttggcgatcacgtatgtgatcggggacttcattgctagggaatatccttttgaagacgtggagcgctattataacaatctgaccccggacgtgaaagcctcctatccgggacagttgctcaaggaaaaaatgacaagcttacgctcgatcaacgtaggtggcattgctcccgatattgatttgatggccccggatggaaagtatgttaagctatcttcattgagaggcaagtacgtgttactggatttctgggcatcttggtgtgggccgtgtttggcagaggtgccgaatgtgaaagcggtttatgagcaatataaggacaaagggttcgagatatatggtgtgtcgttggacgacaagaaagatgcgtgggtgaatgccattgaaaagcacgacctaccttggatacacgtctcttctttaaagggatgggaatgtccggtggcgaagatttacaacgtgacgggaattccgaaaatgtatttgttggataaagaaggtcggatcgtggccatggacttgagaggtgaggcattgaaggaaaaagtggcgtctttttttaattgaaaaagagactcttcttgtcaaccgttttgacttttttagtctataacaagaaaaaggtgttttatgaaacacgaattatttaaaacagtatgtatgaaaaaatggatgattgtattgttggcaatgattattgtcatgccgttgtcgtcagacctgtacgcggcgagtaagaagaaaaagaaaaaagggaccgccacggcaaccctgccggctcccaagaaagtaagtccttacgagaagttattgaaggggaagaacgtggagacttcaaaaagtgattttatcacgttgcataaagtaggcagtaaattgtatttcgagatacccttgaagtatatggagcgtgagatattactggcgtcaaccgtgacgaacgtgacttctccggaattttgtgacatcggttacaaggcgaataatcccttgcatctgaaattcacgaaacgggacagttctattttcctgcgttacgtgtcaacgggcgtgacgaccgataatttgcagaaggcgatgaataacgtgtatggtgacccgatcttgtatgcctatgacgtcaaggcgtataacccggacagtacggccgtggtgattgacatgaccacattgttcactacgaacgtgaaagatttgagtttttttgcggatgccatgatggggggaatggtgaaaatctcttcttcttttaaaaaagaggcatcttatttggacgagatcaaggctttcgatgataacctgagcgtgaagacggtgatgtcttacggggtgtcgttgagcgtgatgggtatgatgaaattgatggatgattatcctttcacggccacggtgactcgttcgatcttgcttttgccggaagataagatgattccccgaatctcggattcccgcgtggggattttcaacagtacgaaaacccgtctttctatcacgaaggaggatgaaatcgggaattattccgtggctcatcgctggagattggaaccgaaggacgtggaggcttacaaacggggcgagctggtggagcccgtgaaacagattgtgttctacgtggatgacgctttcccagaattgtggaaagaaccgattcgtcaggcggtgactacctggaacgccgctttcgagaaaatcggttttaaaaacgtgatggttgcgaaggatttcccgaaggatgatcccgattttgacccggataacttgaagtattcctgtattcgttacgtggctaattccacggctaatgcaatgggaccctcttggacagacccgacgacgggtgagattattaatgcgtctgtgttggtttacggtaatatcatccagttgatcaacaactggcgtttcgtgcagaccgcccaacttgatccttccgtgagaggcaagaaattgccggatgacgtggtgaaagcctctttgatctacgtggtggcacacgaagtaggtcattgcttgggattcatgcacaacatggcctcttcggcagctttcccggttgattcgttgcgttctgcatcgtttactcaaaaatacgggacgacaccttgtatcatggattacgctcgtttcaattacgtggcgcaacccggggataagggcgtgaaattgactcccccgaatttgggtgtttatgacgagttcttgattaaatggaattatcaatatattcccggaacgagagacgagtgggaggaacaacctatcgtggaacaatgggtggacgaacatgcgggagacccgatttatcgttatggtcgccaacagatacaaagccgttatgacccgagtgctatcgaggaagacttgggtgatgacccgatgaaagccagcgagtatggtgtgaagaatctgaagtatattctttccaatttgcaaggatggattaaagacgatccggattattctcaccgtcaggccctgtatggtcagattatgacacaatattatcgttatctgaagaacgtgatgtataatatcgggggaatctatctgacagaagtgaaagaaggtactccgggtaagcgttatgaggctgtgccgaaagctcgtcagaaagcatctatggcgtgggtgttgaaacagtttaaatccatggattggttgaataatgcggaattgaaggctcacttcccgttaagtgttgacgggagtgcaatcgttcggagtcgagtggccggggatattcagggattgatcggtaacgtgattctttcttctcacgtggcatcctctccttactcgattaatgagtttatgacggatctttataatggtacgtggagtaacttgttacaagggaaggcattgacagagggagacaagattttgcaaaatacgatggtggatatggtctgtgcatcattgaatgatggcggtaccaagaaaagcgcctctccttttggttttgtaccttctgttgacgagatcgtggcttacgggttggatgagagtggtttgatcagtcgttttgccgaccagttccgtgcggttgatgaagaatatggccggggatacgtggcctcaaatatggtggccgatcagttcggaactcccggttacggttggcagagaacggttgccacgacggcaattgacgattccaaggcctatttgcaggatatggccgtgaaatcccggaatttattaagaagtaaaataggaggaatgtccggaaacgcgaaagtacattatcaggctcttcttatcaaattaaacaatgcgttgaaggacaaactatagtgtatgttttctagtttgtgttcagagtatgacgtctgaaattgatccggggcagttcgtttatcgagctgccccttgtcatgtggaatagaatccttttgaaagctattaataatttattaaattcgcgttcgattataatttagatatatatatgagcgacaattccctattagagaaattagagacattttatattcgtttccgtgagatcgggcagttgataaccgacccggaggtgatacaggacatgaatcgttttgtgaagttgaataaagagtatcgtgatctggaacagatcgtggaggcgggagacgagttgaaacgtgcggtgagttcttatgatgaggcacaggaaatattaaacacggagaccgataaggaactgaaagagatggccgagatggagatcgaggagctggatgccaagattcccgaattggagtcgaaggtgaaaatgttgttggtaccagctgatccggaggattcaaagaacgtgattcttgaaattcgtgctggaaccgggggtgacgaggccagtcttttcgcgggggatttgttccgtatgtatacgaaattttgcgagtccaaacgttggaaaatagaaataaccaattacagtgaaggaacttccgggggatacaaggaaattgtggcgaacatcacgggtgacggtgtttacgggattatgaaatacgagtcgggagtacaccgcgtacagcgtgttccggcaacagagactcaaggacgggttcatacctctgcggccacggtggctgtactgccggaggcagaagaagtggatgtggtgttgaatccagcagatattcggaaagatacttactgttcttccggtcccggggggcagtccgtgaacacgacgtattccgctatccgtttgacgcatattcccacgggtatcgtggtgacttgtcaggacgagaagtcgcagttgaagaacttggcgaaagcaatgaccgagttgcgctctcgtatttacgcgatcgagcatcagaaatatttagacgagatagctacaaaacggaaaacaatggtttccacgggtgatcgttccgccaagattcgtacttacaattatccgcaaggacgtgtgacggatcatcgtatcaatctgacgctttataacttggctgccgttatggatggcgagttgggcgaaattatcgagaaattgcagatcgaggagaacacggaaaaattgaaggaaagcggattttaaagataaaagttaaaaactaaaagataaaagttagaaggtatgacttataacgagttatttgaacaggtaaaaaagaaaaagtccttcctttgcgtgggcttggattcagatataaagaaattacctcaacacctgatgggagcggaggaccccgtgtacgagtttaataaagctatcgtggatgcaacggcagatgtggcaattgcctataaacctaatatcgcattttacgagagtaacggggtttccgggtggattacgttggaaaaaacggtgaaatacatcaaatcaaaatatcccgagatcttcttgattgccgatgctaaacgcggggacattggaaatacatccgagatgtacgctcgtgctttcttggagacgatggaatttgattctatcacggtggctccttatatgggagaggattctgtgaccccgttcctaaaatacgaggggaaatgggtgattctattagctttgacttctaataaaggcgcttttgatttccaattctttgaggagaatggcgtgaaattgtatgaacgggttttgcgtaaatctcaagagtggggaaatgaccagaatatgatgtatgtcgttggggccacgaaagcagaaatgttaagcggtatccgtgaaatcgttccgaatcatttcttgttggttccgggagtgggagcgcaaggcggtagtttggaagaggtcgcaaaatacggtatgaactcccattgcgggttaatcgtgaactcttctcgcgggattatctttgcggataagaccgaaaattttgccgtgagagcgagagaagaggccgtgaagttgcaacaacagatggcagaattgcttgctgccaaaggggtgatttaagagaaagagattgaactatatgtaggaggtgtgttgcttggcgacacacctttttgatttataaaaagggtaattttattattgtagaatgcttgctaaaataggtggtaatttgtagaaaatattttctataattaaggtgttaacagataggtctaatccaaggaaacacaggaatgtattaaaaactcgtctcgaaaagaaaggtcatgagttgactacaatttgtagtcaactgaaattgtcctcgtccgattgtaaatatttatagaacggatgttgttgatacagagtaattatttcggttaataccatctttcgtttttcccgttgacgagatcatcatggacgattggtggtatgcttttttagtacgctgataacaaattctgcacgctcttccggagtacctttagggacgattataggaatgtagtctagttgttggtaggtgacgagcataacatcgtaggtttcgacggcttcttggtaggtttgtttgcgttctgaatcggtttcgtagatttcaggccaggggggaaggatgaatacctgcggattgtagcggaaatcttgaacggtatgttggagttcgggagatggggattgatgggtgaggtgtacgtaagcgagggtgtcggggataccccggtcgaagaaaagaacagattcctgtttttggtgctgttcgaaggattccacggagcgggaaagcatgaggtgggtgtaagcgggtatatttgcccaagggagggcgttcccgtttcgggcgacttgttcccggataatctcccgtgctacttcgggaacatacggaaaaccttgtttggccaatgcctctagtaaggtcgttttgccaacaccgggtcccccggtgatgacaaagaagttcggtttataaatcatgtttacaagtttagagcgtgccggatgaaaacggcaagtccgttatcttcgtccgcgggcatgttatcgaattgatcccgtagtggtttcggggcattggacacgatgaacgggtgaccgcaacgtttgagaaaatcaagatcgttataatcattcccgagtccggcacattcatcgtaatgaatacctagctgatcaaggagtagctggcaagacgtacctttattgacatcgggagcgaaaacttcggtccagatggcttggttgtcgatgggggacgtggaacggatcacggaataggttgataatttttgttgaatgtccccgtgaagttgaagttgttgtgcgtctaggataacaagaaattgagtggccccgccttgtatctcgtcggttgaagagatgggagttcccaagccgggataattctcgatacgacgtcgaaaatcttcgtgaagagaggagatatttcggtaataaaaatgatggttgtcgggaattctttgctgtatggtaaaatttatatcgtatttccagaggtgggtagcgatgtccagtgtttcttcggccgataattcccgggtgagaagaatctctttgttatcccagcgcatgatgccggccccggaagaaaataccatgtaatccaccggaaggccttcgggtagcgtgttgttgagagagaacacggaacgtcccgtggcgaggatgcgaaccacgccttgttggcccgcctcttccagtgcaacccggttctcctcgcttatctggtgccagttacgaggaagtgtggttccatccagatcaataatgatagctttaatcatgtaataagtttaaatattattttcaattctccattttcaattttcaattgtctcaacgagttcatacttgtaataaggtaatggttcgttgaggtagtggagtactttttcttggttcatgccgtcaagaggattgtgagcgtaaccgaaggtggctttaattcccatattgataaagtgtacggcccggtcgagggcttccgggagactgtctccgttgagcatacagccggtgatcacgctggcgaaggcatcgcccgtgccgggatacgaggccgggatataatcacacaacactcgccaagttcgttgatccaatcggttgtaagcgagcgtggccacgttctctgcgttgcttccgggggcggaggtgataatcacgtgttccgggccgagttcgctcagctgtttgctccattgtatcgcggtttccacggagatttcctgccgcgggttgtagcctagcaaaaaggcggcttccgtcaagttcggggtgatcacctttgcttgggaacatagtttacgcatcccttccaccatgtcgggtgtcatgctggaatataattccccgtggtctcctagtacgggatcgacgagaatgaaattttggtcattcttgaaatgttcgaagaaatcactgacgatgcccatttgtttcacggaagccaagtaccccgtgtaaatggcgtcaaactggagttgcagctctttccagtgagagatgaaactttccatgtaatcggtcaggtccaacgagcggaaatccttgtattcgctatgagcggagagtatggcggtgggaagggggcaaacttggaatcccatgtgtgtcagtatggggatggccacggttaatgaagcccttccgtagccagacaggtcgtgaatggcggcaattttcttcatgattaatcgttttctttatcccccaaaggtaataaatttatttcagtggaacatacggcaaggtaaaccagaacgtggaaccttggccttcttcagattcgacgcctatttcaccgcctaatttcgtgataatcatttcactgatggctaatccaagtcctgtcccttgagcgaagttgttcagtttgataaagcgatcgaacaccttttctcttttgtcgggggcgatgccgcaacccgtgtcggacacgtaaaaatagagcgtgtcgggtgacgatagcttgtaaccgagtttgatacttccccggtgggtaaatttgatggcattcgtgatgaagttgtttatgacttgggacacgcggttacgttccgttttgatgatacatcgcggtaaacgttctttcacgctgaacgtgacatcgggattcatcattttaagttgggtggcttgagcaatttcttcgatgagattattaatatctacttccgagtacacgaattccagtgttcccgcttcaattttagaaagatcaagaatatcgttgatcaattgtagcaacaggttattgttgtttttaataatcttgatgtactccagtctttccgcttcattttcggttatggcgagtatctcggaaaagcccacgatcgagttgagtggagtccggatttcatggctcatgtttgccaagaatgcggatttcagacggttgctttcctctgcctgttccttggcgtgtaatagcttttgttccatttgtttgcgttccgtgatcacgatacttgacccgataatggttttcggtttgcccgcgctgtcatattcataaacggttccttgcttgttgatccactcgtattcccggtcattgtaccaatgcacgaggtactcctcgtgaaattccttgcgtttgcctgacaagagttcattgaacacgtcacgcatatgttcccggtagttaggatgtatagaattgatgtacttttcgactttacagtaatatttaccgtcaatggcgaaaagagcatcttcatgatgatagatgtcgtaatcacaggaaaaggttagcgacgggacatcgcaatcccacgggagaacatgggctaggctgaggactgaggaaagcgaggaatttgtgatttccagttcttccttggcatctctcaacgaggtttccagtctcttgtaatcgtcgatggagcaggaggttcctattagacgattggtgtttttgtgtgttccgtcctcttcctgcaaggcgttaatctcgacccatttataatttccgcagtgtctgaaatcggcccggaaggtgaatcttatccggtacactttcccgcggataagattgttgaattctttcgccacacgttctcggtcatccggatgaatggcgttataaaatttgatcatgggtattttcaagtcccattcaagggtttccctgtaaataccttttaattgcagggagttggttacaaacacttgctcttcgatgtcgtacatccagagggcatgtttcgtgatattcagggcgagaatcaatttttgggtaagggatttgatttcttcctgttgtttttgcatattacttatgtccagtgaagtacacacgagccagttcatgttatcttccgtgaataggtgcttggtgattagcaacgtgtgttcttgaccgtcggcgaggatgaatttttcggccccttggtaagatgctttttccgcggcaagtttccggtcgaattcttgcatctttcgagcttgttctttggtcgtgaaccgttcttccgtgttcccgatcatctcttcggccgtgcgcccgaatatgcttgatcgttcactccagaatatataacgttccgtgttcatgtctttgattgaaatgggaaactcgatgctttcaagtactcggcttaaaaagagctgtaatttttctgtctctgtttttctcaacgtgtaatcggtgatgtctcgcatgaacgcgattacttgattattcggaaggagggccgtgtgaacatcaaaaaagtacttcgtatttttaaccgggagatagatgtcaaaatatcggggagtttttccctctctcgtcttttgcagttgttcgtgaaagtggtttcggctttccggttcttcgatgagttcttccaatgttttgccgaccatctcttccgggggataaggaatatgttcgagaatggggttgtgcaagccaaccagatgatacgagtcatcaaagatgaccatcatgttcggggttgcggctagtatagcctcttgcatttccgccgaaagctttgtaccggaagttgaaaaatattctgacataaataatgctattttgtgtgcctttatcccctgtgtcgagatatttttcaaatgtacgttttttttgtttatgtagtcattcagatgattgtttatttttatggatgcggatattataaagggaatataaataagcggggtgtgtttttttagggggtatgtcttgataataatataaattttgagaattgtgttataaaatatagggg

SEQ ID NO: 65 - DNA, 13461 bp, Butyricimonas faecihominis
cccaattgattatggctcgcctgagatgctggtttagttttggtttgaatgatttacttatttgtcaaaatttattttgaatagaataaattatttttgtagccggataaaaaatgaatgaaatgatattggaaacggaacggttggttctaagaaagttagaacaaggtgattttgacgaggtgtgtaaattgttgcaggatcccgtggtgatgtatgcttacgagggtgcttttagcgatcaggaagttcaggcgtggttggataagatgttccagcggtacgaggatgacggtttcgcactgtgggcggtcatcgagaaaagcaatggcgagcttatcgggcaatgtggtatcacgtaccaagaatataacgggggcagggttctggaagtcggttatttgttccggcaagaattttggcataaaggatttgccacggaagctgccattgcttgtaaagaatatgcatttcaagtgctgaattttgacgaggtttattccattattcgggattcgaacgtggcatcccagaacgtggcccggcggaacgggatgatagaggttgatacgcttgtcaagcattatcggggagtcgagatgccacatatcgtttttagggtatcgagagagaataatttaaaaaagtgattagagttttccggataaaataaaaggagttagtgattactaactccttaatattccgtgtactcgaggcgggacttgaacccgcacagccgcaatggccacgggattttaagtcccgcgtgtctaccgattccaccactcgagcaacttggagcgaaaaacgggactcgaacccgcgaccctaaccttggcaaggttatgctctaccaactgagctattttcgcatgattgcttgcaaaattttctaggaacgctttccttttttgcgattgcaaatatagagcattttttgttttcagcaaagggtttgataagaaaatgcaaaggattttttaaattcatttcttgaaaactgtttttcatgcagttactggaggggaaaagaggtgaatgtcggggaacgggaggtcgaatgaggcctagtgaagatgtgattttgcgattttttttaagaaatgggttgttctcgggtgtagaatgattatatttgtcaagtttttaagacagaaaaaatgtcgcggacagaaagtagaaagggaaaaagtgcttattttgttcccacaatcagtatttctctggtattgattgtggtcggtatgcttgtatttattttgttgaatgcccgggcgatttcggatcatgtgaaacggaatatcggttttgccgtgatcgtgaaggataacacgaatgaggcggagattaagcgggtgcaaaagattctggatacccaaccttacgtttacgcttcgaagtatattactaaagaacaggcggcgaagtctttcaagaaagagatgggagaggattttgagcggatattgggtgccaaccctttgttgccttccatcgagatcaagctgaacccggcatacgcgaataacgattcgctggcgatgatagagaaaggattggcaagatttgatattatccacgaggtgtattaccagaaatccatgatcgagagtattaacgagaacatacggcggattacgattatctttttgattgtcggggcggtgttggtgttgatttcgttcacgttgattcgcaacatgattcatttggcggtttactcgcagcgactgttgatcaagacgatgcagttggtgggggccacgccgttttttatatgcaaacctttcgtgtacgggagtatgtggcgagggttcttcggggctttgattgctaacttggtgttgctgggtgcgatatttttcgtacaagagaacgtggggaacgtgattaatatcatgcggcaggacgtgatcttgttgatggtgggttttgtgatcctttccggggtggtgttgtcatttttctcggcttggttctcggtacgtcgttatttgcggcgggatttgaatgatttatacgtgtaaataaaaatatatggcaagaattttaaacgaaaagaaagacggttttcctataccgaaggataattacaagatgatcctgatcggtttcgggatcgttatagtgggtttcctcttgatgatgggagggggagcggattcgcccgatacatttaattatgacatttttagttttcgccggatcacgttagcgcctatcgtggtgttattcggtttcggtttcgttttctggggtatcatgcgaaaacccaaaacgaagggagaggagaaaaattaaatattaatgtaattgaatattgacgtgcgtgcattctcaattttcaattctcaattttcaattcatagatggagtggtttgaggcattggtgcttggtatcatccaagggcttacagaatttttgccggtgagtagttccgggcatttacagatttttagcgctcttttcgggttagaaggagaggagaatttaacgtttgccgtggcggttcacgccgcgacggtttgtagtacgatcgtgattttatggaaggaagtgtccgtgttgttcaagggctttttcacgttcaagtataatgacgagatggcctacgtgctaaagatatttctttccatgataccggtggctatcgtgggattctgtttcaaggattacgtggaggcgttatttggttcgggattgacggtcgtggggtgtatgttgctggtaacggcggtgttgttgtcgttcgcttattacgctaaaccccgggtgaaagaaaaaatctcgtatcgggacgcgttcgtgatcgggttggcgcaagcgtgtgccgtgttacccggtttgtctcgttccggttcgactattgctaccgggattttgttgggtaacaagaaggaggcggtggccaagttctcttttttgatggtattgattcctattctgggggaggcttttctggatctgatgaaaggcgggttctcggcagaggcaagcggtatttcgaccgtgtcgctgttggtgggattcgctgcagcttttatctcgggatgtattgcttgtcgctggatgattaatatcgtgaaaaagggtaagttgatttggttcgctctttattgcgctatcgcgggtgtattgacgattgttttaggataatgagtaagtggggtaatattttttttagagaaggagaggattttcgggcaggagcggtgttcgtggtcgataaaccattgcgctggacatcgtttgacgtggtgaacaaagttcgtatttgcttgagaaaaggatacgggaagataaaagtggggcacgcggggacgttggatcctttggcatcgggagtggtgattatttgtgtggggaaggagacaaagaagatcgaggagtatatgggacaggagaaagagtacgtggcggaaattactttcgggcatacgaccccttcttatgatttggagacatcttttgacggggagttttcgtatgaacaagtggatcgtgcttgtttggagcgggcggtccagcagtttgtcggggaaattgagcagtttccgccctcttattcggctgttcgtgttgacggggtccgggcgtacgagatggctcgtcggggggacgaggtggagatgaagagccggaaggtagtggttcgggagattgaaatattgaaagtggaacttccaatagtggaactccggattgtgtgtggcaagggaacgtacatccgttcgctggctcatgatctgggaaaagcctgcgggagcggttcgcatttgtcagctctaagaaggacccgggtgggggacttccgggtggaagatgggtttaaaatggatgaaattattggagttttacaggaaaatttgtaatttagcaagatttgattaatatataaacattattcaacatgaaattatctaagtttaaatataagttgccgccggagttgatcgcgttacatccgacgcctaaccgggatgaggcccggttgatggttctggatcggaaaaccggaaagattgaacacaaggtatttaaagatgtgattgactattttgacgagaaagacgtgttcgtttttaacgattccaaggtgttcccggcgaggttatatggaaacaaggaaaaaaccggtgcggagatcgaggtgtttttgctgagagagctgaacccggaattgcgtatttgggacgtgttggttgatccggctcggaaaatacgtatcgggaacaagttgtatttcggggaagatgatagcatggtggccgaggtcattgataataccacttctcgcgggagaactttgcgtttcctgttcgatggtgaatatgacgagttcaagaaggagttgtacgcgttgggcgaaaccccgcttcctcgttttattaaccggaaagtggaacctgaagatgctgataattaccagactatttttgccaagcatgaaggtgcggtggctgccccgactgcgggtatgcattttagtcgcgagttgatgaaacgtatggagatcaaggggattgatttcgcttacatcacgttgcacgtcggattggggaatttccgggaggtggacgtggaggatttgacgaagcataagatggattcggaacaaatcttcgtgacaccggaaacggtgaaaatcgtgaatgacgcgaaggatgaaaagcataaaatttgtgccgtgggtacgacggtggtacgtacattggagagctgcgtgaccaccaaaggacggttgacggagtttgaagggtggacgaacaagtttatcttccccccgtatgatttcagcgtgccggatgctttcatttccaatttccatttgccttattcgacgttattgatgatggtggcggccttcggtgggtatgaacacgtcatggaagcgtataatcaggcggttaaggaaaaatatcgttttggtacttatggcgatgccatgcttatcatttaaaatatagaacctgagggttgaagacggtatgctgaaaggtatgccgtttttttgataaaggaacaaagatttggaagcaaaagagttattagatttatttcaagatcatcctgtcgttcagaaaattgccaatcggctgcgcaagcagacggggacaaagataaagttggagaacgggatcggttcgctcgtggcttttatcgcggctgccgtgggacgggagatgaagggattacagcttttcgtgttgaacgacaaggaggaggctgcttatttctacaatgatttgttgactttttatgacgaggagaacgtgcgttttctgccttcctcgtttcggcgttccggtaattttgaagataaagataacgattcgattctggttcggacagaggtgttgaatgccttgacggcaaaagaggtggggatggtggtcacttacacggaggcgatggccgagaaggtggtgagcaagaagatgttggccgatatgtcgatgcccgtgatcaaggggaacaagctgtcgctaacgtttttggagtcgttgttgggagagtacggtttcgaacggaatgatttcgtgtatgaacccggacagttttctatccggggaagtatcgtggatgtctattctttcgcggaagagcgtccggtgcgaatagactttttcggggacgaggtggaaagcattcgttatttcgatgtagagacacagctttccgagcagttgattgacaaggtggtgatcgtacccgatttgagcgagtcaacggataagaatgataacgtggggttgaccgagttccttgggaaagaggccacgtggtggatgaagaattccttgttgattcatgaccgcattaattcgttaaaagaactggatgccggggaattcctgatcacgtcggatagtttgttccggacgatcgaggggaacagtgtggtggagtggggaccggagttgtttttccggggtgaggtgattcgcttggaggcggaggtgcaaccggccgtgaacaagcagttcgatttgctggcagagcatttgctagacaagcagatggatcgctacacggtttatctttgttctacgaacgatatgcaactccagcgattgcgggatattttctcggacaaggggcatgaggtgaattttgtacccgtggagggaacgatccacgagggtttcagtgatgccctgatcaaggtgtgtatctacacggagcatcagatcttcgatcgttaccagaaataccgtttgaagacttcgcagatccggaaagggcgggagtccatcacgatcagcgagttgcagaacctgcatcccggagattacgtggtgcatatagatcacgggatcgggcgcttcggcgggttgacgaagattgataatgacgggaagattcaggaggccatacgtttggtgtataagaataattccgaattgtacgtgagtctccattcattacataaaatttccaagtacaaggggaaggacggtgaaccgccaaccgtgagtaagttgggtggggaggcttggaataaattaaaacagcgaaccaagtcgagggtaaaggatattgcccgggagttaatagctctgtatgccaagcgcaggcgggaggaggcttatgcgttctcgaaagatagtttcttgcaggacgagatggaggcatcctttatgtacgaggaaacgccggatcagatgaaggcgatcgaggcggtgaaagcggacatggagagtcctcacgtgatggatcgtctggtttgcggggatgtgggattcggaaaaacggaagtcgctattcgtgcggcattcaaggcggtggctgatagtaaacaggtggccgtgttggtgccgacgacggttttggcttatcagcattataatactttcaagaaacgtctggaggggatgccttgccggatcgagtatatcagtcggatgaaaaagagtgccgatattaagcggattttgaaagatttggaagcggggaaggtggatattatcatcgggacgcatcgtttgacaagtaatgatataaaatttaaggatctcggtttgctggtgattgatgaggagcagaagtttggggtggcggtgaaggagaagttgaaacgtttgaaattgaacgtggataccattaccatgacggcgacaccgatcccgcggactctgcaattttcgttgatgggggcgagggatatgtcgattatccgtacggccccgcctaatcgttacccgatcgtgacggagttacatcgttttgatgagaaagtgattaaggatgcgatttcttacgaggtgagccgtgggggacaggtgttttttattcataaccgggtggataatatccgggatattcaatatatgattcatcgtctgattcccggcatcaagagttgtgtgggacacgggcagatgagtggggaggagttggagacggtgatgcatgatttcgtgcggggagattacgacgtgttgattgccacgacgatcgtggagtcggggttggatattcctaatgcgaatactattattattaatcaggcccagaattacgggttgagtgatttacaccagttgcggggacgggtgggacgttccaaccggaaggctttttgttatttgctggccccgcctttggaattagtgaatgcggatgcccggaggcggttgaaggcgatcgaggatttcagcggcttggggagtgggttcaatattgccatgcaggatttggatattcgtggggccgggaatattttagggggagagcaatccggttttattgcagaagtggggtacgagacctatcaaagaattctgaacgaggcgttagtggaattgagggatgaggaattccccgaattacagaaggtgcatccggatgagccgatggcgtttgccacggattgcgtgatcgacacggattttgctttgttgattcccgatacttacgtggagaacgtgagcgaacgaatccgcttgtaccgggagttggataatatcgcgaacgaagaggctttgcagcgtttcgagatagagatgaaagaccgctttggcgagattccggctccggttgtcgggttgatggaggtggtccggattcgtcagagatgtatagacttgggaatcgagcggttgatggtgaagaataacaagatggttgtttattttatcagtgaccaaaattcgccattctatgcctctcccgtgtttagcgagctattgaaatttatacagaaacaggtgatcccttgcaagatcagcgaaaagaatgataagttgagtctggttttcacgagtattgccgatattaatcgggtatcggaaattacgcgggagatgcgggactttgcttatggtaataattaagctatgaatctaattgttgatattggaaatacacgaaccaagtacgccgtttttgacgagggcgattgggtggagtgtggattgggattaccggaagtatacgatctggcgacgacttaccgaaaaagcgggaaggaagtaaacttgattttgtcaagcacgggagctatctcggcggaagttcgggaaagactgcgtgaggtttccactttcttttgtgaagtgtcatcggaaatccccttgccgatacgcttgggatatgatactccgaaaaccttgggtgtagaccggattgccggttgcgtgggcggggcattccttttcccgggtagggagttgctggtgattgattccggaacggcgattacgtatgattttgtcagtgcggatggggagtttcggggaggaaatatttctccggggctgggtattcgtttccgggcgttaaacgagttcacagcgagtcttccattggtgaagtgttccatggaacacgggtatgtcgggaagaacacgcatgatgcgattttgaacggggtgatgaatggtatactttttgaagtaagagggtatatagatgagttgcttcgaaataatccccatgctgcggtaattataacgggtggcggaagtgaatatctgagaaaaacgttgaaacggacggttttttttgaagacaagttggtgatcacgggtttaaacagaattttagaataccaaaaaacggttaattatacatgaaaaatatgtgaaacatttccgttttaaagaaatagtggtaattttgcgatagtcctcacgtgggtggacgggctatgatgaaaaaacttattcgaactaacttaaataaaagggatgaccatgaaaaagattgctgttatagcatttgggatgcttctattcattctaccgacaaaagcgcaaacgttggagtctcagtatggattggatagtgcaaataccattctgaatgcttctctgtacacggaatactggaaacagaaaaattacgaagaagcgttaccctcttggagatacgttttcttgaacgcacctgcatttcaattaaatacttatatccggggggaagatattattgagtttatgatccagaagacgaaaaagaaggagtacgtggatactttaatgatggtttttgatcgtcgtcttcaatacatgggaaaaagaagccgggaaggatatgttcttgggaaaaaaggtatggctcaagtgaaatattccaacggggatattaatatgttgaaagccgggtttgataacttgatgaagtcgtatgaattggaaggagaaggtactccggcacagttgattcatgctacttttgaagtgggttgtgggttggtacaacaaaatctgttgtctcaggaggaatttattaatttgtacatgaaattcactgattttgcggacaaacgtctagcatcaggtgaaaaaggatgtgataatttcgctgtatgtaaatctgcattggatgccattttcttcgagtccgggtatgctgattgtaatacattggccggtttgttgaatcagaaatacgaggcgaataaagatagtctgcctgttttgaaagaaatttcttctatcttaagaagacgtgaatgtacggatttaccgttgtacgctacggttgccgagaagatttatcagcaagaaccgagtgccgatgctgcttacagtttggctatgatgttcttttcaaaacaagatattgcgaaattcgagcaatatttgaaggaggctatcgataaatcagatgatccgaaagctaaagcagattataattacaagctggcacaggtgtatttgtcaaagaagaattatccgtcagccaaaaaatatgctttggatgctttgaagacaaacccgaatatgggtgatgcttacatcacgataggtttggcttatgcggtaagtagcaatgactatgaaggagacgagttcgacaaacgtaccgtattttgggctgccgtggataagtttgtgaaagcgaaacaagttgatccatcagtagcaggaaaggctaacgaatatattgagcggtattctcctcacttcccgacgaaagacgaggctttcttccgtgatattacggcagggaaaagcgtgaaagtcggtggatggattaacgagacaacgactgccaggtttagagattaaatacatgacatttctatatcgtgcattaaaaataaaaagcattaccgtccttgctttagggacggtaatgctcttttcgtgtaaaacgaatatgaaggatgtggatgcgatcgggaaccggaacaatatgcctgaaatgtctggggagaacatggagttattttattcagactctgcgttgttgaagtataaagtaataacacccctttataataagtataaccaagacgacaagaaatatgatgaatttccgaaagggattcatgcggagttgtacgagaagggtggtagcatggtcggttccattacctcgaaatatgcgaagaagttggaagaggagatgctgtgggagttgcgtaacgaggtggtcgtgatcaatgccgaggggaagaagttggaaaccgatctgatgtactgggatatgaaaaaagagatcgtttattccgatcgctattctcggctcacttccggggaccagattatagaggggaataaaggtttcaagtcggatcaatccttgagaaacccggtctttaacaagattacgggtgtggtagaaattgaaaataaaccttaaatgtcaggatttgttgccatattgatttgtttggtcctgtctgctttcttttcggggatggaaattgcttttatggcttccaataaactccggattgagattgataaatcgaacaagggtatcacgcagaagttaatagatctttttgtttccaattcggggatgtatatcaccacgattctggtagggaataacgtggtgatggttatttatggtatttttatgtccgactatctcgatcctatgttggaaaatgtcggtatttcgctggggttgaggatggttcttgtgaccttgatttcgacgttgatcgtgttggtgacgggagagtttttcccgaaagccgtgttccgtctgcggccgaatgtgtttttacgggtatttgctattccggtatttttgttttatatcctgtttttcccgatctcgtatttctccgtgtggttcgggggattgttgctgaggatatttaccggacgcaaactgacgcataaagaggaaaaccgggcttttggcaagatagatttaaataatctgatagaagagggtgagaccgggggagaagaaaatgaagacgaacacgatattaaattgttccggaatgcgttggatttttcggaagtgaaattgagggaatgtatagttcctcgtccggatattgtggctttatctattgatagtagtttggatgagttgagggagcttttcgtgaaaacgggattgtcccggatattgatttaccgggattcgattgataacgtgatcgggtatgtacattcatccgctttgtttcatcatcccgaaaccgtgaagaaggcggtgagcaaaatattgattgttcccgaaaccatgtcggccttgaggttgttgaatcttttcacgaaggaacagaaaagcgtggcggtcgtggtcgatgagtttggaataacggccgggatggttacgattgaagatattatggaggagatattcggggagatcgaggatgagcatgaccgtttgaatctgaaagaagaacaggtcgctcccgatgaatatattttctccggccgtcttgaagtggattatctgaatgaaaaatatgatttgaatcttccggagaacgaggagtacgagactttggccgggttgattctttattacaatgaggatatcccggaagagggggaacggatctctattgaagatatatcttttgaaatcgtaagtgtcaagagtgcccggattgaggaggttcgggtaaagatataaaaagaaaaggagctttaattaagctcctttgttgtatgttttagcatatcgtcgaaatgccggatgttatcctcgtgatcccggtggcagatcattagaatatcattgttttccgcgataatgcaattttcgaccccttcaataatgactttcttgtcttgggggacgttaataatacattctttagtttcgattaagcggacttgttcgctgttggatacattgttattctcgtctttcgggctgatttcatggaacgaatgccacgtgccgacatcggaccaaccgaactcacctttcatgacatagacttttgcggacttctccatgataccgaagtcgatggaaatattacggcattgtccgtagatgtgagcgatattttcgggagaatccgggttctccacatttttatattcctgctcgaacagtaaatacatatcttcgaggtatgttttgaactcttcgataatatcttctactttccagataaatatcccagcgttccaaaggaaatcacccgattccaaaaagacttttgccagttccttgtccggtttttcggtgaacgttttaaccttggatataaattcggagaacttgtttttcttgatctggatatacccgtaccctgtttccgggcgggttggtttgataccgatggtgagtaagccaccgaactgttctacgaaagaaattcctttctggatgttatcgagatagaccgcgtcattggtgataaaatggtcggaagggacaactaccatactcgcatgcgggttaacccgggcaatgcggtaggccgcataagccacgcatggggcggtgttcttgccgaaaggttctttcagaatattctcggaaggaatttccgggatttgctgtttcgtcagctcttcgtaggcggtacctgtaacaatgaatatattttgggtatcaaagatttgatttgctctttcaaaggtttgacggaggaagcttttcccgacatttaagatgtcacaaaattgtttcggacaggctttcgtactcacgggccagaaacgttttccgagaccgccggccattataacgcaatatgagttcttattcatcttatttagttatacat

SEQ ID NO: 66 - DNA, 13430 bp, Butyricimonas faecihominis
ttcgatattcatagctgatttttaatatatttgttgaataatttagagttgtgttaatgacattgctatatgaagtcgttgtttggaatggtgtattttcaaaagtttttaaacgtggtgctgttatcgaggattaccccggttgccccaaaggggatggtggccgctttttcgacgtatagcggaaatgtccttcgtgataatgaggagggaaacctacgtgtgaagttaattcatgataagaatataaatagaaagagaatattgagaacgatagtctgtattctgttgtgtttgttggggataagccgggtttcaattgcccaacaggaagataatttgttgcggcgggagtatcagatggcgatggaggagcacatgaaaaatatgattgctgcattatctatgtacagttcggatatttattacgagaaggagaacgtgttgagaacaaggcgggtaaagttgattcgattattcttccggtcggagcaagccaaaatgtacgatttcttgaagatcggggtggaaactcaggataattatctggatgtaatggagtttctaaggacaattccggtggtcttgccccgggtgacgtttaacatgagtgtagaggagatttctccgtacgtgcgtttggcaagcggggagtttaaactgcctgtgaaggttgccattacgtttgttgacctgaacactgatcaggagaaaacgatgccatcgaggatgtataacgtatactactggcaagcggaggatggtgattttgccgtttcttcaatggatttactgcgggaagaacaacagacattatcggggataactactggttttatttctggtaagacgtacaaggaatacgagaagatggcgaatgaattttacgataaaaagaattacacggaggctttgaaatattataaattgtctgccctaggtaatgacggaaatatactaaatcaattggggtacatgtatttgactggtgagggtgttgaagcggatgattcggaggcagcgaaatggttccgaaaagctgctgaggctgggaatgttacaggacagtataatctgggttggatgtatgagactggacgaggggtaacgaagaatattattttggctaaacgatggtatgaaaaagcggcagcacagaatgatggcgatgcacaaagtcggctgggggatatttattataatggagatggtattactaaagattatgctaaggctagagagtggtatctgaaagcggcaggtcagggtaacatgtacggggaatttggtataggcttgttgtatgaatttggttgcgggttgactaagaatatggataaagcagcagagtggtatctaaaagcggcgaatcgtggatatgatagggctattgagaaactcaaggtattatcggggataactactggttttacttccggtaagacgtacaaggaatacgagaagatggcggatgaattttacgataaaaggaattacacggaggctttgaaatattataaattgtctgccctgggtaatgacggaaatatactaaatcaattgggatacatgtatttgactggtgagggtgttgaagcggatgattcggaggcagcgaaatggttccgaaaagctgcagaggctgggaatgttacaggacagtataatctgggttggatgtatgagactggactaggggtaacgaagaatatcattttggctaaacgatggtatgaaaaagcggcagcacagaatgatggcgatgcacaaagtcggctgggggatatttattataatggagatggtattaccaaagattatactaaggctagagagtggtatctgaaagcggcaggtcagggtaacatgtacggggaatttggtataggcttgttgtatgaatttggttgcgggttgactaagaatatagacaaggctgcagaatggtatcgtcgagcggcgaatcgggggatggaacgggcgaagaccaaattgaaggagttgggacgataagtattgaataaaaaattagaatatatggctagattgaagtgggaatacaaggataaggtgattcgattttcagtaagtcacgaggggcaggagagtgaattttatattgatccccggttggtgacttatttgaccgaaggaaagaaaatctatgacttccaagtgtatgttcagaagggacagacggacccttacgtgtttgttgggaagttcaccgatatgacggtggaagaaggtgttcctgaaggatatgaatttaccgaatcagaccagataacagatcattgtttttgtatctgtcgggcgttgaatttaccggatccttggttaagtggagacgggtggcgtagtgaaccttgctattttgtggcaaggaaattgaacgtggaggttcctcctgttcccccggtaccacccgtgcctccgaagaatgaggatgttcccccggtgaaagatgataagccagagcctcccaaggcacccgtgaaggagccgaaaaaagagcaggatgaaaagcccgaaccgcccaaggaaccggaggtaaaaccagaagaaaaagatatggtggtatgcaaacgttgtcagacgaaacagcgtatcacgaatcagtattgtaaacattgcggggagtcattcgttcccttggagcgttgtggaaaatgtggacgagaagtgccgaaaaatgctatttattgtccattttgcggtaaaaagcgataataatgatataaaatataaagttcatgataacacttattccaaattccggtgtacagtttatcacgaaggaagtgaatctttctgatgataaattgaataagttcagaccttttgagtattacgaggagaaagatgaagaggaggaggacgaagatgtttttctgttcaaacttccctactatttatcgagaatttccagttatatagagaaggctccaagcgagtcgggaaatacggttatcaatgccgaggctatcaacgtagagacgtgggaggtcatggacgaggagaagattctggatcgggtgattcaccgtattccggaagaagagattatttctatcccggcccggaaggcattggaatgctttgagaataagtggttacctgttccgtatttattaaagacggctgccggagataaatttcatgacgggccgacagcttgggcccggatgtggttcacgaagatcggaacgctggatcatggaaagacgggggccacgcatcacgtggtgtttgcttttgacacgacggaagcggagaggcaacatcgtttcatgagcttgaaagcacagaatgcccgtacaaaccagttttttgcagtccctagggctgaaagtgatttgtaccagtattggtatggaaatgagtggattgacaattggttacggcaaattgtccccttgtccggttccgagcaggaaaaggtgttcacgcatgtgggatattatttccaactgttgaaagtactgttggggtcaaatgtatttgaagaaatagagattcccgggcagaagggaacgcaggatatagatgtagatttagtgttggatattggaaattcccgaacttgtggggtgatctttgaaacagaccacgagactcctttccagttcacgaatgcggtacctgtggcaatacgggatttgggtcaaccgaatcggttgtatcgggaaccctttgaaatgcgggtcgcttttcatgagcaagtgttcggtaaccggatagcccgtatggaggccggggaccagaatatatttaattggcccagcttggttcgggtgggcaaagaagcgttgcgttattccgtgatcttcgggcagaaatccaattcctacatgtcaagtccgaaacgttacttgtgggattcccggaaacgtccggtgagctggatggtcgttccggccaataaagaggcggattcggcatcggccttatttggtgtggctcatcatttgacggcagacggcgtgttgttggaacgtgctagagaagatttggagaaaaagggagaagggctgttgcctatcgcggcgatggaggcgaactattcgaagagttcgttgatgactttcgccatgttcgagattttattacagacactttcttatataaatagtcatgagtttcgagggaattcccgcttgaaaccgatgtacaaagattttgcccggaaattaaaacgggttgtattcacttgtcccactgccatgttggaggaggagaagaaaatattgcgggaacatgccgaggatgccgttcgtctgttaaaagattacttcccgtcttcattggttgacgaggtagaaattatcccgtcggcaaaagatattggcgtggataagaccaaacgtaaaaattggggatatgatgaggctacttgtaatcagttggctttcgtgtatggcgagatcatgcaccgtttccggggagacgcgggcctcttcttcaagtattcacaggtttggcaggattatctgaaagagaagaacgcagtacggattgccagtattgatattggtggtggtactacggacgtgatggtttgcgagtattccagagatccggatgcgcatattgtggtgctttctcctgatccgcttttctgggaagggtttaacttggcaggagatgacatcgtgaagagtatcgtggaaagggtggtgctgcccccgatcgcggaatatgcccgggaacagggatgcacgtccactttcgaatgtatgaattttctgttcggtcctcacttgggtacacaaaacgggacaatgcaacaattacagttgatgttctccacgcaggtggcttacccgatagccttgggtattctggatcatgtgcgggaaaacagaaatgcttgtttctataccttcaatgatttctacacggacaataagcatgcaaatccggtgaatcaagtgattcaatacgtgaatgacgagtttagaaatcatggggctacttcatttaacttattgaacgtgaagtggaatattgataaccgttttataaatcaggtgatcgggcaggtaattgaaaagttattaggggatgtgtgtaagaagttgaaagcatacgaatgtgattacgtgttgctttccggttgcccgacgaccttaccggttgtgaaagatttgttctataagtatttgcctgtgccgccagaacgggttatcccaatgggtaactatcgaattggagaatggtacccgttctctaataatgccgggcagattaaagacccgaagacttgcgtggccgtgggggcggcaatcgctttaatgagtggggagttgatgcgcttggataatttccggttggacatcggcaagttaaaagagaaattcgagtcaacggctaaatatatcggtatttatgacaagataaagtctcacttggcatctatttgctttgatgagaacgagaataataaacaattacgttttgatggtcccatgttgctcgggtttaagcaattcgaggcaacggagtgggttgcctctcccatgtatttactggattttgcatcgtcggaaaaagcccagatgatcaaggataagttacctttatccgtgaatatcgagcgttcggaacggaatcgggaagcgttaaagatccgggggactatttacgatcgggacgggcatgccgtgtcaccggagtacctgattttgcggttacagaccttggcagatgagcaggggtattggttggattcagggatcttctcgattaatgataacgtggacgacttatgaatgtgacaagagaaaaatccgctttgttgtccttggaaacgagaggggacgatgccgagcgtctggcagtttggttaacgacgtttctgggggaggacgtgttccgacgtctggaagagaatgaaaacttgcacgtgtccatgttggaggaaaagaaagatgtgacggggtggttaacagcaggtttaaaaacaattctgaagtcggaggacttggagttgctggttcaacgtgtggaacgggaaatacaagaattgcagaaaagattgatcgttgccgaggaaattcaggtttctaatcaggatataacggctgattgtgaacgacagaaaagggagatagaggctttggaggtgaagttggagcctttgcaaagagaggtgaacagcttgaaaaagaaagtggctgcatccgtgggaattgatgtcgtggtggatgccgttttctccggagaagccgtggagattcagaccataaatcagctgttgaaagaggatataaagaatccttccgaggctttgtctgccttttgcgtggcgctggcaaagacttggggaattttagcgcgagctttgcagaaagagggtgaggaggaagagaaaatggaaattttgcatgccgccttgacacgtgtgttggaggccttaacgggactttatattccccagcgacgggccgtgttggagcagctggctaaattgtgtaattcgagggtttcggattacctgtttatttcaccggaagagagtaaagaaattgatttaaggattcacaacgccgcatctatcgggggaaaccagatactggaagggcgaacgtttgccgtggtaaaccgttcttcctaccagacagtgaaatacgcggaaatcgaggtttgttaacaatatagaaagatataggatatgaaagatatagttgctaaatgccagatcgttggacgaggaataagttctgccctccggtggatggaagagtttgcatccgaagaaaagcagcgagcctcccttgctaaactgaaaaagttaaaccgggagattaagaagttggaacgggcaacacatttaaagccggccgtggctttgttcggtcccagtcaggcgggtaagtcttttatggtggggctgttggcaaagagttccagcgatgaagtgatgtacgtggcggacgatgcgaccgggaaaatgtatgattttacagatcagatcaatcctcccggcggaaaagaatctaccggactagttactcgattcaccgtggagcgacacgtgggacaaccggcggataagccgattatggtgaaattgttcagtcaggtggatttggtgaagattattgccgtgggatttcataaaaatattatagaacccgcaacttgcccgagagagcaattgctgggagaggtggaaaaggtgttggctgatttgaggggagagatgcgggagacgccttatccggagatcgacgaagaccagatcatgggtatcaaggagtatttatccatgaagttaggcgataaatatatcattcgcacgttggacgagatgtctttctgggaaagggcggctgagatattgccatacgtgtcttgggataaacggtatgaattgttgcagttcgtgtggggtaagcatgacttcttcaatgatttgtttattttgttgagccggggattgagtacgttgaattttgccaatatggcttatgtcggttttgacgctttggttccgagagaagtttctatcatcgacgtgagtcgttactccgagatcaaggagagtgaagaggaatggtgccggaagaatgcccggacgggagtgcgaaccaaatcactggaagtttctgccggtggtaagttggcgaatatagatcggacgatattgagcgcgcttatttccgaattggtgttgacattacccacgaacgtgttggaagatcatagtcgtgattttctgaagaatgcagatatattggatttcccgggagaacgctcggctgatatgttcaaagagagagatttcgtcgtgaagggatttgaggatcagttgaaagtgtttttgcgggggcgggtgtcttacctgtttgattattatagtttaaactttggtatcagttccttgtgcttggttctgggagatggtaatcacgaggtggcacagttgccgcatttgattctggagtggattcatggaatacatggggaaagtccggaggctcgtgcccgtaaagagagcgatacgaagatgttgaccggacaggattacgctaatccgttgtttgttatcctttctaagttcaacacggcatttgataagggaaatgccatgaaaaaagaggggtattacagtatatggaatggccgttttgatgataatttcagtcaggcctacacgaagcagatgacagacgtatggaccaaaaaatggacggataaggattcattcaagaatgttttcattttgagaaatccaatgttctctaaagcttattttaagaaccggggaggggaaacccacgtgtgggaagagggattaaaggatgagttcgaagttatgatgagttatatgagggagtccttcgtgaccgacgagaatgtacgttctttggtggataagccggaggcttgttgggatgatatgattcagccgaatcatagtggcattgattatatgatgccctacctgaccccggtaacagatccccgtatcaagaaaaaacaaatagaggatgccgtggaacaggtgcgtaagatcgtgctgaatgaattggaacagtattacgtggggggaaatattgaagtggagttgagtaaggcgaaaaagaatgctttacagactaacctactgattggcaagatgatctccgagcagcgaacagggaaatttattaccgctttgtcttgtccggattatgtggcgagaagagtgtaccaagagttcgtgaacgggcagttcgcggtacagaaagaggtgaatcaagtaaacgtgtcggataaccaagtattggtagatttactggatagttacggtattcaagttgtccccgggaaaactcgttacgaggaaattatttcacagttaaagacggttacggatattgatgatgaaaaaatgttgctggaggtgatcggagaggcaggcattgatgaggctgatttacatgctttggctttctacgatcggacaaaagagaatgatccggtgtaccagtttgtaaatcgtctggtaggggagtggttgaggcatatagacagtatggacagttctcgtttgaaggaggagttttgtattgtgaacccggtggcctttgtacaggttgtgggggtgctgaaagataattatgaacgggtagggttgaaagagcgtttagtggatgctcttcggagccaagtggagagttatgatgtatctcggaatcagaatttcgagttggtaactcgtatcgcctcttccgttataaatcaattcgtgttctctttgggatggatatgggttcctgtatcagaacgtccggttcagaaatcatccggtacaccgatatttactccgggggaggaaggaatggatattgcccagagctggcgaaccggtttggtggaatcgttcgtggccaatgtttacttcaagagtaaagtagataataaatcgaatttgaagtcgatgtctaaactaggtgagattattcattcgatacaggaagattaagggtatgaaaagtcgtgagttgtttaagataaaattagagaattatcgtcctctactgtggtatggtgatacggttttcggccgatatgcgtcaattaagaatttgctaggttctcaattcgggcgagagtttgcaaacgtgctggcagaaccttccgtgatggatggtgaaaatggagttcgatacggggtttggtatgccgagaacgtggaggaataccgatcttttgataaactcgggccggaggaacaagagcaggctgccaatcaactctctgggattttggaaaaagtgacagcattcgcagatcagttattgcaaagcggggagacttcccacaagcagatgggcgagattctgcatctggccttccgagtcccgggatatgaatctatttattggggtaacgggcaagtgatcttggttttatggggatttgtttctgatgagttaagcaagaaaagttttagcttgcgggatgcattgagtcgattccgtccccaagtgacacccccggaacctccgacgaaggtgacgcctccgcctgtgccggaaatcggaactactggtatcacgggagacgtgaaagaacctgttgttactccaccgcctattcccgaaaagaataaggagataaacaaaaacgtggaggaacatgaaaaggatataaagataacggatgaaacaaccacggttacgaaggatgtaaaggtaaagaaagcgtctcgctggagattttggtggggaaaatggtggaaacgtttattgtggattttactagccttattactcctgttattattgtttttcctgttgaataactctcgttgcggaggttcaacaggccgggatgagaccactcatatttcaacgaatccggtaccgggacgtgaccaagatcgttcgggcgaccgagatcggcagaatccggtgccgcctgtccgaagggaacagattccggagacgccccttcctattaatagagacgatgtacgtcccatgccgggagatacattgcagcgtcctatcgtgggtaatcgcttgaatgttattattaaccgggacaatacgatagaagagtttctggaagatttcaatgcaaggtatgcggatcaagctcaagtcgtgtattgcgacacgctggcgaacttgctgcaagtacaattcgccacggatgacattgttgtctggaaagaaagactgcaaaagttgacgggagtccggatggttttcacggaaggcgtctttggtgcggaagtaataccggatgagccgggttttaaggatgcggatgagtcttattattttaaactcatccgggcttttcaaggatgggatgtgacgatgggaagggaggatgttgttgtcgcggtcattgacaacgctttcgatttggaacacgaagagttgaaaggtcaatgtgtcaatccttggaatattatgactaattcgccggatgtgaacacgtatgggggaacacagcgtcatgggacccacgtggcctcgttggttgttggagccataaatggagtgggggtttccggaatagccccgggatgtaaagtaatgccgatacaggtgggagttgaggacgggagtatgccgacgtcagccatcatcaaaggtttcttgtacgccttaaaacaaggggtacaggttataagtatttccatcggaagtaatcctcgggaaggaacggaccagctgccgtgggatgtgcaggaacagatcgggcaaactactttcgttgaagagggaatgttctggaatgaattatatgtctatgcagaggaatgtggcgtgttggtggtggaatgtgcaggaaatgaaaacatattgaccgtcgttgacccgatgaaacgttccgataaagttttatatgtaggagctgtcggagtaaatgccgagccagcttggttctcgaattttgggaaatatgtatccatttgcgcccccggtatgagtatctataatgccatcccggataataagtatgattttttacaaggaacgagtatgtcaactcccattgttgccggagcggcagctttgctgttttcacttggggatgatgtcaagtttacggacgttaaggaggctttagtgaagacagccatacctttgccggggaacggggtacgtaagcaaatcggaaacttgttgcaagtagataaagcgatggcctatcttcagaagaataatcccttgctcgcggatccatgtactcgtaaaatagacagtttagaacgggagatcgagcgtttgaaaaaacaattaaatcaacactgatgctactactgaggacaaccggattggagcatgttgttcctattgtcagggacaatctggaattgatagctttgtaccgtcaaataaagagtaatctaggaaggaatgaggaatatcgtatttttgcggaacccagtattgaccgttttaagaaacaaattagctggtacacggaatacgaggaagagttttctcctttgcgggttgtttttgcgtcctgttctccacaagttcaggacgaaataaaatccgctctaaaagagaagattgatgccgtgctggcccattttaatccggatcatggggtgaagaatcccgattacgtggcattttatcaattattgttgcaatgtatcgagatcccctcgctggaagattgcgtgtacatgagtcgcttgtcggatggtacgttacatttcgtgctaacggaatgggggttcttgagcaacacgtcaaatgcagaaatggggattatccagaagataaggcccttgaggaatgtcatgatcgattgcatttatacggatggaactccggcaagccaagttttactgcatttcaagcaaggagaacgtacttggaaagcgatgactgacgggaatggaaaatgtaatttttctttgcctgtcgggacttctttcgaggcttatgacgtgcgggaagaagcgaaacaacgtttcttgaaggggtttaacgtgttggatcatgcgaaataccagttggttttggaggcagaggataagccaatgcctcctccggttcccccggttccgcccaaacaaggaaccccgcctccggtacccccgttgggtgtgaaacaaccagcagaggctccgtttccgcataaccggaagacggtgcatgtaattaatcatttgaacgaggtgctgacaggagttcccgtgcatgtttggggggaaggaattaatctccggacaacaacggatgagaatggtaatttctatctgcatgatgtctggggaactaaaaaagtgaaaatgaagatcggtgatgctcccgggaaattaaagatcgtgccggatgcagactattatcaaatgacggtttatcccaagaaaaaaagaccttggtggctttggttgttgggtatattgttattacttctattattatggctgttgcgggattgcagttgttcgtgtcagcgaccgacaggtgtccctgttttaccggattctactgttacgcaccgggagactgttccggttccaccggattcattggcggaacctccccgagataccgtgttgcggggtgaaagaggttctttgagaataaatttgcagtggggtagcacggatgatttggatttgctcgtgattaatccctgttcggatacgatctattacaagcgtaaacgacaggtttgtggcggttgtacaggaactttggatgtagatgcaaatgcaaaaccggaaatggctatagcgaatcctcaggaaaatatattctttgacgagttgccccggggagaaattcaagtgggggtgcagatgtataataaacgggtatcgaacacttgtccgtttagaataacaattcaagctcataattttgagcaagtgatagatactgtacttgtttttgatagattaagggaaaatatgattatttttaccaagaaatttgattgatgtatataga

SEQ ID NO: 67 - DNA, 13416 bp, Butyricimonas faecihominis
ttgttaatgttataggttgaaatgttttttcattttgtccagatgaaacttttggataagagtttcggtatatactttgtaaaattgaaggcagaaaggagaaaatgagactatgaacatgaacaattatacaattaagtcgcaagaggccgtgcagtcagccgtgcaacttgcgcaggaaaaaggtcagcaagccatcgaaacaggtcatctgttgagaggcgtgatcgagaaaggtgaaaatatcacgaactttatttttaacaagttgggtgtaaatagccggaatgtcttggctgctttggatcgaatcgtggacggatacccgaaagtgtcgggaggttctccctatttgtccgacgaggctaataaagtgttggagaaagccacgaagttggcgggagagatgggtgaccagtatgtttctttggaacatattttattgggattattatcagtgaaggatccggtttccggtatgttgaaggatgcgggaatgaccgagaaggaaacccgagcggcgattgacgagttgcggaaggggtcgaaagtaaattctcagtcggcagaagataattatgatgcgctggggaggtatgccatcaatttgaatgaaagagcccggaacggtaagctggatcctgtaatcggacgagatgatgaaatccgtcgggtattacagatattgtcccggagaacaaaaaataacccgatcttaatcggtgagccgggtgttggtaaaacggctattgccgagggattggcacagcgtatcgtgaacggggatgtgccttcaaatttggcatccaagagtatttactcgctggatatgggagccttgattgcgggggcaaagtataaaggagaattcgaggaacgtttgaaatcggttgtgaacgaggtgttgtcttcggaaggagaaattatcctgtttattgatgagattcataccttggtaggagccggaaagtctgacggagcaatggatgcggcgaatatattgaaacccgctttggctcgtggagatttgagggctatcggtgcgaccacgttgaacgagtaccagaaatattttgaacaggataaagccttggagcgtcgtttccagaaggtgatgattgacgaaccggacgtgatgagtgcgatcagtatcatgcggggattgaaggagcgttacgagaatcaccataaggtacggatcacggatgatgcaatcattgcatccgtggagttgtcccacaggtatatttccgatcgttttttgccggataaagctatcgacttggtggatgaggcggctgcccgtctgcgtttggagatgaattccgtgccggaggagattgatgaactagaccgtaagatcaaacagttggaaatcgagaaagaggcgatcaagcgggaagggaaaagcaagaaactggacgagatccagaaagatttggccgatttgaatcaagagcgtacgaaattgcgagcccaatgggagtctgagcgttctttgattgacgagatccagaagaataaggatgcgatcgaacagtaccgtttcgaggcagaccgggccgagcgggaaggcgattacggaaaagttgccgagattcgttacggtaagattaaggaggccgagcgtcgtattgaagaggtgaaggccaagctggcggatatgaagcatggagagtcgttgattcgggaagaggtgacggaagatgatatcgcggcagtcgtgtccaagtggacgggtattccggtgagccggatgatgcagagcgagcgtcagaagttattacacttggaagacgagttgcacaaacgggtagtcggtcaggaaatggccattacggcactggcagatgccgttcgtcgtaaccgtgcaggattgcaggatgcgaaacgtcccatcggttcgtttatctttctcggaaccacgggtgtcggtaaaaccgagttggcgaaggcattggcagagttcctgtttgacgatgaatctttgatgacccgtattgatatgtccgagtaccaagagcgtcattctgtttcccggttgatcggggcgcctccggggtacgtgggatatgatgaaggtggtcagttgacggaggctgttcgtcggaaaccttattccgtggttttgctggacgagatcgagaaagctcatcccgacgtgttcaacatcttgttgcaagtgctggatgacgggcgtttaactgataataaaggtcgggtagtcgatttcaaaaatacgattatcatcatgacttcgaatatcggtgcgcatatcattcaggaacgtttgaaaggcatcgatgagaataaccgggatgaggtacttgacaagacgaatcacgaggtgtacgagatgttgaaacagacgattcgcccggagttcttgaaccgtatcgacgagatcatcatgtttgccccgttgaagaagtcggaaatcgtggatattgtacgtttgcaattcaatggcgtaaagaagatgttggaaaacaatggtattgccatcgagattaccgacaaggcagttcaatggttggcagatgccgggtatgatccgcagtttggcgctcgtcccgtaaaaagggttattcaacgtacattgttaaatgatttgtcaaaacagattcttgcagaggaagtctccaaagatagccgtatcgtggtagacgtgaaggatgataagatcgtttttgaaaataaataaggattcttaaaatcatatggagtaggtcgtttcaaagaagaaacggcctacttttttgtatgacggtaatatctcgataattttgattcttgacgagaatgtctatctttgcatgaatcataattgtcgatttagatttttgtatggtatatagtgaatcggagattgtacatgcgttagaggcaggaaatgaaatttgtctgaatatgctttttgataattattatcgggcattgtgcgtgtatgcttttcggtttgtttctgatgcagatgatgtagaggatattgtgcaggaggtgtttgtttctttctggatgaataaaaagcgaacagttttttccggttccgttcgttcttatcttttcggggcggtagccaaggccgcctctaagtttgctacacggcggggaagggttatgtttgatgacgtggagaaatatgtggatcagtttttagaagaactgggagaatatgatgaggacgagttcgcttgtttgcgtgataaagtatatgcccgggtggaggctttaccggaaaggacaaaagaaatatttaaagccgtggtgttgaataatttgacttaccaacaagtgggtgaacggtttggaataaccgtgaatactgtgaaaacgttgtattatagggcattgaagcagttaaaagaagagctgggtggaaacgctttggtgttgttttttattattctgcgataaatttttacaccttcattttgttaaaattatttttcctgcaatttttcctaaaaaagttgtcatctctttttcaatcttccggtatataaaagaaaagagatcgagatgaacgataaaatttggcagaggattggtgattattgctccggacttttggataagagtgaggaacgggagttgcgtgcgtggatggacgaggcggaggaaaacaaacaactttttatggagggggtgaaaatggtgcgtgagtatcaaatggttgcttgttcgggtagggatgcctcggattcattgaaacgtgtacgggaaaagatcaaggttcgcaggagaagacaattatggattcaggttgcagccgtggcttctgttgtgatcctgttcgccttgtcatttgtattcttttatgtcccggaatcacaggagttatctcccgtgttggctaaggtgcaggcagggggaacgaaagcaactctaaccgtggctgatggaatacaagttgatttgactcaagataatttgcaagaagtgatcgagcagtatggggttactgttttgagagataaaaagaatgaattgcgatatgataatgtggaggtgaatgacgagatagaagaaaaaccggtatatcacacgatctcttccccagttggaggggaataccatttcacgctggcagacggtacgatggtatggttgaattcatcttcacgactaacattccccactcgttttacgggagatacgcgagaggttcttgttgagggtgaagtgtattttgaagtgcaacctgacgaaaataagccttttatcgtgcgggtaaatgatgtgagcgtgcgagtgttgggaacgaagttctgtatttcggcttatcccgaaaatgagggaattatgacaactttggtacagggggccgtgcaagtaacctccggagataatcaggtggtattaaaaccgggatatcaggccgtggtagatcaacgttccggggcaatcagccagagggccgtggaactttctttgtacacctcgtgggtacggggagtatttgaatacgagaacatggaattgaatgatattgtggtacaattagcccggtggtatgatgttcaattctcattctcggctcctgaatataaagagcgtcgttttaccggcgtggtgcggaaatatgaagatttgaatgacgtgttagatatgatagaaaaaacaactaacgtaaaatttattattaatggaagaaatgttacaataacctcagtgatgaaatagaagaaacacgaaaacgggaaatgttcccagcattccccgttccatgttgaaaatttaatggcggccttcggcaaaaggctacgtttattaatcaaagtatccaaatgtatgaaaaaaagacgaaattctacacaatcctcgcctgaaaatgcgaggggaaaaatttatttagcgatgagattaactttgtttttaaccctgtttttctcttttacggcaatagccagtgtatcgtcacaatccgtgacgttgaaattagagaatgcaagtctcagagagaccattaaggaattgaaaagtcagactggggtttatttcgtgtttaatgaagaagagatcgcaaatttgaacgtgaaactcaatatggttctgacgaatgaacctttcgagaaggcgttggatcgaattttcgaaggactaccttttacctatgagtatgcggagggagtggtaattgtcaaaccgacaccgcaaaagaaggatgatgttaaactaaaattgattaaggggaaagtagttgatacagatgggatgcctcttcctggggtttccgttgttgtggaaggaacaactcgcggggtagcttcagatgtgaacggtctattccaaatgatgattgaaaataaggtcggacaaaaattacttttctcttttgtggggatggagcaaaaagtaattacttggcaaggacaggattctttgaatgtagttatgacgtattcttctgtagatgtggatgaggttgttgtgactgggtatcagacattaaaccggagggagtctgccagtgcagtttcagtagtgaagaccgatgatatttatatggcgggagttgcttctgtagatcaaatgttgcaaggacaaattcctggtttaatggtgataaatacttctggagagccgagtgctacgcctaaaatacgtatccggggaacttcaacgattaacggaaataaagctccggtatgggtggttgatggggtaatactggaacaagatgttccaattacagcttcggagttgaatagcgaagatgccgagtatttagtaggaaatgctatttcgggaattagtccgcaggatatagagtctatcacggttttaaaagacgcttcggccacagcgatttatggggtaaaggctgcgaacggggtgattgtgttgacaacgaaaaaaggggctgtcggaaaaccgaaagtttcgtatcatggtgaagtggtaataaatgaacgtccttcttatcgaaattttgatcgtatgaattctgcggaacgtatgcagttgtccaaggatattttcgagcaaggattatcatatagttcaaatatatcgttggatccggatgattcttacgaaggattgttgaatgagttagttaatcgccggatgtcaaaagaggagtttgctcttcggtcaaaagaaatggctaatcgtaatacggattggtttgatgtattattccgtaatgctgtaacccatactcataatttgagtattaacggtgggtcagagactacaaaatattacttctcagcaggttataataataatcaaggcggggcaaaaggttctgttagcgagcgttttacaacgttggctcgtgtggatgcatctgtcggaaagtatattaattttatggcgaaaattgatttcagcacaacgaagaatgaaggttattctgtcgtgaatccttttagttatgcttataatacttctagaacgctacaaccatacgagaaagacgggaaatatcatttttacaagaaggattcaaaatacctatataacgtgttgaacgagttggcagaaacaggtaaggaaagtaagtcgaatgattttaacgccctattaaatttgaatataaagttatatgatgggttgtcttatcaaggaactttctcgtatcataattcttcaacggatcagcgggattggcagacggaagagtccgctagtgttgcttctattcgtggatatgattacaaacaatatgacgagaatgatgatgaatattggaagtcgtccttgccatatggaggtattttgacacaggggaatacggtgaaaacggggtatacggtgagaaatggtttgagttttgttaaagttttggcagatgttcatgatatgaatataattgtcggttctgagttgcgaggtacgaagtacgagggagtacgttcaactggatatggttggacacctacttatggggagcggtttatgccagtacatacggatagttttgtgaacaattatatcgataaaatgcttccggcaaacacgaatacgatttcgagagttgcttcgttttttggttcggctacatatacttacaataatcgttacgtgatgaatttcaatatccgctccgatggagccaataagttcgggagtaatccgaaatatcggtggttacccacgtggtctattgcgggtaaatggttgttgacgaatgaaggttttatgtctcgattttccgataacggacattatatttctgtaagaggtagttacggtattcagggaaatattcatgatgatgctactcctaatttgatcttggaagtaggagataggaatacaacaagtaacttggaccagtcaacgatatatcgtttgcctaatcctgatttgcggtgggaaaaaacgacttcttggaacgttgcagcagacttttctttctgggatggaaggctttctggtagtttggatgtatataaaaaacataccgaggatttgatcatggaaaaaacagtagcgacatctaacggaaaatcacgtttgtacatgaatgccggtgaaatggataatcaggggtttgaaggtaatttgagtgtggagattattcaagggaaaaagttaaattggagatttaatgtgaatttcgggagaaacacgagtgaggtgactttggcaaacgatgaattatacagcgatttggaggtcattaataaaatgttggagggtaatttagcgattgaaggcgagaagttggggtcaatgtactctttccgttatgggggattatctagtgaaaacggatatccgttattctacgggaaagatggcaaattgtggcatacggctgatccgaaacgtatggagctggtgaaaagcggatctatttatccggatctttccggaggatttgatacacaattgacttttgatagacgtttatcgctatctttaggtttcacctataatttgggtggtgtgaaacgtttaccgaaagtgtatgccgataaaaattctgcattgaatccggtagctaatgtatctacgaattggaagaaaagatggagaaagcctggggatgaaaaacatacggatatacctgttttgtataatgatagagtggcttcggagtttgatcgtaacgtttcggccgaggatcggggggctgttgaagagtgtacctatttttatgatttgtctgatctccgtgtggcgaaagctgattttttacgtttgcgttctgtaggtttaagttatatcatgcctgagaaattattgaagggggttggaatttcttccatgatgattcgtttccaggcgtcgaatttgttcgtgtgggcgcataaggattggaagggacttgatccggagactccagaagcgaacattccgatattaccttcttatagtttgggtgttaatgtttcattttaataggaagtagttatgaaaagatttgtaaagatatatacctattggcttttaggaatgcttttgttcaccgggtgtgatgattatttgaaagaggattcgggcgatttgttgatccccgggaaggtggatgagtttttaccgatgctatataaagagggtttccctcaaaattttaatgaggaagttgcttggttatatttgatgactgatgatgtggagatggggcaactggaattggatccggatgatgagagttatgaaactcgggataaaaattctttggatgctttgagtgcgggagaaggtgaggagccttacaagtgggaaagagagataaaaagttatgccgataatttttgggagcgtcgttacgggaatattttggcttgtaatttagtcatagatgcgttaccggaaatgaagtacgtggaggcggattcaggggtttataatttccttgcggcacaagcttatgctctacgtgcttactattattggtgtttagtgaattcatacgctttaccctggtcgaaagaaaatctagacaagccgggagtgattatccgtacggagcctcaaattgatatatctgcgagaggacgttcgtctatccgggatgtgtatgatttgattaatggagatattgaggaagcggaaaaatatatcaaagtggccacctttgacgggaatatacatcggctttcggaaccggcgattttattgttagcttctcgtattgcattattccaagaaaattgggacgaggtcattcggaccggtgaattgtttttagcacagaattccgttattttgaatttgaatgatcaggacacgacattatttgggacggagaaagggcttaataataagatatttactatgatggatgggactataaataaagaagtcgtttttacgttcgggacttctagttataccccgtatgattatttatcgacttcgggtactttttatggattgggtttcagaccttcccatagtacggacgagtctttgattcgttcttatgaagagggggatttacggaaaaaagcttatttcttgaaggatgtcccggctaaaaaggcagagagtatctgggaagaagataaaccttatgagtataaatattattatccgataaaatatcgtcaaatgtcgggttcaacttctacgaagccgagtgaaaatcttctccatgagaattggcggagcgtggaagtaatgttaaatttagcagaggcatatacgcgtaagaataatgaggtgactagtgatgcgcttgatttattgaatgatctacggcgttgtcgtttggattcggaggcgtatgtggaaaaaacgtcagcagatttttcggatgcccaagctttgttgaaatttatttgggaagagcgacgtcgggaactttgtttcgaggaggctatgcgtttttgggatttgcggagacagggtatgccggaattgaaacataaatggtattcaagttgggatacatacgaaacctatactttgccgcaaggaagtaaaaattacgtactttcaattcctcggagtgagcttgattataacaatggatgttatgataatgaacgtgatttgattcggcccgagtagtgatattaaaaatttatgaagtatgaaaaagattgcaatatatttaataatgatcctgtttttaggagtttcctgctccgaggatgtgaaggtggatcccgaattggcgggtccgttatatggtttgacgaaaggagaaccgggttctgtggatgagttgatctataatacttgggaagagtggggtatgtattatttatataaatttgaaccgtatgcttttcaagtaacgaattggagtggttattttaataaatggtatactccggtaaaggaagagaacacggaagtaattcggaaaattatagaccatatacagggtggtatattcgtggggttggataaagatttggtgcaggggagttggttcgtgcgtacgtttttgtgtgattcgctttgtgatgattacgattataatccagaggagttggttgctacctatttagagaatggtgattgcattattcttgccggggtcggagataaaatgaataattttacggatgaagattgggataattggaaggcggagttgtcgagtttgttgatttcacgtttgtatttgggagcaacggagaaacctactgatttttttaacttgcgtatgaaggatgctagtggtaaggaagtgaagtggatattagcaccttggcttgaggatcctgcaggtaaatattcacccaatgtgtacacattccgttcaaatggttatgttcgttcgaaaccgaattcttttcaaagtgagacagtgaatattgttgataaccagatggatttagcagattacatttctttcttgacaaccaccacaaagactgaattgaattataattttaaagtatttccccggatgttggagagagctgttgctttgattccttatctacagcaagtattatcgatggatttggaagcgatgcaaaatgcaaattgtccaggggatccggttgagcccgattattttaagagtctaaaagaatgatttgtctgtataatgtagaaggtatgttgagaaagacaatcatgatattggtttgtgtcggatgttgcgtggcagcatcggcacaaacagacttagaaagtttggaaaaggaatatgaagccaacaagcgggacatcaaagttgtgaaagaatacgtggaggctttggaggaagcgaataaaggaaaagaggccgagcgggtggcaaaggagtatatgtctcgatgtccggtgttgcaggtggaagataaggaaacctatttgttgttaaataaatatgtattcacagatccttattccaatgttttcgagtatggtatttatgccatgaaaaaaatgaagtgggaccggggagaaaatcccgctcaggaagataagacagcacgtttgaagaggcttcttaaaagtttgggaaatggggttagtggtgacaatgagattgataagagatacgaggtgttgatgatattgagccggaatttgaataaagaaattgataaacaatgtgatccttatttgaaggataaacagtatgttctgccattgtacgattcgttgaagttggaacgattgacgtatttgataaataaagggcaattattggggcaggatggaatgcgcttaaagttggctgttaataaagctttgcatgtgggggataacgcacaggtaatcagagatttggaagtggctacaaatttaaatatgactgatatacgaggtaattatattgtagcaattttgactatactttcagaaaggactttagatagagaattaatagataatattttgtcattcgtgttgagactgagagatcaagaagagggcacgggcggttcaaccaattattataacttgttaggtcgtttgtgcgctcttgtgggtgacaaagataatgctgataaatataaaaagataggagatgcgatagaagcggagcgaatggaacggtataaggatttgtttgaagcaactcggtctaattaatctggaaatatgatgaagaaacagatagttgtaatgtttgtcgtatggctgtttacggcttgtaatttattggatgtgaatgctcggcaggttcgagactatgtggtccttacctcgaaggagatgcaatccgacaaggcgtggatgaaagtggtcgaagtcttgtccaaaagacataaagcagccgtattgtattataatgagaaaccgcgtgaattattggaagagttacgacgtttggcgccccgttatatggccgtggtggaaaaaccggaaaacctcaatcgtgaattcgttatggaaggacatcgtttgagtcgggaaatagatgatgatatttatgcggattacttgtgggggattatcacggggtattcagctgcggacgctatgcgtatggtagaaagcagtgccaagccttttgtaattcatactgcgttgaacacgacggcagaattgagtgatgggaaatattttgatcgtttcgcttttatgaacgacgggggtactcccggtggctggggagaaaagactacccgtgatggagaagtaaagagtgaacagatcaataaatgggagattcttaataaatgggtagaaaaatacaaagaaattgatcctgatttgctggtaacatcttcacatgcgacagagaaaaatcttgaaatgccgtttaccgttggcgacttgaaaccacggggaggacggttatatgccgattttatgactcccgagtttttgaacgggacggctcatcctagagtttattttgcggcgggtaactgtttgattggaaatatcgataatgacccggagagtatggccgttgcttggttgagcggaatgaatgcgacgtccatgatcgggtatgtcgttacaacttggtatggtcggaatggttgggggggactaaaatattgggttgccaatgccgggcggttgaccttggctcaagctgtttacctgaaccagcaagatatgttgaggactgaaaacgagtggcatccgaagatgttgactgtaaattatcctttttcggaaatagagtttgggcaaagggaaatgtttgaaaaacaattcaagacggtgacgggtctgaagccgacgaaagatcagatgggatttgtacatgaccgggatgttgttgttttgtatggagatccggcttgggatgtgaaaatgcaaaatcctaaaccattaggttatgaggttggttttaaggttaaagggaaacaatgtttcgtgacgattacgactaatgaatattttgacgggggattgatgaagggggaaaagctgaaacaagaacacgtggcggatataccgtttgcctattacttcccgaaacgagtgaataatccgcgtttggcaaagggacaggaatgggaagttgctgtagctgaagattttttattgttgtatgattgtgatttcgagaaaaataaacaatatacaatagtattggac

SEQ ID NO: 68 - DNA, 13400 bp, Butyricimonas faecihominis
cgtctaggaataagaaaagtaaataacaaaaaacatataaacatgtcaaaagagaaacagaaacgtgcggatggctttgaacaaattgaagaagccacgatttcgaccgaacaatttatcgagaaaaatcaaaaattattggtaagaggtgtactcgttattatcatcgtggtaggtgcaatcttgggatattacagattctacaaagccccgatggaacaagaagcgctgaaacaaatgtttgttgccgagaatctttttgaaaaagattccttcaatatggctcttaacggtgatggaaacgctcccggttttttggagatcattgacaaatacagctctactcccagcggaaacttagctaactattacgcgggaatctgctatttacacttgggagacaaccaaaatgccatcaaacacttggaaaaattttcttctgatgatgtaattttctccagtatggtaacggcaaatttgggtgacgcttatatgcagttaggcgatttcaaaaaagcttccagctattatcaaaaagcaactaccggaacgaccaatatggctacaaccccggtgatcatgatgaaagccggacttgctttcgaaaaagcaaacgactacaaaagtgcgttgaacatgtacgaaagattggaaaaagaattccccgcttcatacgaagcccgtgacatcgaaaagtacatcactcgtgccaaattgaacatgaaataagaattctgaattactgatataaagctatcctatgaaggatagctttttttatgtccatttcttatttcccaaccgattttccgctttcccatatttcaagtaactcgcatatatattactggtaagttgcaccggtgtctcgttaatatatcaatcaaacatcagtaaaaacacgacaaagaatcaactgtaaacatcgataacctttcgttaacctttcgttgacctatcgttaacctcttaccgaaactatagtgagactatagcgaaagtacggagcatcacaggaacatttccgacaaactttcaggtaaaaaaataaccccgcctcaacgagacggggtcaccattatatggtcttaattacttttcgaacaatttgccgaaatcgtccatggatatttcttgttcttccagtttcacgccctccttaataacactgaaaatcttattttccaatgcacggtcgtaaagactggcacgttgtttctcattctcaagcaaacgaacggcaaaaccatccaattgctcgtcagataaaccgtacaatccgtattgttgtaattgagcagcggcaacttcacgcccaacagccttcatgtcttcgtcttcaacttttatgctattttccttgatcatatcccccttgatcaactgccatttgaattcatcccggtaagaatcgaaatctttatcgacagcctcttgggtcaattctttattggtagccaacatccagcgtttcaagaatgtctccggaagaaccacatcctcgtttttcttcaacatcttgtcacgagcgtctaccgtcaaacggtactcgctatgagctttgaactgtttagccaagtcttctttcacgcgggcacggaacccctcaacgctcttcacattaccttccccgtaaactttatcaaataaagcctgatttacttctgcctcaacgtaacgtttgatctcgctgatgataaaacagaaatcagaagtaatatgctcggcttcttccttgcttacttgtaacaaagcggcataatccgttttattcggataagcttttgacggattgaaaatcacctcgtttccagcctgcttaccggtaaagattttcacctgctcttcatccttcatgtgttcaacagataaagaggcatcctcaacatgaattccaccttctttcggttttccatcttctcccaactcgatcaactcacccttcacgtattctgatccctcaatcgtgtcaaccggggtcaattcgccattactcttgcagatgctttcaatctgtttgtctatcatttcatcatccaccttgatgatgtaataaggaactttctctcttttgcttaacttcacgttcatcgcgggagacaaagcaatatcataaacgaactcgaaactttcctcgtccagattcaactctttctgttccgtctcactcggaagtggttcacccaagatattcaaatcgttctcttggatataattagacaaactctctccgatcaacttgttgatctcctcaatcaaaacggctttaccgtacattttcttgataatcccgaaaggggtctttcctttccggaaaccatcaatcaccgctctcttctggtaatctttcaacgcgtcgctcacgcgagttgcgtaatcatccttatccaattgaatcttaatggttgcattaagatcgtcgatttggttctttgttacattcatacttctctatgataatacaataattgataaaacaaacaaaaaggccacctcattgtaaggcggccatctcttcaagtgcgggcgaagggactcgaacccccacgccttgcggcactagatcctaagtctagtgcgtctaccagtttcgccacgcccgcttgctattttgacggtgcaaatatattgctttttcgtgaaaagcaaaacgatttgaccgtttttttattttttcctgcgtaattcaaagttttttcccagataaacccttctaacttccggatcattagccaaatcctccgcagagccggattgtaaaatccgcccgtcatacaacaaataagcccgatcggtgatacataatgtctcctgcacgttgtgatccgtgatcaaaatcccgatatttttctccttcaacttgatcacgatactctggatatcctccacggcaatcgggtccacaccggcaaaaggttcgtccaacaggataaacttcggggcaatcgacaaagcccgcgcaatctccgtacgccgacgctcacctcccgataattgaattcccttgctcttgcgaatatgctgtaaaccgaactcatccaacatctcctccaagcggtgacgctggtaatccttcggtaaattactcatctccaaaacggccttaatattatcctccacactcaactgccggaacacggaagcttcctgggcaagataccccactccaagctgggctcgacgatacacgggttccgtcgtgatctccgtgtcatccaagaaaatacgtcccccattcggtttaatcaatcccactatcatataaaatgacgtggtctttcctgccccgttcggtcccaataacccgacgatctccccttgttccacgttcacggaaactccttttaccaccgtacggctcttgtatttttttactaagtcctcagctcttaatttcatatcttactattttaccgcgctaagatagtcttttacaattgaaaattgaaaattgaaaattgaaaaatatcagaaatttagatgtaacgagaaattgatagcgaaattatccacatcctgccccgaacgatccccgcgatgcgttaaccgccagatagcatccacccggataaaacgaaaaatattctcaataccgactccagcttctatataaggtttcgacacggaagacatcccctccgggaaccggaaaatagcatccgtgttaggcagactaccgttattcttatccgacaacgtaccccacaaagccttcacggttgccacctctcgccatttcagccgtttcatcaacggaatcttgctcaagaaaaatcctttaaaatgatgctcccagaacacggctccccatagatcggatgcgaactcgtagaaattcatacaagagaaagcgtaaggatcataaaaataggtggcattcccctcgtgtaacttcaacaacggataaggaaccttgttaaatatctttcccccggataacataatatcactgtaccctaacggggcaatattaaaatcatgtttcacggacaattccagacggtaatactcgtaatccccgttcaatatatctttcaaccctgctaccaaatcaattcctacgatcgggaaatccgaccccatggaaactttatcaaaggtctgccgcacgacaatctcatttctggacaaacgcgttcctaaacggaactgagtggtatgaatctgatccacgacctccccgttcgggcggacaaaatcaacgtatttagtggggaacatctggcggtattccaaggcaaaagaattcgaaaatccctgccaccactctttctcgtaatgcacgtcaaatgaattaatcaacgtcaacttttcattatttcccctagaaaagatggaacttaatatattacccgtggtaaaggcattttcgctcgcccctaactgcaacacgtcatgtttcccgctaaaagtcaacttagaagtcggttgattattaaagatatactcgacagtcccgcctcctttaaactccccgtctttcgtactgtacgccccatacccggaaagtcgcacgtgtttactgaaatcactcgtggtcttcacccccagttgaaaacgacacccctccagcttgttaaaactgaccaacttataataaggtccgaaaccaatatatttcgtgttataatatcccaacagagctgtttggataatatcgtatatatttttatatagcgggacattcttaatcgagtccaccatattatatatattctgctctttttcacttaactcgtaaggacgcaccgattgccagtaattttcatcactttgaagtacatccttattaataatcacatcattatccaacttctgtatctcggtaggaatatcctcatttatccgcacattagagtagtctatctgacgatgtcccataaacgagattaacttggacgaatccttcatctgcacggtaaaatcggccaatatcttgtcctgttttaaaaaccaggtggaatcgtttatcaactcgttcgtgttctcgatagccaaatcccgaatccaattcacattcaaccctttcgccattctcaaccgggcagattccaacgcccatgtcgtcgagtcaatatttacctccccgtcaaataccggggttgactttcctttagggtgaaaacggatcttgtatatctttcgcccctccttctgaacactatccaccagaaaatacttgtaatacatcaacccgtgttcgctcaacgggctggcgaaattcacctcgaatatattaatgtaattatcatacaagttgacattcacatgtagatgccccgtgaactgggccagactgtaatcctcctcgatacccgaaatccggctcgctttcacgatctctcttgataatttaggagaacgacgatagtaataatccgccgaagcctcggaaatcatcacgggtaaataggcctttcccgtgatggccgaagtgtccatatactggaaaataaatccgaaatttttctgtaacttcttatttttaaactccggtttcatgttcgcaatatccagttccatcttcgtataagtggtataactgtacgattccttctcggccgggttattttttttcttattctttgaaatattccgcaagatcgcgtgagccggattctctccgggttttaccttcacctcgtccaaatgagtcacgatcggtaccagtttaaaatcaatcgtgttgaaagctcctttcttgacagccacggtctggcgttcataagagacaaaagatgccataatttcgctgacctcctcccgtgtctcaatatcataattcccatcgaaatcagtcgtgaccccaatcgtggtacccacaaacacgatactcaccaatggcatcggctcccccgtttctgcatccactacttttcctcgaaccttcgttgtctgcgcctctgcaacagacacccacgccaataacaacaagacaaaacacaacttcaaatatttcattacaaaaaaatttacgatttcagattcacgatttcagatcaggaacaaccattcaagatgaagataatacctcattataaatcatcaatcacaaatcatacattaaaccactccttcacgcaatatgtcgtgtatgtgaaccattcctttgtaatgacgatctttatcaacaacaaccagttgagtgatactattctgttccatcatccggtaggcattatacgccagttcgtcctccgatattgtcttgggagattttgacatgacatcctttgccgtcaacccgtccacatcatcgtatttctccatcatccgccgcaagtcaccatccgtgataattccttccaaacgttcttccccatccacgatagccaccgctcccaaacgtcctttcgacatggccaagatcacggggcggattcccgcttctctcgtaatgcaaggccgattcgttccatcgtaaacatccgacacccgcgtgtacaaacgctttcctaaacttccgcccggatggaatctcgcaaaatccctacttgagaaactgcgacactctaccaaacacattgctaatgcatctcccagcactaactgtgccgtagttgaatttgtcggagctaaatttaaaggacaagcctctttttccactttcgctttcagcacataaagcgagttcttagccagaaaagagtccgtatttgacaccattgccacgatattattatttccgttattccgtatcaacgggatcaaaacttttatttccggagtgtttccactcttagaaacacaaattaccacatcctcttcccgaatcattcccaaatcaccatgaatagcatccgcagcgtgcataaacacagccggagttccggtggaattcatcgttgccacgatttttgtcgcgataattgcactttttccaataccagtgataatcacccgccccttattttcataaattaatctaacgaccgcctcaaaatcatcatcgatgtagtttatcaaattttgaatagctactgtctcatcttgaatcactttgcgcgcaaccgattttatatctaccatgattatctaattataaatattcattcaaaagtcgtccttaaagcaaaaaaagaaaaaaactattgcacttatcattttttgctataactttactagggacaaaagtatcattttttatgatagctcaaaaacgagtgatgatagatttattatagaagattttgtttgtagaaacaaattaagttataaatttgcgcacccgtgtaaaaatggggtgtgtgaaaataaaaaaaacaatgggattgcaaatagatttacatgctaaattaaaagagtatttcggctttgataacttcaaagggaaccaggagcagataataaagaacgtcctcgccggaaacaacacgtttgtactgatgccaacggggggaggaaaatctttgtgttaccagttaccagccttgatacttgacggaacagcaatagtgatatcaccactaattgctttaatgaaaaaccaggttgatgctatgcgctcattcagcgcatcggagggagttgcccacttcatgaattcgtctcttagcaaaaatgatattctaaaggtgaaagaagacgtgttgagtggtaaaacaaaactattatatgtagccccagagtcactgaccaaagagagtaatattgaattcttacggaaagtacatatttccttctttgcggtggacgaagcacactgtatatccgaatggggacacgatttccgtaccgaatatcgcaagatcagaccgatcgtggagcaaatcggaaaagcgccgattatcgctttaacagcaaccgctaccccgaaagtccaacacgatattcagaaaaacctggatatgctggatgcccaagtgttcaagtcttcctttaaccgttccaacctctattacgaggttcgtccgaaggtagacccgacaaaagatattatcaaattcattaaaaacaatgaaggcaaatcaggtattatctactgtctgagccgtaaaaaagtggaagaactcacggaagtcctttgcgtgaacggaatcaaggctgcttcctaccacgccgggatggatgcctcggcccgtagtgccaatcaagacaaattcctaatggaagaagtcaatgtcatcgtggcaacaatcgcttttggtatgggtattgacaaaccggacgtacgattcgtcatccattatgatattccgaaaagtcttgagggatattaccaggagaccggaagagccggacgggacggaggtgaaggatattgcttgacattttacagctacaaagacatccaaaaactggaaaagttcatgcagggtaaaccgattgccgaacaggaaattgggaaacaacttctcatggaaaccgtttcctacgcagaaacttctctttgccgcagaaaagtactgttacactacttcggtgaaaactatgatgaagaaaattgcggggcctgtgacaactgcctgttcccgaagaaagaattcgaaggaaaagaatacttgatcgatgccttaaatgccatccttgaagtaaaagagaaattcaaggtggaccatatggtaaatattcttctcggggaaaccgattccatgataaaatcgtatcatcatgatgaactggaatcttttggtgtcggttctgaaaagaacgcacagttctggaacatggtattcagacgcgctttaattgctaattatatagaaaaagatattgaacaatacggggtcataaaattaactgaaaagggccacgaatttttaaaagaacctaaagactttatgctgatggaagatcataattttgaagaatcagaagagaaacttcaggaaaaagggggagtatcagcactcgacaacactttatttgccatcctgaaagatttacggaaaaagattgccaagaagaacaatctaccaccgtacgtgattttccaagatccgtccctagaggatatgtgtaccaactacccgatcacgttggaagaactggccaacattcaaggtgtaggcacagggaaagctcaaaaatacggacaggaattcgtagaggtaatcaaacaatacgttgaagacaacgagatcgaaagagcgcaagacttggtggttaaaactgttgccaacaaatcgaaattcaaagtatatatcattcaaaatattgaccgccaaattgatttggaagacattgcctctgcagaaggccttaccttcgaagaactgatcaaagaaatggaagccatcgttttctccgggaccaaacttaacattgattactacatcaaccaaattctggatgaagaacaacaacaagaaatcatggactacttcatggaagccaaaagcgacaatattggagatgcctatgatgaattcgaaggcgactactctgaagaagatcttcgtctgatgcgactgaaactacactccaaacatggaaattaaataaaaagcgacctaaggtcgctttttttattccatccgatcaatcatcacatccggcaaatgctgtataaactggaatagcaaagtttcatctccagtcttatgggttcgaataaccatcgtcacccggtaagtagtcatatctcccaacttggacgactcggtagagtaagaactgatcgtatgctttttacgctttatctcatcggtaacctccttgatcacctcttgacttgttgtcgtaaatattaacaatacatttctctggctaatcttttggaaaatatatcctaaaccttccaaccccaacaaagtcaacaacatcgcactgattcccagccaatattgtccggctccaactgcaagtccaatggcagaagtagcccatatcccggcagccgtggtcaatcctctcacgaataacttctggataataatagtccccgcccccaaaaaaccgataccactcaccacttgagccgcaatacgactcgggtcaagaccgatccccgtattcccaagaatatcccaaaaaccgtattttgacacgatcataaaaagcgcactacctaaggccaccagaaaatgagtcctaaatcccgcctccttcgcccggtattcacgatccaaacctatgatggcccctaaaactccggccactaacaacctaaagaaaaaatcccatgtcatcatatccgtatctactttactctattcttatcttcacacaaagataaaccaatctacgcaaaattgcgtatgaaagatacaatacgattgaaaaacttcattaacccaacaacaagacatgacattgttactcgtaattctgtttattagcggctacattctgatcgccctcgaacatcagaccggaatcagtaaaagtgccatagcactccttctaggaatactattatggactttcatcccacatactgacaatgaaattattaaccacctcggagataccgccgagattttattttacctgctcggggccatgacaatcgtggaatggattgacacccacaacgggttcaccttgatcacgaaccatatcaccacacgcaataaacgaaaatcattgtggatcattgccttgattacttttatcatgtcttctgtactcgacaacttaaccacagccattgtcatgatcatgttacttcgccgcctagttaacgagcaacaagaacgatggatattcggaagtatcgttattattgccgcaaacgcaggtggagcatggaccccgataggagacgttaccacgattatgctttggattaatgacaacataacctctctgaatgttatccaccacctgttccttccaagcctgatttcattaattattccattggtcatcatgactttccggttacaaggagaaacacagcctcaacaagcaacaaacacgaacacaaccttagccatcagtcgcagagaacaaatgacaatcctaagcgtcggtattgccagcctcctattcgttcctgtttttaaagaattcacgaatctccccccattcatgggaatcatgctagctttaggagccgtgtggacatacacggaaattctctataatcgaaaaagaaacctttccccggaaaagatacaccggattccatccatacttacaaaagttgattacagcaccctcctattcttcttgggaatccttatggctgtcgctgccttacaaatagcaggcatacttgaccaaatgtccacgttcttaaatgacaaaatacacaacgtttacctaataaacatgatcataggttttctttcctctgtgatcgataatgttccacttgtcgctgccgccatggggatgtatcccttgactcacacaagcggtgccttatcaccatacctcatgaatttcacgacggatggaacattctgggaactccttgcatattgttcgggaatcggtggcagcatcctaatcattggttctgcagccggagttgtcgttatgggcatggaacgcatcaatttcatgtggtacatgaaacacatcacctggattgcaatcctcggttatctggccggaatcggtgtatattacctacaatctcttgtataaagaaaaaagaccgtcctgcccaaacagcaagacggtctttctattttatcgaaatattctttactccatatagcgaataatcgtttgttctcgatccggtcccacagatacaatcttgatcggaaccccggtctcctcttccaagaatgccaaataattattgaactcttccggaaattcatcctctgaagtcatttttgtcatatcacatttccaccccggtaactcggtatagatcggttttactccttccgtaatgtcatacgggaaataatcaacctcttctccattcacctcgtaagcaacacaagcagaaatcgtgtcaaaagtatccagcacgtcactcttcatcatgattaactgggttaccccattaatcatgatagcatatttcaacgccaccaaatctacccatccacaacgacgtttacgaccagttacggctccaaactcatggcccaactcacaaagtttttctcccgtttcgttttccagttccgttgggaatggtccgctacctacgcgggtacaatatgctttgaagatgccataaacctccccgatacgatgaggagcaacacccaatcccgtacaagccccggcacaaaccgtgttggacgaggttacaaaaggataagaaccaaaatctatatccagcatggttccctgagccccttcggccaaaatggatttttcatcatccagcaatcggttaatctcatgttcactatccaccaactcgaattgtttcagatattcgattccttccaaccactctttctccgctaccgctaaatcgtaagcaaagtttaaacttttcaatatctgttcgtgacgagccttcgccttcgcatattttatatcgaaatcatgtagaatatcacctacacgaacaccgtttctactaattttatccgtgtatgtcggtccgatcccttttccggtagtccccactttagcatcacccttggcagcctcgtaagcagcatcaagaaatcgatgggtcggcagaatcagatgtgcctttttggatatatgaagtctttttttcaaatcatgaccagacgccgccaatgcttctgcttccgctttaaacaaagcaggatcgatcacgacaccattaccgatgatattgactttatctccttgaaaaattccggatggaatggaacgaagtacatatttctgaccttcgaattcaagcgtgtgccctgcattaggccctccttgaaaacgagccacgacatcatagttcggggttaacacgtcaactacttttcccttaccttcatctccccactgtaatcccaacaatacatctactttcatctgatactatatttttatgaaacaaacgtgcaaaattaatatttatttcttacctgccaacttacaattgctgcaaataccataaatataaagcatatgatgatgaacggtaaaatcatacttttcttccacgtgttcgacgatttcttccaaccgtgaatcagcgaattcctccactttcccgcacaccttgcatacaatatgttcatgtttccggttattgtatgctcgttcgaattgagctatattattcccgaactgatgtttgatcaccagcttacattccaacaacaaatctatcgtattgtacaatgttgcacgactaaccctgtaatttttattcttcataaatacgtacaaggattctatatcaaagtgcccggaatgagaataaatctcatctaaaatagcgtatctctctggcgtcttgcgatgccctttctgctgcaggtaagtggtaaaaatctcttttaccgtctcctttattttttccattgagtccaaagctaattctatttacaacatcgctaagt

SEQ ID NO: 69 - DNA, 13390 bp, Butyricimonas faecihominis
aataaagagtgtgtatcttagcaatctaaaatcaattatgtatggaatattatatagatccggtcaccttcgtgacacaaaagagtggttttgagagtagatatattaaaaatttattggggttactggatgaaggggccacgatacctttcatttcccgttatcggaaagagatgaccgggagtatggacgaggtgcaggtgggacaggtgcgagagatttacgagcagttcaaggaattggaaaagcggaaaaagacggtgttggagaacatcgagcagcaggagaaactgaccccggaactacggagacagatagaacattgtaccgatttacgggaactggaagatatttatctgccttataaaccgaaaaaacaaactcgggcatcaaaggcaaaagcaaagggattggaacctttggctgccatgttgatgaaacaggataacggggatgtatgggacaaagcggctcgtttcgtgaagaatgacgtggagaatgaagaagaggctttgcagggtgctagggatattattgccgagtgggtcagcgagaatgaccgggcaagaaacaccgtgcgtcgctcttttgaccggatggccgtggtaaaagcgaaagttgtgaaggggaaagaggaagaaggggagaagttcacggattatttcgattattccgagcctttgcggaggattccttcccaccggatgttagcgattcgtcggggagaggctgaaggtattctgaaagtggcgattgaaatcccggaagaggaaacgatcgagtctttggaaagaatattcgtgaaaggtcgtaacgagagtgccgagcaggtgaccatggcggtgaaagacgggtataaacgtttgttgctttcgtctatcgagaccgagtacctgcaaagcggtaagcagaaagcggatgaagaagcgattaaggtgtttgctgaaaatctgcgtcaattgcttttggcaccacctcttgggaataggcgggtgttgggtatagatccgggattccgcacggggtgtaaggttgtttgtctggatgaaacgggaaatctggtacataatgaaaccatttatcctcacccgccacaaaacgaggtaaaacaagcggctaataagattaccaatctggtcaactcgtaccggatcgaggcgattgctatcggtaacggtacggcaggacgtgaaaccgaacggtttatccagagtttgcgttatgaccgggatatacaagtgtttgtcgtgagtgaaagtggggcatcgatttattcggcctctaagatagcccgggacgagttcccgcagtatgatgtaacggtgcgcggtgccgtgtcgatagggcgtcggctgatggacccattggccgagttggtaaagattgacccgaagtctatcggggtagggcaataccagcatgatgtcgatcaatccaaattgaaagagagtttggatcgggtggtcgagtcgtgtgtgaaccgggttggggtgaacgtgaacacggcaagcaagtacttgttgacttacgtctccggattggggccgactttggcagaaaacgtggttacttatatcaaggagaacggggcattccgtagtcgcagcgaattgaaaaaagtgaaacgtatgggagagaaggcattcgaacagtgtgccgggttccttcgtatcgagggggccgaaaatcccttggataattcatccgtgcatccggaatcatacgccgtggcagaacggatggcaaaagacttgggcatctcgttgaaatcgttgattggtaacgaggaggcttgtaataagattgaattatcccgttacgtgaatgaccggattgggttacccacgttgaaagacatcgtggatgaactcaagaaaccggggcgtgatccccgttccgtggctaaagtattcagtttcgctgacaacattcatacgatcgacgatttggagatcgggatggttgttccgggtatcgtgactaatctgacgaacttcggagccttcgtggatattggcgtgaaacaggacggactggtacacatatccgagattgccgataaatatatttcgaatccggctgatgtactttctttgaatcagcatgtttcagtgaaaatcgtgcaggttgataaggtgcggaaacgtattgggctttcaatcaagcaggcgtgaaatagaaacttgataaccgaacaactaccgaacaacctaccgaacaactggcgaaattaagatgtcttcttgatattcgaacttttttccttttctttcgtttcacgtgtataaattcaaacgaacacggttatgaaagagaaggaaaagaaacaagagaatatggatgtgaaaaagcatctgacacccgaagatgatgagaaattacacgaggcatatataaacgctttaggtgaaattctggagaatgacgatgatgatgcccgggataatttggctaattacatggacgaggtaaaagaagagtccgatgtcttgggtacggaaccagacgagaatgatttggataggggaaagaacgcttgactttcccctattttatagtatctaccggattcatccgggaggctttaaatgcttgccatgcgacggtcagcgtgccaataacgactgccgctataccgataaagataaatgataccggagaaatttcgtttttataaacgaactgtgtgagccactgtactgagcagtaataggcaatcggcgccccgatgcaaaaagcaactagaatccatttgataaaacgggcgcatagtaacacggtgatttggttttcactggccccgttgattttacggaggctgatctctttccgcctgttctccacggagaaccatgctaacccgaataaacctaagccggctagcaaaatgctgatataggaaaatattgaaagaattttcatgacttgtaactcttcttcgtgaaactccatgaatcgttcagacaaactacaagtttttatttcgattgcccccggagcaacttgtttccaaagtgcattaatcttttcttcaactatttttcgggtaccgggttgaatacggataatatgacgatcggacccggtatcactgaatcgaataaataatggcgtgatctctcgggtgagtttatctcttggataatcggcaacgaccccgacgatcgtgtaggtttcatcccatatttggaaggttttacctaaaggctctgttatcccttgtttctttagaaaagtctcgttcacgatggcttcatgtaatccttgttttcccggagagaaaagtcttccttccaaaagttgtatatcataaaaatcaaagaacgagaggtcggcttccgtgcaatccacggacatattatctagtccgtaagtgcaattttgagtgatagcactcatcgttcggtgggtgatctccgggatggaagagagttggtcatagaaagctttcgttgtttcatcttctaccgtgtaaagtccccatcctaatatcaaaatttcattggcgtgtggacggcaatgtgttgcgaagtccatctggtggtgaatgtttaccactgttgtcgtcaggataatggatatggtaaactgggtaatcacaatattgcgaataagaatggttttttgtttgttttcattctttagaatttcagatagagaatttttgttgatttttaggatcacgtataaaggaggtatgatgataattgtaccgagtaaaagaattagcaccagtggagtatatccggcatataaatccgatagacataaatcggaagtaatgaatgtgttgaaataaggaataagaatatggataataccaatagatacgataaaggaaaacataacgagtaatccggtttccatgattaactgtttacgtattccttgttttgattctcccgaaataagttgaatcccggttgtttttaattgttgtatggtacgggtcagacaaatgttgatgtggttgaagcaagcgatgataaatatgagtatggcaactcccatgcctaaataaacgaaagaaggatcacgtttaaagattaatccgtcctcgtataaatattttgcttttgaaaaataaagttgttcaacaggttttagatagatcgttctatccttaaatacttcttcgttccgatcatttatttttgttaggaaatttggagctgtaactttagacgaaagctcgataaaaatgtaaaaagagaatccggtaacttttgatatttcttcgtccggtaatcctcgtaatatcccaaaatggagaaaattcttttgcgaatcgtcaataacagttgtaattgtacaaggttcgaatatctttttgtagatatttttctccccgtcaaaatgaacaatatagcgccctaatgtgagagatttcccaatagggttagcaattccgaattgttggcgggcaaaagaccgggtaacggcaatttcattgggggatgagagtgttttgcgtaaatctcccgataaaaggggaagtttaaaaaagtcggtgaagttgggtgtaacagaataagcatccatgtagtccggttcttccgctttttcactgaaaagaagatgttcattccggaatacacaataggctttcacttctggataaatgttttttagttgaatcccgctttccccggaaatgaaagcatcattgggatggacgtcttgtttcctttgctcctgaacaagataactatttttactattcaagatagaatgagcgatattatattcgtgtatcacgaaagtaacgagcagcgtgcaacacgtgatccccgtgatcaggctaatcaaagaaatcagcgtgtaggtcttgttttttatccaacctcgaaatatgattttgaattgaacgttttgcatgattattcggttttaagggtatctatcgggttatttcttgatgcttgccggatctgccagttggtcacgagcagaacaatacaaagggatataacgacggtaagtacgaaaatccaaggttgtatttctatcctgtaagcgtagttttccagccatttccgggaggcgtagtacgctatcggcagaccgatcacgcaggccacgagaacttttgtcatgaattgtcggttaaatagtaacatgatttgtcgttccgatgccccgtttactttccgaagggcgatctccctcgttttgctttccaccatgaatatggcaaaagcgaatatccccataccaccgattagaatggcgatcagtgaaaacaggatcacgagttccataaaggccatgtctttttggtataggtctgagtaattatattccttgcactcgaaaatatattctgggtttcgagatagatataagtcttgcagatattcaagaatctcttgccgttttcccggttggtaacgtattaataataaatacgaggatggcggtaaaatcatcgtggggcgtaccgggtaatggagtgattgcgtgtgataatcttccgtaactcctgtaattcgatagtgaacagaatgttgctggtttaggatcattcctagagggtgatccagtttgaacgtttccacgaattttttatttacccacacgtcggttgttgatgagtaattattttcaggcgagggattaaattcgataggagtaaactcctgactttcaataatcggaattttatatacattggtaaagtcttcgtccccgtatgcacatacaacatcaatttgtttttccggctctgtgagaaggggtattttctcgatggagggtatgtaagtaaaaggtatactcataccgttacatacataaagaattccgggatgctgaagtaattcttcttttagaggttgatagctgcgggaattgtcaaaccagccaacttgaaggatatgttccgtatctatccctagtggtttgttttttataaaattaatttgtgaaataatgatggtacaataaaaaagtaatgaggtgaaaataccgatttgtaatatggttaaaattttggaaagatttatctgttgtggtttgggttggagcatacctctcacaccttcccggctaacatgatgtttaaagtgaaagtataaaatggagcaaatgatccccataatcagacatataaatcctacaaatacgaaattggaaaggttgaaaagttcaaatggataaatatgctccggtgacaagatttggataaaataaggatgcaatccataggtcaaaatacacgagagtagaagaataactcctgtctgtaacccgatttcaccgagcaattgatagaataaatgcttgttgctggctccataacatttgtgtatggcaaaacgggaagaatcccggtcttgttgggcaattcggataagtaggaagtttccggcagcaagtagtagaataagaattgtgatactccataataaataggttagggattgagaaccccgtaacaattcatcttctcgtagatgatcggaatgaaaataaatatctttcaggggttgaagtctgtgactgtaatggttaacgtcgtccggcatattggatgcgattgtcggtaatttcttttcgatagctcgaaggtctgcggttggtaggatatgaaaataggtgtacaaagagtaatttcctcgatgttcatcaaaatatgggattccctgtcggcaatccacgatgatgtttgcttgaatcgtcgagttcgccggaaaatcttttataacagcaacgacttggcatttgatgtctttttttctgttattgattccatctttaatggttaccgtctttccaatcgggttctccttgttaaagtagcgtttggcacttgtttccgtgaacacgatccatgaaaaaacggttgtgtcaattttcccttgtatcacgggaatctcgaacagatcaaagaacggaggatcgacaaatgcaagtttaggttctatggtaaaatcttggtcatcctttatttttatgcgataatctttttgaaaatagcgtgctacctgtacgatttccggaaatgttcgttttgctgcaggaccgaatggcgtgttggttcggcaattccagaaatcctcatcaccgtatcgggtgatcacccggtaaatattgtcgctgtttttcaaatacccgtccatattccactcgtttgacgtgtgactgtatatcagccaagcggcagaaaaggcaatggacaacccgacaatattgatcacagtgtaaaccctgttgcgggaaagcttgcgtactatgaatttaaaatattgcttaaacatggctattcggttttaagggaatctattgggtttagtgttgcggcataccaagattggcgaatcacggtaataatgcctatcatgatcacgagtaatatactcgtgataaaaatccacggggataactcggccctgtacacgaattgtgaaatccatgcgttagccaaataccaagcgattggaataccgagaagtgaggcccaaatcatccatttcacaaaacgtccgcacacgagcagcacgatttgcttctcggttgctccgttgactttccgcaggcaaatttcttttgtccgacattcaaccgaataccacgctaacccgaataatcccatgcaagagagtagcatactgatccatgtgaatacggaaacgattcgtgccgtccggaactcttccttgtgtatatccctgtaaatctcggccaaagaggtaaaaaccaacggagattcatcaggagcgatcgtttcccacaagctctgcatccgggcaatcgtggcctcaacctctcccggtcgggttttaatcaccgagcctctggcgtttacccagtcatccgtctcccggatgataattaacggttcgacctcattcgtgacgtgatcaatagcgtaatccttgatgactccgcaaatcacgaagtccatcccgtcatgtgaaaaagattgcccgactgggttttcgatctgtttctttctgatcagcgattcattcactagcaccttgtggatcgaaacatcggtagcatgacacaaggtatcccctgccacgagttcggcgtgataaaaacggaaaaagcgttgatccatctttaacgtgttggcattaaactcccggttagcgatggccccgttcatgagcgggagggtagaggtgtagtcaacaacttccggcaacgtgatcacttgttccttgaatatcttccacgaatgttcgtcgggaatatattcgtgttctatggaaacaatcgattccgcgtccgggcgaatgtgtgtgatatattcggtctgcccttttatcgtgaggaaaagggccagtaaaatgatcgaaatagtgaattggacaacaataattccggcaatcagcgagcgatgaaacgtgtaatttttccttagaatatcggccagtgccacccgttccgctttgtacaggatataaattgacgggaacaggatcacggcgacaagggtataggaaatgatcggtagcgtttctccccggaacagatcgacaaaagccagcttggaatccataaaggcattaaacgtcggtaacaccgtgtaaatcaatgccagtgaaataacgaaagcaaagcctacttggagtgccgtttcctgaatcacctgccaccggatttcgttccgggaggccccgtgtatcagttgctggccggaataaagcaaacgttggaacgaacgggtcatgttgatattcacgtgattaaaacaagcaataatgagaatcagtagtgcgatatacagactagtttgcaactgtttataatcccggtacctgaaaagtcggttctcggaataatctttcgtgtagtacgcctgttcgatggggagcaggaaaagcggggtggcgttttcatccttttcttgtaggacggatagatcacttcccgcttgcacttgcaccacgttatgataccacgaagtactgaaaggttgtcgggcaatctcttccggggataacccgaaaagaagctcgtaatacaggacacttggttggcgatcgtcaatgactgaggtgatcgtgtagtcttggttgacttgttgttgtgaaaccccgtaaccgtccccgttcttcacgaatacatctttgtaggtttcgagcgtgagaacctctcccgccgggttttccttcccgaacgtgcggagggcaaaactccgggttatcgcgatctccaagggatgcgatagagtttgttttaaattcccgctaatcatttccggttggaaaagcgtgtcgaaaccgggagttactttataagcgttatcaatctccagtttgtgctttccccggtgcatgacgacaaattcttgtcgaaaagtgcagtaccccgtcacctgcgggtatttctcgtgtagtttttgggcagccccgactggggtatcgtacgttttcagttccgagttgtggtaaaaattatctttcgtttgcaccacgtaaagctgatcctctccgggcgtggaatgtgccgttcgccgttcgtgcttggcaaacccaatcagtagcgtgctgcacgtgagaccgataaccagactgaatgtcgagatacagggatatattttgtttttaccccaatgccggaataatattttatattggaacatccgcatgatcattcggttttaagggtatcaatcgggtttcggcgtgtggcccggcgtatttgccagccggtgacgagaaccaccagtagcaaagtccccccgatcacgcaaacggtaatccaagggcttatcgtgactttatacgcgaaaccttgcaaccattgtcggcaaatcagataggaacaggaaatccccacgacacaggcgaccgctacttgccccgtgaaaatacggttcaggtagatcataatttgcccttctgaggccccgttcactttgcggagagcgatctctttggtcttactctcggcgataaaaacggaaaaggcaagtactcccatgcccccgatcaatagggcgatgcccgtgaatatatacacgagatgtcccagcatgatttcccgctcgtatagttcggaatagggatattcttggtaactcatcagcgtttccgggtgacgggtttcgtgtaattgttgcaggtaatggatcatctcgcttcgtttcccttcccggtactggacgatgagggtgaacgacacccccggaaggtcactaccgatcatgacgggttgaatcggttcgtagagtgaacgataatggaagtcctgcacgatccccacgatttgcattttggcggttccgtcactcagtagcgttccgatcgggtgactcaatcccatttgccgcacgaacttctggttcacgacaatctccacgacgtccacgggcttacgggaatagattcccggtgtcgtgatcttcgttttggcatcccgtccttccacgagttttaactggtaggtacggaggaaatcttcgtcacacaaaagcgagtaggatggtatgcttttttccggttgctcggccaaatgaatatcccagtgcgcccagttcccgatcgggagcaaggccccgcaactcacggccagcacgtccgggtgtcgcgacaactcttccttcagagacgtgatctcgtagggattcggccaatcgaaagaaatcgtgttccggttattgtaacccagcggtttgttttggagataatcgatttgtcggagaaacacgatggagaaaaaaagcaacccgcagaagattgtcagttgggcaatcatcagaattttcttcaaatccagcgacgagcgggaagagataatcgtgtttttcagtccggaagagttgagttttcggctgatatgtccgtaagtaattcccccgatgcatccggcaaatagtaggaagatgagcaggaaaccgatgacttccgttccgctcaaataaaatgggaagggatgcttgggcgaaatgatttgtgcgaaatagggataaaaaataaaggtcagcacgaccgtcagggcgaaggccgtcacggtatatatacctatttcctgcaacacctgcacgaaaatatgtcgattactactcccgaaatatttttgtatggcaaaccgttccgcgtttttatccgctagggctagtttgatgatgaggtaattacaaaatgccagcgacaggatgagtaagaggattccgaacagaatccagttaaaagttcccgacccttgggcaaaggagaggtcaaaatcttgtatgtgatccgagtgcaggtacatttcccgtaacggttgcaactgcaatagctccttttgttcccggatataatcagactcccggtattcaatttgaagtaattgctcttcaaccttttggacatccgccccgtcggttaattgaataaacgtctgcacggcgtttcccatgttgtaccggaacgaatgttctatcacggaaaaatccagaatcacgtcggcttgaatggatgaacggggtggcatatccttcatgaccccggcaatccggaatgttgaaacacttccactcgtgtacaggttttccagatataccagtttccctatgggatttgtatccttaaagtgacgccgggcaatactttccgaaatcaccacccagccggggtgttcgaaggcttgaatactccccgtcacgagcgggaacgtgaacatactgaacaattgtcggtccgcgtacccgcaggaaatcccggtttgatagtgatcgtcattttcccagcgaattttcatttcccgtgccgtgatgattcgggtatagtcagtcacttccggcagttccgctttggcaatctctcccagcgagctgcaaacctctgccccccagtgggtattcccgtcatgttgaaccgtgatccggtagatgtggtcgatgttctcgtggtacgtgtttgtctgccactcttttaccagaaaagtataaataaatatggaggcagtgagagccacggccagcccgatcgtgttgatcacgaaatagcctttccgttgaaaaatctgacgtcctaccagtttgagatgatacatatcgtgttatttttagccgtgttgcaaagtacaaaaaatcacttgaaaataagtcgttcattgtcgccaaacatttcgtatcccgacgtgatgatcttttcacccggttgaagtccttccgtcacttgataataacggggattctgtttgccgatttttatttttcgccggaaagcctctgtcccgtcgggcgacaacacgtatatccattgtcccccggtgctttggtaaaaagtacctctgggaatcagtgtcgattcgtccgccgcaccgagttgcaggttcagatggtatgtctgtcccgtccggatattgggagggacggtagtcgtgaactccaagtcggtcttgaattgcccgtccttcacgtcggggtacaccttgatcacccccatctggaaatccttcccttgtcgctccaacgtggcagtcagccccttgcgtacccggtcgatataatgttcgtcgatttgtgtcatcaccttgtaatcgttcagcacgttgatcttcccgatctggctgccggcccccaccacctgaccgatttccacgttcaggtcgctcaactgcccgtcgatcggggcgcacacgttaagccgggcatagcgttcctgtgtcagtcgcaggttacgccgggcattctccattttttgcttgagcataatgacctgcgagtggcggcgaatggaatctttcgtttgtttctccgtgatcagctcccggttgtggatggcgtactcgtaatcttccttggccacgagatactcttccttggcgatcaagtcttcctcgaaaagttgcttgttttgcaagtattttcgtttcttccgttccacgtcaagctccagcgttagccgttcctgttgcaggttcagctcttcccgttccaaatccagcaagctattctgcacggagttctcttcctcggcaaaccgatccttgctattcagtatctccgtttccagattcttactttcgagtcggataatgacctctcccgccttcaccatttctccctcttccacgagaatctccttcacgcttcctccttcctgcacggttaactgcgagaacgtcaatggttccacgttccccatgatccggatatagtcatggaatatcccttgactcacgtcctcgatagtcactttctccttgtccacccgcaaagccgattcgtgattgccgaacacggcccacccggcaaaccagagaataaatattcccccgatgaggtaaggtatatgtttcctcttaattcctcttttttgttctattagtcgatccacggtttaattttaaatttaattattttagattttagattgaactcctccgtcagcttcgctgccacctcctctataaacagaggaggagctggtgactcttcccgaag

SEQ ID NO: 70 - DNA, 13339 bp, Butyricimonas faecihominis
attataagaaaagaggtcgttccaaaaaacgacctctttttgtatatatatgggctgtcttgtgccgaataagaaaaattgatgtagatcaagccatccaatgcgtggtgatgttatctttgcacgattttttaagatgggatgtatgaaaccgactaaaacactacgcggacagctatttagactgacgggaccgatattcgtggagacgttattgatcatgttgctgggggcaatggatacgtttatgctgagtcattattcggatgatacggtggcggccgtcggggtagtgaatcaattattgagtctggtatttctcgtgttcggggtatcgacggtcgggacttccgtgctttgttcccagtatttgggggcatcgcaacaggcaaacgtgcggcaggtgatcggggtgtcgttgttttttaataccctgatcggggtgaccacgagtgctttcctgtattttcgggcagaggctttgttgaagataatggatttggccccggagctgatcgatgagggattggcttatatgcagattgtgggcggttttgccttcttgcaagctattgccctaaccatgtcggctgtgttgcgaagtcacaacaaggcgtactatcccatgcgggtgaccttgttgatgaacgtgttgaatatcattggaaactatgccttgattttcggtaaattcgggttaccgcaaatgggcgtcgtgggggcagcgatttcgacctcttcctgccgggcggtggcgttagcgttattattgtatatcacgtttggcaaggtggttcctcgcttctcgttctcgtgtctgagaccgttcccgtgggataagttgaaaaacttgttgcatataggtcttccagcggcaggggaacaggtgtcatatagtttgtcgcaagtggtcattacttatttcacggtcatgttgggaacggcggcgctgacggcgcgtacttatgcgatgaatattatcctgttttcatacgtgttctccgtggccctcgggcaaggggccgcgatcctgatcgggcatctggtcgggggcgaacgtaccgatgcggcttttatattgcagaaatattgtctgcgactttcgatcgtggtttccctttgcgtggcggtggtcacggcggcttgcagtaagtttattttcggaatgttgacttccaacccggagatcgtgtacatgggggtgatgcttctttgtattgacattttgctagaggtgggacgtgcggtgaatatcctgtcggtaaacgtgctgaatgccgtgggggatgtgacttatcctttcatcaccgggttgattgtcatgtggggagtggcgacagcgttgagttacgtgttcgggatctctttcggttgggggcttgccgggatgtgggtggctttcacgttggacgagaatatccgggcgattattttcgtgcgccgttggaatagccggaaatgggtgggtaagtcttttacccgggtggagaaattgttaaagcaaaccagctctcactcggcttaacgtttcgggggtcatgccaagccgggaggcaatgtggatgaggggagcccgtttgactacttccgggtgttctgtggcgagtcggtggtaacgttcccgggcggtctcgaaacgacaggcatcggctttttgctgtgattctattagggagttttccagcattttgcaatacatgtgttccacctcgtgattcgcccgcataaggtcttgtagttgatcgtgcgggaaagaatagataacggtgggttcgagagcctcgatcatcaagtaactcggggtttgccggaaatagctttccagcgaaacgaatatccctttttcatacgagaagtgttccgtgagatcccgcccgtttttatcatagaataggcgaatcattccttgggcgaccatgctgtaatatttacatatctcaccttcccggagaaaaaggtctcctttggccagttcgaaacggacgagaatgttggccaatttctcgtgagtttccgggctgagcggggcggtttgagcctcgaattgcctaatgatttcttccttcgtgtccatgaggcaaaaatagtgaaaaaatctgttatatttgtgacataaaatatcatgatcatgaaacaagttttatggatactgcttgctttcgtgctgttatgtgcatgtgaggaaaagcattttatgacagatccgggctaccggaagatggtggaacaggattttcagaaaaagaagaaggtgttggaaggtaacccgggtaatttgtttgccgtgttcgattctccgatgagcgtggaagagcgagaggcgctgatgtttctctacgcttattctccgttgattgatctatctttttcggggggagattttctgttggagaatgtgcgttgggcatttcaagcgagagaggcgatgccttgggggaaagatattccggaagatatattccgtcattttgtacttcccgtgaggggtgggaaagagaatctggacacggctcgtatcgttttctacaaggaactgaaggaacgggttgcgacctgtgagtccatggaaaaagcggcgctggaagtgaatcactggtgtcatgaacacgtgatctataaaccgaccaatgcccggacccgttcaccgctagccacgatgctcacggcttacggtcgctgtggtgaagagtctattttcacgctggcagctttgcgggccgtggggattccggcacgtcagatatacacgcctcgctgggcgcattgtgatgataatcacgcgtggattgaggtctgggtggatggcgagtggaagtacttgggggcttgtgaaccagaacctcggttgaatattgcgtggttcacgttgcccgtgcaaagggcgatgtatgtggagtcggaggtgttcgggaaatacaatggtcaggaagagattgtttacgtgaatgaaagcggttcaggcgtgaacgtgacgtcccattatacacggaccgctccgacattagttcaagttattgacgagaatgggcaacctgttgtgaatgcgaaggtggaatataagatatttaattacggggagttttaccccgtggtgacattgtattccgacgtgaagggtgagacttccctgacgttggggcaaggagatattttcgtttgggcaagtaagggaaagaagttgggttttggggaattgtccgtggagcggcaggatacactgaccgtcgtgttggataaaactgtcggggatttgttttcaggggagtgggatttggtaccgccaaggcaacatgatataacagctttgtcaaccgatgaggaacgggccgtgaatgaccgtcgttttgcccgggaagattcgttacggaatgtttacgtggcaactttcatgtcgaggacgcaaggcggggatgtggcgatggagttgggagtggatacggcacgttttgctgcgtatatggttgcgtctcgggggaattattccgagttactgcgttttatgcgtgaagtgtcgcctgaacgtcggacattagccatgaatttgttgggcgtgattgcggagaaggatttgcaagacaccccggctgacgtgttgttgtctcacgtggaaggggatggccgtgatgtgtcgaatccctatttcacggaatacatactgaatccgagagtgcagaacgagttacttacggcttatcgggaacccgttcgggaatttttgaagaggcacgatattacggatgttaccagtttgatccaagaaactggaaaaatcaaggttgttgattccctgtaccccgcgaaggtggtaactccgccggtgggagtgatccgggcaggggtgacggatgcactttcccgaaatgttttcttcgtggcagcctgtcgtacaatgggaattccggctcggctaagcccgatttcgggtaaaccggagtattatcagaacggaacgtggcatacggttaatttcatgaccgaaaaggtagtaccgaaaggggagttgatgttgcattatgctcaaaagacggtgagtgaccccaaatatttcctaaatttcacgatcggaaagttggaggatggccgggtacggacgattgacttgggaagtaacgcggcggtggatatgggtgttggtgcgtcatataaaacgatcttcacgaaaccggtcacgttggaagagggggattatcttctttcaacgggaaatagacggagtgatggggctgttttggcagatttggtatcattccaagtggaggctggtaaattgacaaatatagatatgcttatccgtccttgcgtggagaaaatggagattctgggagtggtcccgacggcgctatccattgtcccggagggcaagacaaaaccggaggcaatccgtttgccggagaaggggtacatggcgatagccttgatcgaggcgaataaggaaccgacaaatcatttgttgcgggatatgagcggaatgaaagatgatttcgagaatttgggtgttcccttgtatttcgtgtttaaggatgcggatcatcaggctaagtttaatcgtgcggacttccgggtttttccttccgtgatgcagtggggaacggacttggacggtcgtttgctgaaaggtttggcagaaggattatgcttgacgaatacggagagcctgcctttgatcgtcctgttgaacgcgaagggagaggttgtttttgtttcccaagggtatcgtgtcgggttgggtacgcagatcatgaatataataagtagaaagtgatagacattataataagagaatttgatgaacgggatgcggaaaccgtgtcacgtctgattaggaataacttgaccttcgtgaatagccgggattatgaacctgcggtgatagactatatgtgccgtttgttcacacctgattatctgtgtggaatatcggctacccggacgatgttcgtggcggaggaaaacgggaaggtggtcgggacggttgggctggaaggggatgaggtctgcgccttgtacgtggacccggatgtacatggacggcgggttggggaacgtttgttacaacgcgttgaggattttgccttgagtcgtcatgtccatttgttgcatttgtcggccagcctcacggcagtcggtttttacgagaaaatggggtatcgctcccaagagaaagaggaatccgagcttttcggtcctgcttatattatgactaaattattgtaatcttataaaatatttccacatgaaaaaggtgttggttttcttcgtttgcttgttgttggcgcaggtgagagttatggctcaggatattcaagtgcaaccttctccccgtcaggtcaatgttacagggaagagtatgacgattccggttgctttccggctcgtgggagaacaggaggctaatcctcatgcaatcgccctgttgaaacaatttttgggtgatcgtctcgggacggaaggatttcccttgttcgtgggcgagaaaggggaccgggccgtgcggggagcgaaacggctgatacccgatcatccggaaggatactacctgtcgattaccgataaggccatcacgctggccgggaatgacgagcggggaacgtattatgccgcgcgtaccttcatgcagttgttccacgaggggcatttaccgtttgttgggattcaggattacccggacgtacgtttccggggcgtggtcgagggattttacggtacgccttggagccacgaggcccgtttgaggcaactgcgtttttacggggagaacaaattaaacacgtatatttacgggccaaaagacgatcctttccatagttcgcccaactggcggaaaccttaccctgccaaggaggctgctcgtcttgccgagctggtgaaggtggcggacgagaacgaggtggatttcgtgtgggcgattcatccggggttagacatccgctgggagacttccgaccgtgattcattgatggccaagttcgagcgtatgtacgatttgggcgtacgttcttttgccgttttttttgatgatatttccggtgagggggcgaaagccgaccgacaggtggagttgttgaattatattgatgaccatttcgtacaagtaaagcccgacgtgacgcctttgatcgtgtgtccaaccgagtacaataaaggatgggcacgaccggaaagtgggtatcttgccacgataggtgagaagttgaacccgtccgtggaggtgatgtggacgggagatcgggtgatttccgagattaccagggaaggcgtggagtggattcgggaacagatcaaacgccccgcttatatctggtggaatttccccgtgtcggattacgtgagggatcacctgttactgggcgaggtgtatggtaacgggaaagatattgccgggagcatttccggtttcgtggccaatcccatggaatgggcggaggcatccaaactggcaatatactgcgtggcagactacacgtggaatatgcaatcgtacgatcgttctcggtcatggcaccgggctattcgggccatcataccggagaacgtggaggcctttaccgttttcgcccgtcataattccgatctgggagagaacgtgcatcgtttccgtcgggaagaatccgtggaaattcaacccgtggccgagcgtttcatgaagaggtatcgagaaggacattatgatgagcgggattttcttgctttgcaggacgagttcgagcgtgtggcggaggctgccgatttgttgttgattgaccgggaaaacgaggcgttgattgaagaaattaccccgtggttgcatcagttcaagatattgggagatgctgggcaggaggccttggccatgattaaagccggggaacgtggtgatcgtgagcttttcctgcggaagtataatcacgttaaagccttgcgcaagaggagttacgagctggaaaggcaatttaaccagaatccttaccagccgggcgtgaagaccgggacgacagtacttcaaccgttggtgctggatgttttcacggaggccacggaacggtttaatcgtcagaacgggacggatttgcctttgttagccgattattcaccttgtaagttaaccacgaacgtgcctcaactggaacatctacctttacaagtatatcccagccgggttcatttgacccctttgctggaagtcgtgaaatggccggccggggggtacctgcaattggaacttgatgatgcctaccggattcccggtactcgtttgaattttgacgtgaagggtgacctttcttggggtgtcatggaagtatctgctgacggcgaaacgtggcagaccgtgacattgactcgtgacgctcgcggccgtctgaacggtaaatgggaggatactcccgtgaagttcgtccgtttcacgaacacgggagagggagaacaacaggtgtatttacgggagttctacgtggtattcagtttgtgatgctatattttctttcctgcccattttccgcttttcatgtacatgaaaccgagaatgagtaggatgctccagtaggcgtgttccgtggtccaacagatggcgacatccgcttggagatagaacacgatgtagatgatgtagagaacgtagaacgtgagcgtgccgaactccatgaatagagccatacgggtgtttcctgttcccgatacggcgttgaaaagaatactgccgggggtggaaagaagaaccgcgctcatcatcacgaaaagggaagggatcgtggcttggatgagttggggatcatcggtgtatattcttaaaaatgtggcgggagccagtagtatgatgatgccgatcgggatgacaaagaggtagcacatcttgattgttttgagacaagtactccagacttgggaggtggcctgcgcaccgatcaggttactcacaagcgagctggtcgtggcagcgaaggcggaaaccggcatgaagaagaacatggcggcactgcgcacgatgttggacactgccagcgggcgttcaccgaggtgttccacggcaataaagaacagaaaccaagtggccatggccagaaaggactggatcatggtccaaatggagatattgagtatgcccgacaataatttcgggttgaaactggacaggttgaaaagtgcgtatttcttccaatcaacttttttccaagtatataggatatagaatatcatggaaacgagttctgccacggacgaaccgatggcagccccgctgatgcctaaggccgggaacccgaatttaccgaaaattaacaggtaattcagcacgacattggtgccgaccatgacaagcgaattgatcgtgaggatgcgtgtcgtggtgattcccacgaagaaggcccggaacatgacggcgacaaacgagaaaaagaaaccgaatattcgccatttcatgtagtcgttcgtggccacgtagacttgttccgagtcaatgacagaacggagaaccgaaggcgtgtatatgcgggaaaccgtgaacatgagcgtggcaagtcccacgaggaaaagtaccccttgtataaaaatgggaccgatatccttgtagttgccttctccattacgtcggccaatgaggatttgtgccccgatgctgaaaccgaaagcgagcatgtagattgccatgtagtacacgccggctaaggctgatgcgcctagttcgacttctcccactctgccgagaaaggcggtatcggtcatgttaatcaagtgttccatcaacaaactgaccaggattgggaaagtgatcacccatatttgcttgtgtgtaaatctcatattcgtttcgtttatcgttttgttttttcgggtcgcaaagatacgtatttttattgttttgtggctgttcggtggcaggtaaggcagagaacgggctacataaagatgtcacaggtgtggatagttgattacaaacacgtttcattgatcggctttaattcggacggggaacgtctgtaactggtctctgcggatggttctcccatcgatctcgccctcaaatcgggagggattgaaaatgtcattccggaaagtccgtatagtagccgttccgagtattttattgagcgtgtattttaacgtttcaagactgaaataaggtgattaattgttagaaaaattaaatgaaattgtttacattagtcgctcttttaatgttcttgtttgtgttaaatttatatattatgaaagaaagttctacgagtattaaggctttactgcctgtgttgttcggtttttttatcatgggattctgtgacgtggtggggattgcaaccagttacgtaaaggccgatttcgggttaagtgaaactattgccggattcctgccttcgatggtatttctatggtttttgttactggcggtcccggcggctatttttatgaaccgtatcggtcgtaagaaaacggtattggtgagtatgttggtgaccattgtggggatgattattccttttattgattataacctatacacgtgcctgatcgcttttgccttgctgggaatcggtaataccattttgcaggtgtcgttgaacccgttattgacgaatgtggtgaagggaaacgtgctggcaagttcgttgaccgcagggcaggtgctgaaggccgtttcgtctttctgtggtccgtttattgcggcattcgcggcgaccgtactgggaaattggcaatatcttttcccgattttcgccttgttgaccttgatttccatgggctggttaatgcttgtgcatattcgagaggaatcgccggaacagtcgacctcttcgtggagagcgacgttcgggttgttgaaggataggacgatcctgttgcttttcttgggtatcgtgtttgtcgtgggcgttgatgtcgggattaacacggtggctccgaagttattgatcgagcgttgtgggtttgatgttacgggagcgggtgtaggatcgagtgtttattttgccttccgcacgatcggggctttcgtgggaactttcctgttagcacgggtttccggtagcaagtatttccgggtgaatattttggtagctattactgccatgatcgtgttgttcttcatgtctgggcaatactcgattttggtgttgatcgcgttgatcggtttcacgtgttccagcatattctccctgatcttctccatggccattcaagcccgtccggagaaagctaacgagatttccggtttgatggtgacaggtattttcggtggtgcggtaatcccgccattgatgggatattgtacggatttgatcggtacacaggccggttcacttatcgtgatcctcggctgtatgtgttacttgttgtattgctcggtgggaattaaaacccagaagtgattttaaatttccttcaacttttagtttttatcttttaacttttagcttattatgtatcagtttgataaaagaatagtgatgacgttggatgccgggggaacgaattttgtattctcggctatccggtcgaatgaagagatcgttgaaccgattgttttaccttcaaatggcgataatttggagaagtgcttggagacgatggttacgggtttttctgccatcaaattgaagttgccggaagaccccgtggcgatcagttttgcatttcccgggccggctgattacgtgaacgggattatcggtgacttgaagaacttaccggcttttcaagggggagtggcattaggtgcttttttgagaaataagtttgggattccggtatttatcaataatgacggggacctgttcgcttacggggaggcattggctggagcgttgccggaagtgaatcgtatgctacgggatgcggggaaaaataaggtgtataagaatttgatcgggattaccctaggtaccggattcggtggtggggtagttcgtgatggggagctttttttgggtgataacggtgcggctgctgaagtatgggtgttgcgggataaacgccagccgatttacggggtcgaggagggaatttcgatccgggcgattaagagggaatatgcccgattgtctggggatacacggcggttgaccccgaaagagattttcgagattgccgagggaaatctcgaaggaaacccggcggctgcccgggaagcttttgatcatgcgggagaagtgttgggagaggctattgcctcgatgaatgctgtggtggatggtatcgtggtgattggcggagggattattgctgcccacaaatatttgatgccagccgtgatgcgggagttgaacgggaccttggaaatgtacgaaggagccccggcggaccggatggagatgaaggcttttttcttggatgatccgggagattgtgcggcattcttgacccccacgtccagacgtgttgtcgtgcccggaacgacggaaacggtcgagtatgatcccatgaaaagaatgggggtaattacgacgaagctgggaacaagtagggctatcgctttcggagcttacgcttttgccttgaatgagctggacaaataggaaaagttaaaagataaaattagtaaggcatttaaaatgaaaaaacaactacccccaccgactctcccttacacagggggagttagagggggtagttaaggtgttggcccgtgcggttgaaatctaaaataattaatcagattcaaaatttaaaatctagaatctaaaattaactagggattgtaactcattttttttatttttagaagctaaaaattaatagatctaatacataaagaaatatgagttcaaaatatgcactaaatcctcacgccttagttcgttttttagaaaaagatgctaaagattttaccaaagatgatattattcgttatgtgacggaaaatgaaatagagatgatcaatttcaggtatcccggtgcggatggacgattaaagacgttaaattttattattaatagtcttgatcatctagataatatactgacatgtggtgagcgagtggatggttccagtctgttcccgtatatagaggccggatcaagtgacttgtacgtgttaccccggtatcgtacggcttttctgaatccattcagcgagattcccgcggtagatattctttgtagtttttacacgaaggacggtaaaccattggaaatgtcaccggagtacacgatgcgaaaggcacacgaggtattaaagcaagtgacgggaatggaatacgaggtgatgggggagttagagtattacgtggtgagtgaaaaggacgatttattcttggcctctgatcaaaaagggtatcatgagtctacaccttttaacaaggggcgggatttgcgtgcgttggccatgaagtatatcgccggaaccgggggattgattaaatacgggcattccgaggtgggcaatttcacgaagggaaatttgatgtacgaacagaacgagatcgaatttttgcccacgaaaatggaagatgctgctgatcagttgatcatagctaagtggattctgaggacattggcttaccagtttggtgtagatttgacatttgccccgaaaatcacggttggtaaggctgggagcgggctgcatattcatactcgtttgaaaaaaggggataagaacatggtgatagagaatggcaaattaacggatagcgcgctgaaagctattgccgggtatctggatctggcaccttcgttgacggctttcggtaacacaaatccgatgtcatatttccgcttggtaccccaccaagaggctccgacaaatatttgctggggagatcgtaatcgttcggtgctggtacgtgtacccttgggatggacgagtggtgcgggagatatgttgcgtgatgctaacccgttggaaaaagtggaagatcaggatttcagtggtaaacaaaccgtggaattccgttgtccggatggttcagccgatgtatacctgttgattgcggggttggcggttgccgtgcgtcatggatttgaaatgaaggatgcgctgcaatacgcgaaggagcgttacgtggatgttaatatatttgatgatgcgaacaagggtgttgctgatcggttaagtcagttgccagcatcctgttatgattccgcattatgtctggaaaaacaacgtgctgatttcgaaaagtacggggtgtttgctcccggtctggttgatggtttgattgccggtttgaaaaagtttgatgataaaatgttgcgtcaggatttaggaaacgacgaggcaaaaattatggaactcgtgcataaatatttctattgcggataaaaaggcaatggaaaatgggctattcgattttgtgatgtcaagtagctcatttttattttatctgatagtttttttattcttagggggatatttttatcctttttctta

SEQ ID NO: 71 - DNA, 13244 bp, Butyricimonas faecihominis
ctgttatttagcttgttagctaaaatatccatatcttcgctaagtttagtatctatgatttttgcatagatttgggtggttcttatgttggtgtgtcccaacattttggaaacgctttcaatgggtacgccataacttatgctaagggtcgcaaagctgtgtcgggcaacgtggaacgtgattttcttatttattccacaaacagttgcaatctctttcaagtaatcattcatcttctgattactgataactggcaacagtttaccattgggcagtttcccgtcatatttctgtaaaatggatttgggtatatccaataatcgaatattggacgttacgcttgtcttatgtcttttcttgattatccacagattaccgtcaaaggacaatcttatattttcaggggttagttcgcagacatcaacataagacagtccagtgtagcaactgaaaataaatatatcacgaacttgctccagtcgtttgctggcgaatgtcttttgatatatccggtctaattctgcttgttcaagaaaatccctttccacatattcaaatttcagcttatatgccccgaaaggattaaaagtaattagtcccaagttgtgggcaaacagaacaatagttctgaaacgctgtataaacttcatggctgtattgtgggtacacggataattctcccggataaataggtagaagccctcgataaacacgacatttatttcccgaaaggtaatatcctccacattatatttattgtggatatattcggcaaggcgatttttggtaagttcataacgggtatatgtcttttgtgtggctgttttccctactttcagcgcatattgttcattatgctgggaaaatacctgtaagagagtttttgctttttcctctttacctaagaacacattgcgtactttctctgcggttacatagctgtcccgttctaaaatggtctgatagtgtctgtgcaaggtagccttgatgctatctagcatttcattcatgcgggtaaattccgctcctctgccatttacctttccggttttggcagaccagtttttaggattgacttcaagtttagtgttgaattgggctaatttcccgtcaatggtaatacgtgccatgattggcatattaccgttctttttcaccttgtcccgtttcaggaagaacaatactcggaatgttgatttcatacctcattttttaagttacaaaactacttttattaactcataatgagataaatgcagggtcgccaaatctcgacaacatttcgccattttccgacaaatcgtacccctttttgaagaattttgtcgggggtacgaataaggcactaatttttgtctgtcagtgaccttttcgtggcggtcaaggtagccaaaagacaataaaaaaagtcccacaaaatattgattttgtaggacttgtctttttcttgtcgccttttggcttttctttcagtgatccagctgggactcgaacccaggaccccaacattaaaagtgttgtgctctaccggctgagctactgaatccttcaattgtgtttctcaattgcggttgcaaaggtatatctttttgtttctctcacaaatttatttcgattttttttcacgcatttttttcatgaaaagagtaaaaacttcattatgatttaattgagtctcccgtttcctcgccataaattcggacaaaagataggaattgtcgatatattttacttattttaccaaacaatcacaaaaaaatcattcatgaatacatcaaaaattctattttctttattccttgtgctatctcttttagtttcctgtgagaaagataacaatcactcggaagacgatgaattagccacacggatgaatcaattcattcagagcaatttatctacattctacttgtggtatgacgaaataccgaacattaaaccggaatcaaaaaaagacccgaaagaatatttcaaggtcctcctttcctccaaagacaaatggtccctgatcactgatgatgccaacggacttctggaagaaatggctggaacaggggaaacttatggctacgggcttgcttacgggcgattcaaggacagtgacaaatgttttgccatcgtccaatacgtttatcccggttctccggctgccgaaaaactgaaacgaggagacattatcgtagaattgaactcgcaaagctttacagaaagcgacctcagcaaacttaccaatcccgggaccctccacttgggaatgggaaaacaagaaggggatgccatagctccttcgggaaagaccgtcaccatcacttcccggaaaatggatgcagaccccgttcttataaccaaactcttcgaacggggaaaccacaaaatcggctacctcatgtacaccaatttcacgaaaacattcaacaccagtattgtaaaagccttcaacgaatttaaggaagccgggattaccgatcttgtactcgacctcaggtacaatcacggaggcgacgatgacgcctccacattcctatgcagcgcgattgttcccaaagaaaaagccgtggtaggtacacttctctccaaagaaacatggaattcgccctgccaagaaatatttgaaagtgactcccaatacgaaaacttacttaacaggtttttcgtggaaaccaattgcaatctggatttaccttcccagaaagtatatatcttaacctctggcgagactgtttcagcctccgagtacacgattgcctgccttaaagcatttatggatgtcgaactcgtgggaacaaagacttacggaaaatacgtcaccatgtacgctttctccccgcaatatgaagaaaatgggaaattagtggcagataaagaactggccaactggttaatatttccggtatgctcccgattcaccaatatcgacgggtatcccaactccttggaaggcatgacaccccaacacgaggttaaagaggatcttttcaacggcattcaacttggcgatgaaaacgaacccttactggcagaggccttagccctcatttccggaacacggcgaatgcaagtaaaaggcagaagcattgaaacatcccctgtatttaacatgctcccaaaatcattcaatgacatcaaaagcaaccggataattcacgtaaaataatcaagtcaacatagcaactatttagtaaaatattcataacttgcgatggtgtttatacagctaatatcacaaccatgtttatcagaaaatcggagaaaaaaggaatcataacattgggcattcttactatggcattattcgtgctaccacgaaccattcacaagagtgaatgcccggtcttcctaattccctattcccgactttctgatacgacacaaaccgtctccccaaaacctcttgtaatcgaactcaattccgccgacagcacggcattggtcagtatccggggcattggcccatactacgccagcaaaatcctgcgttaccgggaacaactgggcggttttcacgccacccgtcaactcaaagaaatgaaatttcaatacctgaataatatagattcattacttccccatttctccgtgaaccccgcgctgatccggaaaaaggaactggacaccatgagttttaaatccgttctacatcatccctatctagtgtacgaagatgttcaactcatcttcaacgccaaacggaaatacggcaaaatcaactactctatcctagaatcccaaaaagttttaccattatttaaactcaaaaaaataaaaccttacttcaaataattttgtataactttgtatagaacaatactgatagcttgtcgtaaataatttacaacactgtcatttacaacgcaaacaacacacataacttatagcgtatgaaaaaagtatttataacactagcaattattatcgtgctaattattgtcacactgatggttatacccgtctttttcaaaagtgacatcctacgattaatcgaggaaaaatcctcaaaatacatccaagccgaactagctatcggggacgtgcatctgagcatgttcaagaacttcccgaacctaagcgtatccttggataacgtggtcatttccaaggaagaaacgaacacacgggacactttaatcaatattcctcttttcgaggcatccgtaaatttacgttccttaatttccggtaaagaaatcataatcaataacattttattaaaagattgtgattttatgcccaaagtcaatgccgaaggaaaagccaactgggacatcatggttccttccgacacgacagaggtgaaaacagaagaaactcccgtggaaaccacggaagaatccagttcggaaactgccatcgctttcaacaacatcgaagtgcgcaacctgatgttaaactaccaagacgaacaagcactgacgtttgcccgggttgatgccgtgaatatggctttacaaggaaatttttccgagaccaacaccatactaaacgtgttattggaactcaaaaacatatatttgcgtcaaggcaagagtgtgtgggtaaacaacactgatttcaactggcaagccgaaatcggtgccaacttgaaagaactccaattcaacatcaagaaaaatgatatgtcattgaatgacttgaaactggatttaaccggaaacattgatattgatgacgacaaatacacgatggacttgaatctgaacgcacccgacacgaaattcgaaagcctgttagcgctaattcccaaagatttccagaaagaaatcgagggggtcaaaacttccggagaattccaactcagcctatccgcgaaaggggaatattacgagaatcatcttcccgcttttgacttgcgtttcaacattctgaacgcaaatctgaagtacccggatcttcccgaatcggttgaaaaaatcaatctgaaactggcagtaaccaaccccggcggaaccatcgcacaaaccaaggcagatttaagtactttgaccttcacggttgccaacaacccgttcagcatgaacctgcttgtggtcaatccggacgacccgacattaaagggtggcatgaaaggcgttatcaacttcgagagtttgaaaaaagccttaccgttaaaagacatcacgttaaacggtatcttaacaaccgatctctcctttgacgggaagtaccaatatatagagaaagaacaatacgaaaagttcacggcaaacggtaagattgccctgcaaaacgtgttgttcaagaacgcagacttccctgccggaatttccgttccgtccggagaggtaaccatcacacccgcccggttgaacttgaaagacttgaaagtaaaaatcaactcttcagacttcgccttggccggttaccttgccaactacctgccctacgtgttcaaggaccagaccttaaaaggtaactttaccctgaattccaacaaaatcgacttgaatgaattcatggcaaacatgacgacctccgagaccgacacgacacaggctgtaacaacacaaagttcggccccggcagaagaaacatcaagtgtactggctattccgaaaaacatagaactggccttcggcacgaacatcaaagaaattttgttcgatagcctcgtgataaactccgtcaaaggaaacatcgaaacatccggtggtatcgccacgctaaagaatctgagcatggatatgctgaacgggaacctgatcatgaacggggcctacaacacggcaaaccccgtcaagccttccgtggacttgaatttacggattaccgacattgacatccactcggcatataatgccttctcgttcatcaaacagagcctgccgattgccatgaactgcaacggtaaaatatccgctgccatgaaattcagctcggatctggacaaagaaatgagcccgatcatgacaacggccaatggtggcggtagcctctcaaccaagggatttgtcctgaacgataatccggccatgacccaactggccaatctgttgaaaaatgacgagttaagccgtttaagcatttccaacttgaaaatagacttcaagattgaacaaggaaatattatcgtggaaccgtttaccacgaatatcgcgggtaacccgaccaccttctccggcagccaaaccgttgatggcaaaatggattacacgatgtccatgaacattgcccggaaatacttcgggaaagacattgacaaagtgttgaaagccatccccggagccaacaacattcaatcactggacgttgatgtcaaacttggtggtactctggataaaccgacgattacccccgatttatctaaagcattgaagaaaatagaaaaagaagccggtaaagaattaaaaaataacctcttgaaaggcttggataaactattcaaataaaagaaacggaggagcgtaaaaaacattcaaaaaaagcaattctaaaaagaattaccacgctcctcctatatatttttccattaacatctcttgctgcaagctatgaatatccccggcataataatcggccaaagcggcatcacacaattttcgggctcccatcatagcctctttgccatagaatcctgcaaatgaaagtatattcacctgcacctttccacctttttctttaaaccgctcacaataccggacaatatccttcgcgtaaaacggataccgttccggatgcgccagcacaggacaaaatccccgtccctgtaagccaaataatatatcatccacgtaattagacggcccgacaaaactatgctcaaccaacacttctccccggttcgatgccatgatttctcccctttccaacaactccagcataaactcccccatccggtattccgccccggaatccacctctacacgcaccccctcttcccgcaagcgggacttcaacacgaacaacatactctccacatctttcggtgtatttatcatagccgggtaagccacgtggggcgtacacgtcaatcgtctcaatcccacttgttccatccgtttcacgatcatcacggcctcatccatcgtcttcaccccatcatccaaaccgggtaaaacatgagcatgtatatcattttcatactcgaaaaaatatcgtttacgtctattaaaaaacaacatgatcaagaagttttacgattcttattcccgtaaccataaccgtattgatagccgtatacataaccgtacccgtacccgcccgattcaacctttaccccgttgagaacaacccctaaatccggtaaacgcttatctttttccagctcggataaaagtcttaacgattcctttctcagcacattagccctcaccacgtaaacacaggcgtccgccagcttactcaacgtaaagccttctgccaatactcccagagggggtgtatccagaataatacaagaataattgtctttcagatattccaataactcccgcatccggggaccggcaaccaactgcaccggattaggtggaacaacacctccaaacattacatacaactcatcgctgatccggcagatcaacgattccggatcatcacacaatcctgccagataagccgacaccccttcccggtgatcccggtccaaaaaattatgcagactgggattccgcaagtcacacccgacaacaatcacccgccttcctgccttggcatatgcgttggccagatgagttgcaaccatagattttccttctccgggaatggtagaagtcaccataatcaccggggacttttgctgtttaagaatataactcaacttttcccggatcaagtgcattgactccgactgcataaaatcctcctccccaatcttcactttcccattttctacctccgggaaggttcccagcaaaggcaaacgaaccacccgttcaatatcttcagcactccttactttcgaatccaacatatccattcccagaataatccccacgggtatacacacgcccaacatacaccccaacaacaaaatcaacgatttcttcgggcttacaggcccctctcccgcatcaggatcttcgataatcttcgctgtcggcacataaaccaatttcgcaatttccgcctcttcccgcttttgcatcagaaaaagaaacaaattctccttcaactcctgctggcgggctattgcccggtattgtttctcctgcgtgggtactgaagtcaatcgttcgtccaccgaaagactttcccgttccaaccctttgatttttataatcaatcccttttccacgtttccgatggcctcccggatactactcttcacccctcgcaactgcatatccaaccccgtcacgatcgggttattctcccgggcactcaacaataatttctcgcgtcgtaatatcatttcgttataacgggaaagagcgttattcaacccgtcgtccgtcaaccccatattctccggtagcaacgagaactccccaccctcgttcttttccgtcagcaatcgaatacttcgcaccacgtccaactccgtttgagcctttagtaactccgttccggccaactttttcctttccatggcaaaagccgcatcagaagtcagatccgtcagcttattcgtgcgcttaaaacgttcggcatcattctctatcgttcccaattccccgtttattacctgcaagcgagcattaataaactccaccgtcttggccgaaacctgttgtttatccgtcaccccgttctggttatagcgatccaccaaagcgtgtatcaactctacacctcgtcccggaaccgggtctttcagcgcaatccgcacggcatttgtattcttttctagtggcgtgatgctcaaacttttataaaaagccttcgtggcagtttcgtatgaatccaaattgatccgaactttctgtaattcactccccgcatatctctcattcttttccacagagatacagtaatcccccataggaatactctccgaaaaatgtccttgccggatcacgtcccctttcggatccgtcacgataatctcgtcatttgcttgtaaaagaacgtacaggcaagtatcttttatgcactccggatgatcaaccagtatcttcacgggagactcgttgtacaactcatgtccccggaagaaacattcttgagtataacgtatatttaactccaaatcccgaaccacctcccgcatcaaattcttcgactgcaattccaccatttcattctccacgtacacatcccccgcccggaacaaccccaactccttcatcatcacgttcgttcccaactcaccctttttcgtgtcactaatcatcaccttcccgtgaatatcatacaccggcgtactgattaaacaataaaatagtgccgccgccagacacagcggcaccgagatgataaaccaacgccaccggactagaatcttataaaacaacttacccaagtcaatgacatcttcctgatcagactgtatttctctactgacattctcgttcataaaattgttactttatagattcataaatagttgcaaccagctcttccggctatcatcttattattaaagccaacacggccacgaaagtggatacacttgataatatataaggcaggaaagttcctgcgttacctcccacgatacgtccacgactcggttcaacatacaccacgtcattttgctgcaaatagaaaaacggggaatgtaacaactcactcgaagttagatcgacacgagaaaagactttctcgttcccgtcttctctcatcaccagaacattctttctcttggcattaatctgtaaatcacccgccattcccaaggcatcaagaatcgaaatacgctcgctatttaccttgtaacttccgggattgcgcacctctcccaaaaccgtcaccttaaaattcaggaattgaatcgtcacaatcgggttcttcaaataaccggacaacttctccttcaacaggtctgccaattcattacgagagataccgtccacctgcaatttacccaatacaggaaaatcaacatacccctctttatctaccagataaccagatgccccttgttgattacccgacgtgacctctttccccaaaccaatcatcggagtattaaacggcaaggcagcctcaatgtcatcacacgacacgataattgacaataaatcgtccacatgaatcacggtccgatactcacatgccgccttaatccggccatctacctttacatcctgcaaatagacgacttttttactcgaagcgcatccccaaacactcacgcaacacaacacgattataaataatttgtacacagacatatatacctttctttttatagtttacacgctatcattaaaccaacgatttttgatagtccaaaaagaaaggtaaaaacaaaaagccacagaagttcacctagtcacaaaagcatgtgtatgaatgactaagtaagaatgatgaagaaagaagaattattggatttataatattaagaatcgttcgtttatttgatcacaaatatatattttttttcataatcacacgaacaacaatatagatatttttcctactcaacgattagaaaaacgcatcatctcacaaccagattaccacttttccctcaagtataccgtttttcaaattcttcccttatacagaagattttacaagaaaaacggtattcaaagcctatcgccaaccctctatcacatttttatattaacaatcaaatccgggtctcttgaaataacgagccttcggaaaaaagtggtcgatctccaatcccaattgttccaaaaccacgatcaagtgagatatattcggttcaaaacttgacaaacgctccctcaaaaccatccacgcattttgagaaatctcgacagccaacaaggctaccttcgccgatccattataatcatcctcttcctgcgtggcattaatcttatccgaatagatataatacccgtacaacgccctcctaatcttggagtgaatcaaatccagataccaatttacctccaacaacgcatccccgacctctttcgttctgggagcatcaccttcttttatcttggcctcgtcaaaccattgataaatactctcttgacacttctcggccagagtcttataaatccggtcacatttcacaagatcttcctgttctatctgcctgaccgcctcttcatcctcatcttccaaatcctcgtaatcctccccccagaatccccgatccaccttctccgaggaataaatatcctctatccccatacctctttcctccgccaactctcgcaacacgtcaaaagtagaatcaaaaatatttttcagacgggctaacgccgactcgtcatcatccggcatctcctctcccaagttcactttcgtccgttccttcaatttcttccccatcatgtaactcatacaacgaagctgcaatggacaacgttcacaccatctgtcgcaataattgtagatgcccggcacgaaaccggtatctacaatctttttttcttttttcttaggcacgtctttataatcttaaccgattaattttttataacgtatacgtttcggggtaacatctcccaaacgttttctcttattttcctcgtattcggaataacttccctcgaaatataccactttggaatcaccctcgaaagctagaatatgagtggcaatacgatccaagaaccaacggtcatgtgacacaaccacggcacaccccgcaaagttttccaatccctcttccaacgcccgcaacgtgttcacgtcaatatcattggtcggctcgtccagcaacaacacgttagcatcctctttcaatgccaatgccaaatgcagacgattacgctcccctccggacaacaccccgcatttcttttcctgatccgtcccggagaaattaaatttggaaacataagcccgggcattcacttcccgtccccccaagtttatcaaatcacttcccccggaaatcacctgataaaccgtcttctccgggtctattgctttatgctgttgatctatatacgcaatcttcacggtcggcccaacttcaaatgtccccttatccggttgctccacgcccataattaaacggaacaaagtagtctttcccgcaccgttagggccgatcaccccgacaattccagccggaggtaacttaaattcaagatcatcgaacaacaccttatccccgaaagccttcgccacatgctcggcctcgatcaccttgtttcccaaacgaggaccgttcggaataaatatttcaagcttttcttctttctccttcacgtcctcatccatcatccggtcataagccttcaaacgggccttactctttgcctgacgagccttaggagccatacgtacccattccagctcccgttccagcgtcttccggcgtttgctggcctgtttttcctcctgttccaatcgttttgccttctgctctaaccaagaagaataatttccttcccatggaattccctcaccccggtctagttccagtatccaaccggccacgttatccaagaagtaacgatcatgcgtcacgcaaatcaccgtaccgggatattgatgcaagtgttgttccaaccattccaccgactcggcatccaaatggttcgtcggctcatccagcaacaaaatatccggttcctgcaacaacaagcgacacaaggccacccgacgacgttctcccccggaaaggaacttcacttccgcgtccggttccgggcaacgcaaggcatccatcgccctctccaacttctggtcaatctcccatccgccgtgatgctcgatcaattccgtcaattccccctgacgagtcattaacttatccatctcctcatcactcatcggttcggcaaacttcatgttcacctcctcgtactctttcaacaaatccatcaccccctgaacaccttcctgcacgacctctttcacggtcttggaatcatccaactgaggttcctgaggcaaatagccgatagaatgttctttcgaccagatcaccttaccctcgtaattcgggtccaacccggcaataattttcaataacgtcgattttccagaaccgttcaaaccgatcactccgatttttgccccgtaaaaaaaggaaagataaatatcctttataatctttctttgaggtggtatcgttttactcacccccatcatggaaaaaataattttcttctcgtctgtcatacccattaacttacacgatattatgtttcacttctagcacacaactaattatatttaaaatggatacaaagatatat

SEQ ID NO: 72 - DNA, 13156 bp, Butyricimonas faecihominis
gatttataatcccgtaacgtgaatcacgcaatcataaatcacacaatcatcaattagtaggctctcgcaatcaacaccctcttatgagaaggtttacctgttaccatacatttaccctcttcgtcgggagcatcgaatggaatacagcggatggttgctttcgtctcgttcttgatgagttcttccgtttccggggtcccgtcccaatgacacaggaagaatccacctttcgtatccaacaaggtcttgaactcctcgtaagaatccactttcgtgatcaatttagaacgacgttccaaagccagtttgtatatattttcctgaatctcttccaataaagtctcgatatgctgttccacaccttccaatggcaatgtctccttggtcaaagtatcacgacgagccacctcgatcgtaccgttttcaagatcacgctctcccatagccagacgtacaggaactccctttaactcgtaatcggcaaatttccaacccggcttttgcgtgtcacgatcatcaaatttcacgctgattcccgcggctttcaatttatccatcagaccactaaccgtttgacggattttttccaatccttccaaacttttatagataggcacgatagccacttgaagtggagctaatttcgggggtaaaaccaaaccgttatcatcggaatgtgacatgatcagcgctcccatcaaacgggtagaaactccccatgaagttgcccatacatattcctgttttccctctttcgtggcaaattgtacatcaaaagccttcgcaaaattctgacctaagaaatgagaggttccagactgaagggctttcccgtcctgcatcatcgcctcgatagtcaaggtatccaatgccccggcaaaacgttccgtttcactcttatgccccataatcaccggcatagccatccatttttcggcaaactcagcatatacacgaatcattttctgagcttcctcaaccgcttcctctctcgtcgcgtgagcagtgtgcccttcttgccataagaattcagcagtacgcaggaacatacgcgtacgcatctcccaacgcatcacgttagcccattgattacaaagaattggaagatcacgataagactgaatccaatttttataagtattccaaataatcgtttcagaagtcggacgaatgatgtattcctcttccaatttggcagcaggatccacaactaccccacctccattcggatcattttttaatcgataatgagttacaaccgcacattctttcgcgaaaccctccacgtgatcagcttcttttgaaaagaatgatttgggaattaacaacggaaaataagcattactatgtcctgtttccttgaacatcttgtccaattgctgttgcattttttcccatatggcataaccgtaaggtttaatcaccatacatcctcttacagctgaattctcggccaatccggcctttacgaccagatcattgtaccattgcgaataattttcttctcttgaagttaaaaacttagccatctcattattttttgataaaacagcagcaaatttaaaacaaaaactaggaaatccgattattattttctatttttataacatagaatacaaaacaagccgcacacgtatatttataacaaagaagcaacgaatgaatggtacgcattttgttagaagtaaataaaccaatcgtcaatgaatttgtcatacaagaaaggaattaatattattactatgaagatagcattatatttttcagcattagcaatcctattaggagcttgctcttcctcgcaaaactttacgcgagcgcaggaagatgatatctactatgttcccggtaaacgttccctcttcgctcaagaaattaaagacaagaccggagtggacattacctcgaatacttcttctagttctcaaatcagtaaaaacacgaacaatgataaagtttatccgaaggaaatagataacagtgtaaatccaaaatctcattccatcggtatggctcgttatgcaactgaaaaacaggtgcaaaaagaagaggcccgaaccggacaaactgttaaccggattgctgttccggcagacgacgggtactggatcggaggctttaaaggtagtgaaaatgatttggaagaatgtgtccggatcatgaatcgttacccggaaggtttcgcctatttcggaaacgggtacgaaattgcccagaatctttcgttcagctccgactggaacgtgtacacgattgacggtcgctactggtggttccccagcagttcgaacgtgggactatactctcaattaattttcggtaattacccaaaatacatttggaccgtaatttggaacgatcctcgttttgatagtttcgcatggagtaacaacgtaagttccggttggaaccgctggggatggggagcttcgttcggttggggtaactcttggggatgggatccatactggaataattactacggttataacccgtggggttggggacatggtttctacgatccatggggatgggatccctattggaatcactactacggttattatccacactggggacaccgtccgggacatggacatcacggcccgaactggggtaaccatcgaccggattggggtggtgccagcaaaccgactgtaactactcggtatgcacctaaaaaacaatacacgacgaatagaaacgcccgttcgtacagtacctattcaagaacttcaagaagttccgctatacaatccagatcaagtagcagccgttacgagtctggctcaaactacaatccatcgcataacaactccggttattcatcaggaagttattctagaggaaatagcacgggttcatatggaagtagttccacaacacgttctaatagtggtagtagcagtagtggcggacgtgttgaacgtacaagcaccggacatagaaaataaatttgtagaatcaatatttagaatatgaagatcgcatatatactaacactaatgctctttttctctctttttgcctctgcacaaaatgaagaagatgcaattagattctctcgaatctctcctttcggaacagctagatcagcagcaatgggtggtgcatttggtgctttaggaggtgatttatccaccctaagtacaaatccgggaggaattggtgtatttagaaaatcagaggctagtttcacatccatgcttgactttgctcatgcaaaaacaggaaagtttgactatgaaaaaaatatgtatttattgggagatttaggtttcgttctgtcatttacacccatgagtgacaaatggaaaaacattaatatcggattcaattatactaatctcaataatttcaacaggaacatttatcaaggtaattttatatcgaaaggttcttctatgattgatgtatggaaagcagaggctgatggaaagcctgtaagcgatttaaatccatttaccacaagactagcttatgatgcttaccttcttaatttaccagaaggaagtacgaataacatatatgatattccaatcaataacacccattctgtagaagagttaaaatacacgaaagaaagggggtatcaagctgaatatgccatctctgcgggagctaattatgacgacaaattttattttggtgccacgttaggaattcagtctcttcatttcaaatcttattcatattacactgaatgggttgtaggagatgaaattgacagcaaattaaagggtttcactttcgatcaagattttaccactagtggtactggagttaactttaaatttggaatgatttatcgtcctataccagcaatacgtatcggggcagctatccacactccaacatattataatttagatgcttatgcgataaattgggtttcatcagaatttgtagaacttccgtttgaaggagctgatcccggaaatgatctaacttatggaatgtatcaagaaaccgattattcctacaaattaaaaaccccatggagagtaataggaagtcttgcaacagtcctcggacaaagagctattattagtgctgattacgaatacattgattacacttcggctaaatttacaaatagtggctcaggtaacgagtatgtcgcaactaatgatgccataaagactatttataaaggtacccataatttccgtgccggagcagaatatcgatttaatagcgtattctgtctacgaggtggttatgcttattctgcctcaccctacacgaaaggagaaatgaatgaaaagaatgacattcaaacaatcacgggggggttaggattaaattttggagtattctacgcagaccttgcctatcttcacaagaattccaaattaaacggtctattctattactacgaaacctcaaaaggggaagtaattgaatcacccgaatttcaaacgaaattcaaagataacgaattcaggctaacattaggaattagattttaataaataagaaagaggtctgtctaacgattttgttgttaaacagacctctacaaacattaacatcacacactatttcttctttcgcattggcttttgtgccagattcttaggacgcatactatattcttttgcaccgaattccggtttctccatgattgatttcgggaaaaccttctccgcacccggagtcaaacgaatcaaacgttccaataaagcggcatactcctgatgaatatacggatcttgacggtcgtcactgttataagcaatatattgtagataagagacgcacctgcccaaccattctaccggagtctccggggaccagtaactaccacgcacaataaaacgaagttgttctataaaatcctgctgattgatagacgtatcagccatcgtggcacggatcaacgcatcggtttcatcatattttttatctcgaaccaaggcattaatttgtaccagatacttgttcaaggatttccccttaaattccggtaacctatttaattcttccaaagaaatattacgagtctccatatacagcttattatccacaacctcttttcccaaagctttcacgaaaacatcataatttttcactaattcttgaaaataaggattatctgtacctcttatattagctttaaatatatcccagacatccgaatccgttaattttgcctcctttttaatcaacatatcaaaagccttctgcacattctctcgttcataaatcgaggcattataatgaatataattcttcaagaactcccggtcgtcacgccctttagcaaattcttcaattagataaccggaacgcaattccggtactaatgcactttttcccgtggcaagaaactgctcggcctcctgacgagatttactctgatgtaccacatcaccgttcttgggatccacaaacacgtaggttgggtaagaattcacgccataacgcttggcaagctccaccccttccccattctcggcatcaattttcatattcacgaaattcgtgttataaaaatcaccaataaaggggagaatgaatacattctccgccatatttaaacagggaccacaccattgggtgtaaaaatccacgaatatcaatttattctcagctttagccttatcacacgcttctttccaagttccatgataaaactgaataccataatccaacttcgtctgtgcaaacgaattgacaatcgagacaacaaacaatatcaaaatcaatcgtttcatactcatacatttttaatatcctgggttcttttcgcaagcagtatttgcactcgtctccgatgtaggaatattgtatattttcttccattttaattgagtcaaataagtttcggctgcactctcacttattgcttcttgttcttctagatcctcagcaatagaagcattcatttccaataaacggtcgaaacgttgcacggcaaaccattcatgccaattctcaaaagccatctcaatccaccactctttgaaaatctcatccagtaattcttcatgtgtagatggcgtagtaatatctgaacttccagctcgttcacgtaactctttcaccggagcccaagcatcagcaatggctgcattactccttgccaatgactcagccttgattaaatacaactcagcagtacgcaaaaagatcacaggaacggcatctccggaacgatacattttgcttaccacattcacgttctggttttcttctttgtaggtgatatccttattcgtgataaccatatctttacgcggatcaccttcaattatattcatgtaagattctgttgctccccaaagcccggaattaaaagcttgctctggataataagttatgtaagataactcgtctgaaccaaaatcccgacagaaaatcacctcagtagaagtttccgtattcgtaaaaacatttgaaaaacttgcatcaagtgggtttacagaagtaatcgcttcatcagccgccgttgcagcttcagcatattcgccttgataaaataaaacaaccgctttcaacgctttggccgcctgtacagaagccaaagaagaagtcgtgtattccggtgcctgattaatagctatctccaaatgcccaaaaatctcctcataactttcagccacagtagcacgtgccttcacggcattcgacacggaaggtaattcgtcacggattagtactccatatgtacttgacatatcccagtattctccaaactgacgcaatactctaaaataagccaaagcagaaaggaaatgacactctccgataatttcatctttccgtccttcctcaaaatcactatcattaattccttctaaagcagtcaaaagataattaacatttttgataatattataatcagcatcccactccccgtctccaaaggaactataagaaagtattggcaagttacgctctgaataataaatagcattaccggaagtaataaaactcccccgtaacatggctcccgacataaaactaccactcaacgttgtgaacaaatattccaaactcttactaggtaagtaagaatacactccatttagagcaagttcagccatttctggggtagtgatcgccccttccaaatctaactcgtacattggatcttgctcaagtacgtcaaccagttgacaattagcaaatcctacaattatagcaaatactatcaatatctttttcatattcatcaaaatttagaagttcagttttaccccaaaagagaatgtgcgtgaggatggataactccatccctcgtaattcgacccgtaattggaactagccgaaccgatcgtactcgggtctaaaccgggatatttagtaatcacgaaaaggttacttgcggtgaaatagatttcccctgatttcaagtatttcccgttccataaacgtggaatgtcgtaagagagacgcaattcctgtaaacggagattcgatgcattatgcaattgatgatctgtcaacgatgcacttgaatcaccaatatacatagctggcaatttggcatcaggattatctacactccagcgattgtacaaattgtaatcaatcaagccactcaattgatttggaagattctgcaatgtcttattaaataactttttacccccgatctgaaaaccaaaatgcgtgtaaagacttaaccttttccaggtaagtgtagaagtaagtcctcccgttagatcggcttccggtgaacctatcacaacttggtcataattgtcaatatatccactattatccacgtcacgaatcaatagatgacctggaagtagcccggaaccattgtaggttgattttcccgcagcaaccgctttcgcatttaattcgtcaatggtttcttgattttgaattattccatcgtattcataacctaagaaaactcccatagcatatccctccacgaggacttgatttccagacccctgtacagttacatccattccggttgcaataccaccatctttctccaacttagtcactttatttcgattatgggccatatttaatcccaactcccaattccaatctttctgtccgcgcaacaagttcgcccgaagagaaatttcaatacctcggtttctcaccgcaccgatatttctcggtatatcagcaacagccaaacttgaaggaggagtataagtccaaatcaagtcatcagtatttttcacgtagtaagcaatactaccactcaaggctgaacgaaatatagagaaatcaattcccaagtcatattgtacagtggtttcccacttaatatcacgatttcccaattgactatgcacgatagcaggattacctagatagctacttgtagaataaagatctttgtttgcataactacctcgatcaaaattctgtactccggtttttcccacactaaactttattttcatatcgtccaagaactttaaattcttcataaaactctcatcacttattctccaagcgatagccccagatgggaaaaaaccaaaacgattattagaaccgaaagaagatgacccatcgtaacgagccgtgaaagtaaatagatatttatccagcaaccgataattaatacgagcaaaagaagactgcaagccataaacagtaccgctaccattcttactttcaaattctgtcgcattggtaattcctgtcaatatctcatccatcgggtaattgctcacgtacaaaccgaatccccggtctttggtacgctcaaacgagataccaaccacagcgtccaatgcatgaatatcattaatgtttccggcataagacaaagtattatcaaataccgtggtaaacgaacgactggtactttcacccccgtatccattattatcggaagtcaaaaaagttggtgtatacgtctcggaaaaagacatactttgattcaaagacaaggaagttttcaactttagccctttccaaatattcaactccaaaaaagaagtagaaagaatactataattatcgctataactccgtttctcattttgtgctaccggattataagaagtcccttccttaaaataagaaccatcttcttcgtaaacgggataatcaggccggaaaccgattgccgtgtaaagggaagttcctgcagaactcacatccgtataccctaaggttgtagaagtcccgaatttcaaaaaatctgtgatatcataatctagattgattcgaccagtataacgggtaaaactatcatgtttaatcataccttgataatccataactcccaaagaaatatagtaactagagtgatctcctcccccgcgtacagatagatttaaatcatggcgataagaaggttgctccaactcttcagcccaatccgtgttaccatctttcaattcatcacttccctcagcaagtattgaattagccatttcattatcagcatcaacttttaacgtttgttcggcaacataacgcacatactcacgaaattcatccccattcagagctgaaaaattattcacccgagaatccacgctaaaagagtaatttacacttagacccggttttcccccttttcctcgtttcgtggttacgataaccacaccattagcccccctagacccataaatagctgctgctgaagcatctttcaaaacatctatggactgaatgtctgaaggagaaattgcactcatcacatctgaagatacgggcattccatccaccacgtataacggttcattatcaccactcaacgaagcttctccacgaacccgtactcggattttctcattcggattggatgatgccagagaaacaacaaccccggctgccgcattctgcaacatggtctccacattggttgcggttttcttacttaattgttcctcgttcaaagaggccacctgtccggtcaaatctcttgttgcagtaacaccatatccaacaaccacaacttcgtctacaccgacagcctcgtcctccatgaccactttcagcggggcaggattcgacaaacctttcactttcacaaattgttttttcattcccacgaatgaaaattccagttcgatgctctcggcactcggcacggtcaatttaaaattaccgtccaaatccgttgctgttcccaaggttgtacccttcaccaaaacggttgccccgataattgccattgaatctttatccaccactttcccttcaatgacaatttctttcttctgctcgcttggcacgggctgtgtcgggattgattcacaaatcacaataatgtctccctcgaacttgtaggaaagccccgtgttcgctaaaacccgattcaaaacactttccacggcctcctgttttgccttcacagatacctgtcccaaatgttgtgtcagttccatgttatacacgaaagacaaagccgtctgtttttgaatctctccgaacaaggtccggatagacacattctttaaattcaaatttactcgttcttgctgcgcacttgtattagcaacaagggtgaacgagaacacaaaaataaatagtgcagtcaatttcataactaaccattttttttgtcctccatgtcgccaaaaaaaggacataattgatttttttttcataactttgaacattataaatttttacttagtgataagaaatgcgccaacatgacttatcaaggttatcaaaatacccggaaggtctcgaacaccttccggtgttttttatttagaaatacaaatcgttctatcttttattgtaaaagtgacgccaaccgcacttttaattgcttttaaaatattatcaatctgatcataacgtttcacgtgtcccgtaaaatgcaaattctttaattgctcgttcgtgtaaaaaacatccacgtcataccacaaagaaagcgtgttcatgatctgctccatggtttgattttcaaacacgaaaaagccatctttccaagaaacataaggttcaatatctaccgttttcacgttcacggatgcatccgttcgcctgtattctcccagttgtgaaggtttcatccggtattccggccctcccttttcagcgctcaatccaatcgatccttccaccaacgccgtctgcactcgctctttatcatgcgtgttcacgttaaaagatgtcccgtacacccggattttgatcccgtctgcaatcacgtaaaaaggacgcttttcatctttctgcacttcaaaaaaggcctcccccgttaaatatacctctcttttctctttatcaaacaccaccggaaatttcaattgagtgccagaattcaattgtaccatcgaaccatctgccaacgtgatttggtactccccacccctcggtgtttgtaatacattatattgtaaattcctcttctcattcccatttgcagaatacacgatcccgcgaccggaattcttcgcattcaccccctcacccacgactatatcacgggttgtatcatgttgtaacactaccgatttcccatctgccaaaattagggttgccttcgtttctcccggaagaatatccacggtagcaacctccacgggttgttcgcgttcattatttcttaatagcacgaagatcgtccccaaaggaagtaataacatcgccgcatatttcaaccacactccgatactctttctctttattccggctcgtttttcacaacgctcgtaagctgctttatggtcaatttttttgtacattctatacttgtataaaatatcctttcccttacaaacccggtcaaacatggcccggttctccggaaccgcatccaaccatttttgcagttcctgcatctcttcatccgtaatcaccccggacaaataaagatgcatcatttcaaccattctaaatttacaatcatccattgcttatcctttttctataattagaacaacaacctatttcaagagaggtacaaaaaataaaagaaatttcatcccaaaagcgagattctttacgaacaattcattttcaatagattacaaaacaaaaaaatcagattattcccaaagacatcatcacgaaatacacccgtcccaaacgttcccgaatatatgacatggcccgttttttctgtgttttaaccgttaatatggataaattcaacaaaagagcgatctcctcgtttccctttccctccaagtgcaatagaaaaatatttctacatttatccggaagttcatctatcgtcttgaatagcaagcgatacaactcttcctccatcattttcaaatcaatatcatccccttcatcctcaagattcaacgaggcaagatatttctcctccacgttcttgtgtttcaaatgattcaaaccggcattcttcaccgaattatagaggaaactacgaaaagcattgtaagtcggatattgggcatcccgttcccaaacggcaataaacacctcctgcacaatatcctccgccacgtcctgttgctcgacaaaccccatcgcaaaaagaaccagcgaattataaaactcgctgaataattcacgaaaagcttccggctgcttcgcatttatccgttgtaagaactgttcttccctctttggcatcaatacaattttcaatccaattacaaaattagaaattcaaatgaacaaacctatgaatcataaaaaataaaattatcctctatcataaaatgatcgggcaaaaaaaggaccgattcctatactatatagaaaccagtccttcaactatgtaaactacgaagatcttattaacgtctaaacccgttctttttgtaatccttggaatttcatctcgatcattccccgccaataatggaaacctccacacaaaatcttacacatcagcacgcattccgttgtctgtttccggatcaattgtaacgaagaagtgtataaaagtcgatccaagttgttaacacgtatccggataatcctttgttcagacatcccggtggtacacgtcaaccaatccacatcgaacatccccagaagagaataacaataaaaggcagaatgctcgtaagcataccaattcccatcctcttgataaagaaaaatatattcttcattccgtttttccttttgcaatatctcttccagttccatacacatctgaattttattgaacaatgattattttacacgcttttgtcttaccgccaacaaccgaactcatctgcaccatcccgctcctgttacttccaaagccgatatgcaggtaagcatgagt

SEQ ID NO: 73 - DNA, 13130 bp, Butyricimonas faecihominis
aataaatatcttatttttcatcataacaaataatttatccgttcaattaaaaattaagagtcaacgaccaagaaaaggttcgacgagcgggccaagttgccgtctcaggatcacgtccttcccacgctttgtcaaaagcaataaaaaatggattagaaagagaggcattcaccgaagcccgtctgaccccaatcttatttacccaagcgtcaggtaaatcgtattgtaaagaaatctgccgacaccggataaaatcagtatcagctacccgcaagtctgactgattgtacattgcgtaaggactcatggaaacataaccctctacgggtaattgaatagccatttcatttggattcccggctggaatggaaggaatattcgtgattctctcatcccccggttcccgccaacgcttaaacagataacgcggggcattctgctccggccgcggagctcctgccgtggcaaaaaattcagggagaagagcctgcgcaccgaacgacatggcaaaactagcccgtaaattcaatctcttgtaccgcaaggaggtattcagacctccggaaatatccggttccaagcaacctagtttgaccagataatccaaatcattctccgtaacgtctatatccaaatttttaaatgtaggtcttccgttagtcgggtccaaaccgttaaatgcaaacccatagaaagtcccgtatttttccccatcaacaatagccgttccattgagataatcatcacgtgtattttcccgttcattattccgaatggtattttttaccttactcgtgttgaaagaaagagaccacgtaaaatctttcgttcttaccggagtgacactaatagccaattcgtatccggtattcttcatggtcgttccatcaacgtaagcattggcgaccccattttcaatcggaacatcccgcgaagccaaaacgtgactgatcttattataccagctaagacctgcactcattcttccttcaaaaaaggagaaatctactcccaggttccaatcttctgttttctcccatcccaaatcaggataaggtaaggataccatttcaagggtatactgttggaaatatttatttaacccgccatctttagcgatcagatagggagaaacggcttccacggcatttccccgccaaccgtaagaaaatgaaatatcaaacatatcgtaccatgaagaagcccacgtcataaacggctcgttaccgatacgccattttacaccgattgacaaactgggattaaacctgttattttcatcctgaccgaaacggttagatgcatccaaacgagcattgaaattcaaaatatagcgttctttataaccatatacagccgtgaaatactcactaacggtgttattcttcgttgttgtcaccgtggttcccgcacgcatttcatcatgaagatctcgtgaatttttgagtaaaccattggcagccgttatttccgtgggaaccgtggcaaacttttctccccggtaatatagataaccatagcgcaagtttgcattcccatcttgttccacggaatttacttggaaacccaaattcagggtcagtcgatgatcttcattaaatagcttattatagactaaactacttctaaaagaatagtttttagtttgagcatattccgattgcaataaacctccaaacggaagaatactggcatattgctccgctgagttaggtagaatttctcccacctcataaccacgaatctgggcaatataatgcgtgtactccgttgcccatgatttgattttattcgtcgctatagcataagatgccgtcgtctgaaattccaaatccttcagtaaattccaccgtaggtttaaagctgcctgcaaattcgtaccgtccgtttctgttccggaattatcacgttcatttagaatgttatagttataggcaactttatcgggaatggaatagcttgttgctccagctttttcgtaataatacaaagacccgtcttcattataagccggaatgtcccgtgccgtgttgagtgcatattcataagggcttactccaaaagcaaagtctttcgtctcacgataggtaccatttaactgaagatcaataatcaaacgctcatccaaccggaatgtggtattagaattagctgttaatgttaacatatcgtttccttttgcctcgcctttcgtgctattaattcctatcgaaaaacgactggaaactttttcgccttgtgctgatatactgatattatggacatgactgaaactgttccgaaacagaatgtcaaaccagtcggtattcatattctccattttccgatactcctgctcgaattgctgttgagtaatctctttcttttgcaatttttgtatcaacccggcatacccgatcggctggatattctggttgtagctatcccgatcttcccataactcccgagaaaatctcatatgctcttgagaattcatcatgtcatacatacgataactaggtttcatacccacgctaaaattaccgctgtacgagatattcagtccatctccttttgctttcttggtcgtgatcacgatcaccccattggtggcccgtgttccgtaaatagccgtggctgaagcgtccttcaacacggtaatcgtttcgatatcggcaggattaagccaagaaatcgcattacttgccgtttcccgtaacccatccatctcggaagaaataggactagcatcatccggaagaggaagaggatctgtttgtatcaccccgtcaaccacccaaagcggttcttggtttcccaacaacgttgaagttccccgaatacggatttttggggatcccccgacctttccggttctgtttacaacagacattcccggaatcacaccttgtaacatctggtcaatcgtagcttccccggccacctgtatatcctccgcacgaatttgagtcacggcacccacataactaccgcgatcgatggttgcataaccggttacaatcacgtcgtccaaggtctcgacatcctcctgcatcacaacattaatcgtatctttaccagtatataccacttctttcgtcttcattccaataaaagagaaaagtaaagaaaacttctccgttttaggaagcgacaaagtatattttccactggcatccgtggcagttcctatcgtcaatcccttcacgatcacagttactcccggtaaaggcaatttattattatccgttaccaagccgacaatctgaatatctttctttttcttatcatcatcctttacctcctctttaggtacaatcatgataagatcatttttaaatttaaacgttaaatccgtatccttcaaaatacgattcaacacctcttccacggtttcattctccacccgtaacgacaactttcccaattgtttcgtttgctccggattaaagaggaaacaccaactcgtctgtttttgaatttcatccaacaaaactttcaccgacacgttcttcaaatcaaaactaacccgctcttgttgagcaaacgagctagctgaaagtgtcaacgtgaaaacacagataaacaagagacacaatttcataagcatcaaaagttttttaacataccctcgataaaatcgatggcataattgttttttttccatacatttgtaaattagaacagttaaactttcaatacgtcactctccaacagcgacctattgatctcattaaagttcaacgggaaggctccaaccctttccgttttttatttagatactattatagtttttccgtttatcgtaaagtttactcctacaacctccgtaatcgcgttcagaatttcagatatatcattataccgtttcatatacccggtaaataccagttgtttagcggattccgactgaaagaacacgtcaacatcataccaaagtgaaagcgtgttcagaatctgttccagactctcgttctcaaaggtaaaatacccgtctttccaaaccacatattgccgcacatccacttctttcacctcgaatgttcccgcattccggtcaaaactagccaattcccccggtttcatcgtaatctccccggtcattcctctttttttgatcccgaccttaccgtcaaccaacacggtgtgaactttccccggttgatgcgtgttcacgttaaactcagtcccatacacgcggacctgtacctcctccgtcaccacgtagaaaggtcgatccgaatccttcgtcacctcaaaataggcctctcccgacaaataaacctttcgttccttttcatcaaagcgcaccggatatttcagttccgaagcagaattcaaatagacattcgtcccatccgataattttaaccggaattctcccccgcgaggaatctttagcgtgttcatggctaacgccacttcttgcaccggggcaactaaagaatcatattccaaattagctcccccttgtttaatcaccacccctttttccacttctatctctcgctgcccctgcacgccatttaactcgtgaacggtttgatcggccgtgatcaataccgccctcggccccccgggagtaattttaaccacacgttcagacgctattggaagcgtattcttttcccgatttaaaaacaaaaaaaccgtaacaaccgccaacggcaacacgatcaccgccgcatatgtcaaaattctcctgacatagacacgtcttttcctttcccgggtggtaattttaaacttttgccaagccacctcgtcattcaacgagcggaaaagagaactttcagaagagatgcgaatttctttcttgattttctcaaaaagtacctgatgctcttccgaatcacgtaaccatgcctccagcttcccccgttcctgttcggagagttctcctatcaaggaatgtcgtattaaccgggcaatattttcatcgtacagatccatgatgtcttctttattttacaccatatacaagaaagggagcaaaaagtagcaaataaaaacctattatttttcttaaaaaaaattacacctcgtagatataggtgtataaaaggaagagatttcccattttctttttgagaatatgaatcgcattttgcttgtgagacttcacggtcaacacggagattcccagtatttcagcaatctcatcattctttttcccctccaagtgcaattcaaaaaccttctgacacttttccggcaactcccgaactgccatatataattcccgatagatttcctcctgcatcaagttataatccccctccgtctcctcccccgtggttttcacgtaagaaacatatttatcctccacctgtttatgtttcaagtaattggtacacttattctgtaccagctcgtacaaatacgctttcaaaccttgataggaattatatatctttttattctcccacacggtaataaaagtctcctgcacgatatcctccgccgcatccagctgatcaatgcgtcgcatggcaaacagcaccagataattccggaatttcaggaataaatcatgaaaagcggtctcctcttttatatttatacgacgaataaaatcttgctctgtaccattcattttcactaccataggatttttgacaaagataggttttcggaaataaataaacaaatcgctccaatcatcctatgatcatctacaaaaaaaaataccgaccggtacattatttcccggtcggcatactcatacaacttatttcctatcgtccccttctccttaaccagatgaacaaggaaaggaaaagcagcaatcccgggaaaactcccaataaagcgtaatcaagaatctctgcacctgtctctcccacaaataacttccgatcaatcgcatacggacgtctcacatcaataggcacctctccatccgacaaccaaaagaaactagcttgaataatcacggaatttgctgtccacaaaggacttcgaccgcgagtaagttctccatcactcaagcaatccgcatcacccaaaataacgatcttttgttctcgttctcccattttacgagataatgccaaagctaacgggtaagatttttgtacctctcctgcggccggattatacacaacctcttgatcaacaatttccgtattctccaactcgttccaacaaattgaatcagacataaacaacggaacaacatcaaatcctttatctgttgtatattccaatccagcagccgtaggcatcgctgccacgtaataaggccgcataaaaccgaaagcatacgataactccactgcatcctttgtcggttgcgaaacaattaaatctattggttgtttctgcgcaacgaatccagcaaatgggccgagatccttattatccttcttttcctcttcaggatctttcggtttctctggctgaatcaaaaatccatccacaagcttcacaccaaatggttccatcactgctcccattgcatcttgccgaccgggttccccaatgattaccaaattacctcctcgagcaacatatttatcaaagtttactttctccgcttccgtcattgcttcacgcatttcagcaataaccaaaatattgatatcttcaggaatctcttgatccaatgtaacatctttgtaattaaatccctgatttaccaatgcctgtctcaacatcggcaagtgggtaaacatacaataattacgatctccggggcgatccgtttcccgttctccgtgaccagataagaaaccaatcgtgggtaaggtcatgaccatccgttttaaagcagctgaaatttccgattccgaaggaaatatttcacggtcatcatataatctcaaaaaagttttctctccagactcacgttccaacaaacgtacagtccgattcccttccgtagttctcaaatcaatctttgcccgaatttgttctggagttaaaatcttcttcggattcaatttttccatctcgatcaccttcttcgctttctcctcataactcattcccggaaatgcccgctctagataatcattttttattgtatcataataaagtatatacttcatttttatttccggtttaaaacgcgtatattgctcaaaacggcgaatatcattgttatattctttcggataacccacccaattatacttgtccaagatattcacgtaagtagtaattgtcaatcctcctttcaacttgtttatgatttcttgactattaggcgtcaacgtatttgctttcgtatgagtggcgtcataataacatttaaaaacaggacgagaagaaacaaatgccaacacgacagctatcccccatactcctgcatatttacctaaagaagttaaccaactgaccttttgtcgccgtccctgcatacggataatagtcatcaacaagaataacaccacaaccacgataaaataaagcacatcctcactacaaatcatcccgaacataaaattatcggaacgccctgtcatcccaaaccaataagtgacttcccgaacaaacggaacagcctgccacatcccttttacatacgtcaacacggcaagtaccgccaacgttcccacggcagcaacaatttgataagatgtcaaactggacatgaacaaaccaatagctacataagcacacaacaacagataaacacctaaaagtcccgtcaagaaaacaggaatgtccatgttctcaatcgtgcatacactatagattccgtaaaccaataaaacaccgaccaagatcagtccataaattaacatggcgcaatatttacccaaaataatctgggcattcgtaatcggggaagaataaagcaatttaatcgaaccacttcctaattcccgactcatcagccccattgtcaacaaaggaatatacaaatacaaataagactgtacagcgacaaacaaacctctttgcccaccaaaaataccgagagtcaaattagatcctattccccccatactttgggattgcacaatctctgaaattgttccggaaaacaacatccccgtttgaaacgtgaatataatcaaaatcaaccaagcaatcggggaataaaacaaatcccgcaattccgttttcgctatcttaaatataattctcatctttactgcaaataaaatttaacactatttcttggacaactcggcaaaaatggtatccaacgaacttttctcctgttgtaattccattaattgccaatcgcgcgtataactagcttccacaatactatttattgcctccttgacatctgaaaattgaatacggaacctcgggccacctaactcctctacacgaacaaccccaggaagagcctgtatgtcagccaccaacgggagtgctcccaacgaaacgactaacgtgttcggttgtatataattatcaaattcttccaccgttccggaaaaaaccatatttccctgttcgatcatccggatataatcacaagttgcttgcacttccggcaagatatgagtagaaagaatcacagttcgttcttccgctatctctttaatcaaatgacgaatctcgacaatctgattcgggtccaatccattcgtcggctcatcaaaaataaccaattccgggttatgaataatagcctgggctatccctacccgttgctgataacctccggataaattatgaataacccgtttcgcaaaatgagaaataccacaacgacccataacttcccgcaccgcttttttcacctcccgctccgggatatgtctcaactccgcacaaaactccagatactcctccacagtcaaatccggatgtaacggcggcacttgcggcaaaaagccaatatgtcgtttcgcttcaacaggattctggctaatactgattccctttatataaacatccccctctgtctgttttaacaccccgcacatgatattcatggtcgtggatttcccggctccattggagccgagtaacccataaataccatttttcgttatctcaaaattaatatcccgaatcgcccactgcacactatagcgatgggacaaatgctccacctttacaattgattcttccatacaatatgattttatacaaacttctgttaatattcatctacacccgtcactcccgtggccatctctttcgccatggttatctttccgtcaaacgtcattgtttccacacacttcggtcgatctctatccgagatgtcataaaacttcaacgtgccattttcacctccgacaactaacaagtcatacttacctatcgcaccgacatcagaggttccatatccgatataggtcaccttttccggaaaatccgtaatcatcgacttactcgcatactcgctagcaacaagtaaataattcacatgattgccatccgtatataccacttgattcttagcttttgcattagatgacgaacaagtaactaatatcaaagcatcatcagaaatcctgacagggcactctactacacgagaatccgctccctcaggataaaaaggaaacatcggagcaacagactgcactatagaaccgtcagacggattcattataaactccccacaccaagtctttcctgatgcatcattataaattacagaatatacattaagacttgtcgtaaaattcaacattgcactcttcatatatcccatattcaatactttagtcccattttcaaatccccaaaccggaggacaatccgttaacgaaccattattttttaaaggaatcaaactcgtcgccaaataggagggatctccccagccacttccagcctgtttcgaagcgaaagcaatcataatcagccgattattcttttcatcccaacaaggaattgaggtaaatccatacaaacgggtaccgaattccgtaattttataccctttttcatccaattcgtaaggagtattgataaacatccctcccaaattattttttgacaattgccgtctgtaaagcttaccgtctttattggctaaaaaagtacataacccagttcccttataagcttcccacgcatcaaccctcgcaaccggagaaaacccggacgggactcctcctccgaacaaatctttcagttcggaatgtaattcgaacgtagcggcatccacttcataagcaacctcgtcagtcataatcgtaaccgaccccatcggtcccacattcttagccgttctagtatatcccaagaaaacaggtttgccggaaattgacaatgcatttatttcactaaaagaatcctgcaattcaaattcatccttcaattcctcccgattatatgttctttttacaaaataacattctccttcaccttctttttctgttaaaacgaaccagtctccattactacgatacggtgttataaaaaaagaaaccactttcatgaaacgagtttcaaactccttatcgataacagtaaatgaacctcttacccatttgtctgtagcacaaagttcttccatctttgtccatttaattacgctatccaccggaatatcaatatctgcttctgtagctataaccacatcattcaacttccactcatagcgtacttcccgctccctcgaaacagaatccgtatcccatctaaaagcatcatgtccgcgcagtttcatcacgttatgctctgtcgcatacacgcttattggctgatctgtatgccatttaggctccttaatgtcgtaataatcataatttccctcatcctctaaacaaccaaatatcaaaaaaaacgacaaacaaaataatatatgaatctttctcataatagcaacttttaatcattaaatcacaactgttatatcgttaccatactcatctttttgtccgggattggcaatcagccactctttaaattttaaaaccaatccgatagccaaatccggacgttcctctatcatcttttcgtccattgtcataccgggatcagcatgttcaacgaaaagcttatattttgtattggaaaacttccctaaaagcgtaagttcaacttcaccattctctttccaccaatccggtctttctgccacataagaagaaattatcacagcacgacggcgttcatactgtcccaagccaatcccttcacctggtactaactcaacaaacaaccgtacccccttctccattttttttaaccgctcggacaggttcaacctaatctttatcgtatcttgaatatccaattgcccttccaacagaggttttgcatgaaacacatactggtcatccaaatcatactcatcttcattagccgttgttccctcacttatcacttttaaaccaaaaggaatatctgccgttaacggtaatccggaatagttcacaaccacctcagcttctattgttttcgtatcatcgggataaaagaagaacgacatcacagtcgagtctgccccctccgttcccggttgaagggcattcatataaaatttatcaaaataaagctgagcctgcccatcaaaaacttttatatcatcttcattgcaagaaaagaaggacaaaaacatcaacattatcataaaatataaatatcttttcatcatgattcaaagtttatgtcgttatttaatatctgctggcacagggaacatactttcttgaagagtcataggacgcaatgttcctttatcattcacaatcgccgtattcaaacgtttatacaagaaaaacaattgtccttcagaaatccactcgcgacgcgcatcatggagtaattcctgctcaaattcattccaagtcgatcctccaagtgaacttccataaatccccctattttcacggatttcattcaaaattcgataggcctcacctacattcccgttacgtgcataatactcggccataatatatttcatctcggtaagacgaattacaggaaacaaattcactgttttatctcttgtatccaaattagtgggaataaaatatttagcagaaacaggataggcgccactacctaaaaaaatcatatgattccatcgatgatccgaacttttctcatcaacacctccatgtgaaaaatagctttccgaaatttgaaaccaattcggagaaactccacctttccaatccgcactcaaccaactacctgttccttgataagacaaactgttataggcagcaaaaattaaattagacatcgttttataatcttttcgattattaaaatctgcttcattattaccccaaccttgtgtcaaaccgctataatcatccttatacatcaaattcttcgaaccatctctaaataccacatgggcttttaccacttcatcagcataattaaaggcatcctgatcccgtcccgcgtactggcaaaccctcgccaataaagcagtaacggcattataactcattctatacccccgtcctttaaagaaatcatctatcaatgcagcatcaaaatcctcgatctgttgcccggatatagtctgagaattataggtaaaatcgttattaaaacgtcccgtaccggataaattaattccctgtccatttattgttgtatcgtaaacagcaactaaccctctagccttttccaaatctgcaatcactttttctaacacaggtttcactccaagttttgtggctgacaacaccggataagattctatataagggatatacgcacgtccatcatcatttatgggagccggagcaaacaaacgtaacaattcaaaatgaatcaaggcccgacaagcatatgcctctcctgtgatcatcttcctttccatttccccttccgcaaaaatatcattagaagcattttcgatattctgcaataagtcatttgcattagcaataatattataggcaattccccacgcactctctatacttgaagatacttgcgtgtttgtgtactcatatttggctgcagctttacacatctcgtcattgaatgagccggactccaaattatataactgggccatacaatccaacattccataagaccaattccgaccataaagttccggcttacccattgacttatacaaaccattcagaacagaccgataaccgtcacccgtactaaacaaatcactttcagttgcttgccctgctggtgtaacatccaaccaatccttacatcccgcaaataccaaaacaatgacaactgctaatattttaatataatttcccatgccatataccatttagaat

SEQ ID NO: 74 - DNA, 13105 bp, Butyricimonas faecihominis
atgaaaggtataccattactgttattcgggttctttttaggtttaatcatggacttggctgataacacggtcggtattcatgccgcggcatctactttcatcgcttatattcgtcctcggttattgcagttgacctctacccgggaagaaatagacgacacgcatggagggcaaggtctaacggatgtcaggtggtttctgaaatacacgtttgtttccacgctgttatttaacgtggtactgattttgacagaggcctttacttttaacgatatgctgatctcgattatccggattattttaagtacctttatctcaatgttattcatgctactctactatttcatcggaattaagaaagtacagcaataataaaagcgtggttttaatcgattaatgaattcttgaaatgaacaaattcgggtatagacaagggattatatcaggaattattatcagtgtatgtgtcgtgtacctcctgcgattgtttacctatcaggtggtgtccgacaaatataaagttatggctgaaaataattcccagcggacggaaaccgaatatccggcacgaggattaatatatgatcggaataacaaacttttggttgataatcaagcggcctacgatttaatgattatccccaaccaggtaaaaaaatttgatactttagaattgatttccattctggatataacgaaagaatctttggaaaaaaggattcaggattgtcgggattatgcgaaattcaaaccttcggttcttgtttctcagatccccggaaacaaatatgctgtccttcaagaaaaactttatcgttatccaggtttctatatacaaaccagaacattacgaaaatataacgtaaaccattctgcagatgttttcggctatatcggagaggtgaattccgaacagatgaaagatccctattatgcacaaggagactacatcgggatcagtgggttggaaaaaacatacgagaaacaccttcgcggtaccaagggaaaacgggtcgttcttgtcgacaataaaaaccgggtgaagggttcgtttgcggacggagaatatgacgaagacgccattgtcggtgaaaatctatacaccacgttagatgttgacctacaagaatacgcctacgaactcatgcagaacaaaaaaggcggaatcgtggctattgaaccttctacgggagaaatattggtcaagatgtctagtcccggttatgatccgcaattaatggtcggcttggatcggggtaaaaattactctaaattgctaaatgatcccttaaaacccctatttgacagaacgacgatggcacaatatcccccgggttccatattcaaaaccgttcaagctctgattggtttacaaacaaaagcgatttccctgcaaacacaatgtacgtgtagtggaggtgcttatattgtcgggggaaaattcatgaagtgtcaccaccatagttctcccgtgaatttactccagtccattgaaaactcctgtaacccctattacgccaatgttttcaagagaatcttggaattaccggaatataaaacggtgcgaaatgcttacggggaatggcggaaatacgtgatgtccttcgggttcggcaataagatatgcccggatttctccaatgaagtatccggttctatccccacgcaggaatattacgacaatgtgtttaaaacacaaaaatggtacccttcctacatgatttctctttccattggtcaaggagaattaatgatcacgccgattcaaatggcgaatttggccacgattctggcgaaccggggatattatattacaccacatattgtaagatcgataaatgactcgatttccagccagataaaaaagcacgttattcccattgaccggaaacactttgaccctatcgtcgaaggaatgcaaatggttatcaagggaggaaccggacgacgggctcaggtagattcgattgcaatagccggaaaaacaggaaccgtgcaaaatccgcatggtgacgatcactccgtgtttattgcttttgccccggtagaagaccctaagatcgcgttgatcgtatatgttgaaaacggggtttggggatcacgttacgcggccccgattgccggtttattaatagagaaatatttaaaaggaaaaatatccgacaagaagaaacctcttgaaaaagagatgttccaaggtagtttgatccatgatacaaccagtaaagtaaaagaaacgagcaatgaatagcagatctaataacctactcgccaacatagattgggtatccattctattatacctgctgcttgtattaatcgggtggttaaatatttatgcggcagtatatgatgaaaatcatagcagtattcttgatatttctcaaaagtacgggaaacagttgatttggatcggggcggctttcgtgcttgcttttctcgttctactcacggatagtaaattctttaccaccttctcgatggtcatttacggcatcatgatatttttgttgattgccgtcctgttttttggtacggaaaccaagggtgcgcgttcgtggtttgaagtcggggattttcgcattcaaccggcggagtttgccaaatttgcaaccaacttggccatagcctatatcatgagccggcataatttcaaggtaatgcgcttttccagccttttgaccatcgggttgattttagctcttcccgcgggattgattatcttgcagaacgacacggggtcagctctcgtgtacagtagttttatactcgttcttttccgagaaggattgcatggctctatcctattgctttgtttcgtggcggcagctatatttatcatggcattgctgtattctccttttacggtattgcttgtcattatcgggggaactctgatagccttttattattatcggcacgatattcgggaattattccagatcatcctgttcatcgggtgtggtttcgggcttttcgtcttgattaaatggatgtttaatctatcgatttccgattattacatgctactcatcgtttacgtgattacaagtataaccgcgatctacccgatatataagcggaagatgaaaaacatgattaccctgttactgatctcgtggttatgcgtcggggccgctccttccgtgaattatgcttttaaccatcttcaacctcaccagcaggatcgtattaacgagttactgggtataaaagtagatcccaagggaactggatataatgtcactcaatccaaaattgcaataggctccgggggattactgggtaagggattcctacaaggaacacagactaaattgaacttcgttccggagcaaagtacagactttatcttctgtacagttggcgaagagtgggggtttgtcgggagtactttcgtcatcgtgctactggcggtgtttattttacgaattatcaaactggcagaaaggcaacgttccagtttttcccggatatatggttatggagtagcctctatcctattcttccacgtggcggtcaatattggaatgactattggaatggcacctgttatcggaattcctcttccattcttcagttacgggggatcatcactatggtcttttaccattcttatatttatatttttgagattagatgccaatcgtttacaagtctttagataataaataaactttctgaacgctttccttgtggattttcaaggattttaatacattcgttcccaaatgaacttaaacacgagaagaatgaaaacattaattataaacataaagcaacttgttcaggttgaggaagaaccacgtaaatgggttgcgggtgccgacatggcaaaactgggtatcattgacgatgcctaccttctgattaacgaggataaaatagaggctttcggtaaaatgagtgaattgaatcaagatacgatttacgagggcacggacacggtgaaggaaatagatgccaaaggacgtttggttctccccgcctactgtgattcccacacgcatatcgtttatgccgggagccgggaaatagaatatattgataaaatcaaaggtttatcatacgaggagattgcccaaagaggtggtggcattttgaattcagccgaacgtatccggaaggcatcggaggaagagttatttgattcagcttatgcccgtttgcaagagatcgcctctcttggaaccggagccgtggaaatcaagagtggttacggtttggacacggcgagtgaactcaaaatgttgcgtgtgattaaaagactgagcgaggaaacacctttaaccataaagtccaccttcttgggtgctcacgctgttccggtggaatacaagggacggcagacggaatacgtggatttaatcattaatgaaatgattccggctgttgccgccgaggatttggctgattatatcgacgtgttctgcgataaaggattcttcacggtggaagacacggacaggatgttaaatgccggaatgaaatacggattgcgtgcgaagatacatgctaacgaactggattattcgggtggtattcaagtcggggtaaaatataatgccttatccgtggatcatcttgaatatgtcggggatgaagaaatcgctgcattaaaaggtagtgaaaccatgccaaccgtgttaccgggagctgcattctttttgaatatgccttactctccggttcgtaaaatgattaatgccggacttcctgttgctttggcttcggattttaatcccggctcctctccttccggaaacatgaagttcgtgatgtctctcgggtgcgtgaattataaaatgctgccggaagaggtgattaacgcaacgaccatcaactcagcatacgctatgggtgtagaagaagagctgggtagtatcgccgtgggtaaaaaagcgaatttctatatcacgactccgattactggaatagagtatcttccatacgcttacgggacggatttagttgaagcggtattcttaaacggagaacaaatttaaggaagttatgccctattcacattacaaaaaagtatggatccggaaagcgtaccggataagatatccttagaagatttattgattgatgatttacgatttcatgattgagtgattaggaaatcgatactaaatttattttttgtcaaattataaaattaatatatatgaaaaaattaatcgaatgcgttccgaatttcagtgaagggaacgatatgcacattatagatcagattacagcagaaattaaggctgttgaaggagttagtctcattgacgtggacccgggaaaagcaacgaaccgtacggttgttaccatggtaggtactccggaagaagtatgtgaagccgctttccgtgccgttaaaaaagcatccgagttgatcgatatgaaaaaacacaagggagcgcatccccgtttcggagctacagacgtttgtcctttggttccggtatcaaacatcacgatggaagaaaccgtggaatacgcacgtgctttggcaaaacgtatcggtgaagaattgaacatcccggtatattgctacgagagtgcagccttcaccccggaaagaagaaatttggctacttgccgtgccggagaatatgaggctcttggagagcgtttaagcagtgaacaatggcatcccgatttcggtccccgtgagttgaacgagtggacggctaaaaccggagctacggctgttggagcccgaaacttcttggtggcttacaacgtgaacttaaataccacctctacccgtcgtgccaatgcgatcgcttttgacgtacgtgaaagaggaagagctaagagagaaggaaatcctattaccggtaagatcgtgaaagacgagaaaggtaaaaatgtgatgatcccgggaaccttgaagtctgtgaaggctattggttggtttatcgaagagtatggaattgctcagatctccatgaacttgacggatatttccgtgacttccgtacacgaggctttcgacgaagtatgccgtaaagcacaggatcgcggtattcgtgtaaccggttccgagttagtgggtgtaattccattaaaagccatgttggatgccggacgttatttcttgcgtaaacaacaacgctctaccggggtatcggataaagaattgatcaagattgccgtgaaatctttaggtttggatgaattgtatccattcgaacccagaaagaaaatcatcgagtatattctggaagatgagatgaatcaaggaaagaaattcttgatcgatatgaatcttcatgaatttgctgatgaaacagcatcagaatctccggctcccggtggtggttccatttcagcatacatgggagctcttgcttcttcactggccacgatggttgccaacttgtcttctcacaaacgcggttgggatgagcgttgggaagaattcagtaattgggctgaaagaggaaaagcttatcaagttgaattaatcaaaatggttgacgaggatactaacgctttcaatcgtatcatggatgccttcggattaccgaagaaaacagacgaagaaaaagctgcacgtcaccaagcaattcaagatgcaaccaagtttgctaccgaagtaccgttcaaaacgatgatgctttgctacgaatgtatggaagtggtgaaagccatggcagagatcggtaacccgaattctgtaactgatgccggagttggtgctttggccgctcgttccggagtaatcggcgctttcttgaacgtgaagatcaatgctgccggattggatgataaagaatatgctaacgatattatttccagaggtgaaaaagtggttgaaatggccaaacaaatggaaacggatattttgaatatcgtgaattcaaaaatctaaagatttattcataaacaacctcaccagttctccttacacagaagtgaaaaacgcttggtaatcagctctccccctgtgtaagggggagctggtgggggtagtttaaaaatggtaactccacgtcacggacggcacaaatggaagtaaactccaactccgggtagtcaccccttctctcgtttgtttgtggtatatgacagaaggattcttacgggcatacaaattataaatgccgaatacccatgaacttccctttccttttcgattatccaaagcatatgatatatccagatggtgataggctggcattcgaaagttattcggactctcaatatattcccggtattgcgtgttgtctgcatctgtttgaaaactttcaggcatcggggccgcatgatagaattgtttccctatcgagatgtaattcccggtcgcaagcgtaaaattaattgaaaatgatttgttaaacttacatctttccttgatcgggagcgtgtaattggtcgtcacgttcaacttatgccgacggtcgtattcaaacgggaaccattccccgttacttacatgatcaaaacgacgttccgattttgaccacgaataagaaacccaccccgttaagactccggtcgttttctttgccataacctccaatagcaaaactaccccatcctcataaacgcctcgaaaaaggcatcccgataggtgtttccaatagctatttcatgtgttttaatgaaaatatcgttgttgtcaaaggaatctatatgcttggtatttacgatataggacttattgactcgtaaaaaatcatgcttgggtaataaatcaaatatattctttagattcattcgggtaatcacccgttgttcatccaattggatgatcacgtaatctttcagtccctcgatgaatagaatatccttgtaatttattttaaagtagcgtctttcagactttacgaagaagtattccgtgttacctgcctcgatattttctttctcttcttttaataataaagaatggtaagcaattgccttgttaactgccttgtgaaagcgttccgggtcaaccggtttaattaaatagtcgatagcgtctacctcgtaactatccaaagcgtattccgtgtaagccgtggtgaaaatgaccaacgttctcttggatatattgtgagcgaactcgatacccgtgattcccgacatctgaatatccaaaaagatcaagtctactggattctcttccatgaactttgacgctccgatagcattattaaacatacccgtcagatttagttgactggtatcttttactagtatttctatcgcctcacgggctaacggctcatcatcaacaataatacaattcataatatcaaatgtaaatatacggtataacttatttcactttcttctatctccaacgtgtaacgttccggaaacagcaattccaacctgcgctttatattcttgagtcccaaccctcccacttcatttttccgtaaagcgattttaggctttgaatttatacattgaaattccagttgtttatcccagaccttgaaaccgagatagacatacgatgaattctcgctatccacattatgtttcacggtattctccacgaaaggaataaacaataatggtggcaaccacacctcactaatatctccttctttggaaatgacatactcgaatttatcccgtcgaaccttctccagattcagaaagtcattcaagaaatggatctcagaactcaataacacctgttctttcgcgctgtcgttaatttggtaacgcaacatatcttcaagcttgaaaagcacccgggaggcctcttccggatttttcttgatcagcacgttagcattattcagcatattgaacagaaaatgcgggttaatttgtttcttaagaaatttcaattcggattgtaatgtcgaagaggccagttcgtctattcgttgactgtaaccgatccagtatttaaatagtagcaaagccgacgttccgaatattagtaatccaaacgagatgattgacgtgatcatgtttaatatgatatatggatttccatcctcgtaattcgcactaacctcttgaacgcttatttgtaaaattgcgatacatacaagcgaaaatgatgtcagcaataacatagataccaaatacttcaacaagcggccctttattaaaaaacgaggggctaacacatatagattaaaataaatgatcacactggtgagcaaaaaataaaatacccacccgtaaaaacgttcccaagtcaacactaactctcctgattgattggcaaatatactaattgtgatacaggcaagagttaatagcaacagaaaatgtctcacgaacttaaaacgtggagataacaggaaatccggaacgtgattatcaatcaaattactcatggtttctgtattttaagtttcaacataattgtccttttagcaacagataaggtataatcgttcccatataacaattccaatctctgcctgattttcgaaaagtcatccggatgcagtaaattcccattatcaaaagagcaaacaaattgaatctcattcccattcacatgaaaatttagatcaatcgagccaaatacaggctgactgtatatctgaatcacggcttgttgcacgaaaggaaggaacaacaagggagagacaaatatccgatgcacctccccttcggctgaaaccatgtattgaaaacgatgggaatacacctgttccaaagcgagatagtttgtcaaaaaatctatttcagcctttaataacaccgctttccggctacaatcatagagctggtatctcagaatctggcttaactccaataacatcccggatgcctccttcggttcactttttgccaaaactgcagtacgattaagtacattaaaaagtaacagaggattgacttgggctttcaattgctccacttccgactgcacatgaattctttccagttggtttacccggttattttctgtcatccaatgttttaacacgatcgtgatcgagcctcccagcatacacaaagttacagtggcaaaagaggagatataatttaagatgaataccggttccaagatgtttcccgcacgctgtcccaaccaaattcgtgccgtatcttcaatgattgtctgtatccataaaagcaccagcacggtaccaaatatcatgactgtatacgttaggtatctcttctgcatgagagataccggggtaccaacacgtagatattcaaataggccacggccaagtaggaggccaaattccccaaggcaatccagtagagccttactccaagtgccggaatttccggttgaaagataacataggtttggttaaaagaaatggcagcaagtgacacgataaacagaatatgccgccagatccggaatttcgaatttactaggagattatataggaaagcctgtccttccgtgttgattttaaacattcgaggttttatttgatggttacaaagttacaatcttattcctaaatcggattaaaattctaatttataactgacattcggcaaagaggtggctccacggatgggttttatcttatcggtcttaaaattatactcatgcccgtaatattcttcgcatcccgtcgtattcaaggacttgatcgaaaattcgtgagacaccttcttccggttgattttataccccacggagaaattcgtgataaacatcggtgagaattgtttggaaaaagcctttgtttcatcatattgcacttcccggtccggatcgagtaacgtggctacttcatccacgggggcatagcgatctcccccttgcaaggttattttaaagttcacactgaacatattttgcctgtcacgcccgaccatccattccttgccacccaacacgttgacaataaaattccgattatacaacgtgttacgccatttccggtctcccccataatattttgaatcaaaaatggatgccgtcaccatataataaagtcccttgtttaaatagcgttctagcgtgatgtctaccccgatattacgtccttttccccggttgaccagagcgttctccacgtaaaaatctcgtctattcagcacggaataagaactatcggcaataacgggtacatcatataattgttggaaataaggttctattttcatattcatgttatccgatattttgaaaccatacgataacatcacgtgatgcgccctagtgaatcccaagtctttattcacggaacgatcacccgtaccttgtgttttcacgaaataaacgtccattttttccatccggctatgtaccccgtaagcgagggcaaaagaactctttggtgaaaattgccatttaatcccggcccggggttccagtgcccagctattattcagtgtcaggacttgtgcgttaactcccacgtttaaagtgacctgttcgcttatgccaatggatgaactcgtgtaaccggatattaaatctgtgtttcccttaccttgggagattaattccatgggatgcatttgatggggggccagatccatgtccatatcgtaatacatcttcgtgtaagttatccctgttttattcgtgaacttggcactgaatttccgggtaatagcagtggtgaatatcaagtttgtgttactccgatttaaatcaagaaaaggtgccgaattcaaattccagtcataacttgtcatcgtcccctcgtgtttgaagtaggtaaccgctaacgtcgttttcagttgtgtctcgttgttaaagaaatagcggtgactgataccaccggctcccatgtattgtttggtactggatttcatcatatcaccaatcgattcccacttatccgtgttttcctcaaaatctccttttgacttgtctatcaaggctgttccccaaatcgagaagacacccgctttacgtgtcggcagactcaatttgaaattcaaatcctgataatccaaagtcccgtcaatatcaacagccccgatgtctcccagcaatcccgtggtggaataacgataattgaaaatgtaagaagaattgtgttttcgggtcaaaggtccctccgaggcaaaatcaatccctaataagccgatctgaaacgtgttctcgatcttttggttattcccgttacgtaatttcatatcaaagactcccgacacggcattatcgtactctgcgggaaaagctccggtaaagaaatccgaattacccagtacgagactacttaacccggataaaattcccccaccaagaatggacaaatccgcaaagtgattgggattcggaatttccacgtcttccagtttccattgcaataaatgcggggcatttccgtgaatggatattccattcgtagacatactgggagaaatcccggcaaaggaacttaccaaacgggccggatcatccattcccccagcatatcgacttgcctcttccacgctgagcatccgggctcctgtggtaaccatcttgtttaatggttgctctttattcaattgaggtcggaccatcacttcatccagttctttgatgctttctttcaatggaatggtcaaatagacttctttcgaggaagttaccagtatctcccggaaaatagttggttcgtatcccacgaaagaaacctgtatatcgtgtcgcccgatcgggacattcttgatgacaaaacggcctagggaatccgttactccaccgatctccgtttttcccatgagatacacggaaacgtaagccaccggataacccgatgccgcatcaatcacccgtccccgtacactctgggttaaaactctaccctctttctgtccccatacattcacggataacatgaaaaggaaaaaatatataccgatgactcttttcttgcttttaatcttgctcatgattttgaaaatcacgtcaaaaattccgtttttccatcctttacggttcagttctccccctaaaacttcttcaaaggcatctaaaaccttctcgcagtctgccacacttacacttgtcattcgtgatacttctgttattatttccgtcttattcatatccaatactttttgattacgagacaaaaataggctccatgtggaagtgatttaaagaaaagagacaaaacacccgattttgtatacgaaacaaaagcatacggagaattttactacttttgtaccataatgatcggtttaagttataatgaaatgaaaaagagaataatat

SEQ ID NO: 75 - DNA, 13070 bp, Butyricimonas faecihominis
ttattatattataggaaatcgttcatgtcgaacgcttcgtgttcctcgcttgtattacctacttcggcagggacggcagccgtagccagttccgcttcgttgcgtcccagcagttccgccacccttgccagcccgccgttgatgttctccaccaccgcatcgtagaggttcgtcccctcaatgcttgccagtgtcccggcggcttgccgtttctccgcttcggtggggttgtcggcgttcgccgtgcgtaccgcttcgcccagttcgtcaaagctcacgcccgtagcccgcccggtatcatcgtcaccgtccatgtacccggctatttcctcgtcctcgtagtcgggttcgtcattctcgtaaccgggcgtttcttccgcttcggctactgcttccggaatgttttcttccggctgtccgtcagcctgcggcgcaaaaatagtatcattttcagccgcttgctggaggtgtcccgatttgtcctgcgctgtcccgattagtccacccttgtatcggctttcacctatcagcgtgtagcccgaaaccccgtttcgtgggagtggcgcatcatccgttctgcccgttgatgtccggctgtccgtgtagcgataccacagccatagggcgatatagtacaccaaaagcccggtaagtatgcaatagattatcatagtcagacaggcttttggaagtggctttcgtacagggtgtttatctcgtcttggtactgctcgaagtgccgcagcagaatgttttccacgtagctgcttaccgtcaccttgcgcccgcctatcactgtcacgatacgcatcagcttctcgtgcgtggtacggctcacgtacaagggctgtcggtctgccagttccactttctgaaaataggtttcccggtagtcgcccgaaccgcccttgcgcctgcggggtgtcggtttctctacttgcaccgtttctgtttgtgtttcttgcggtacatcattcgtcttattattatcttgtttactggggacaccttgcgagataagctctttcatgaaatcctcgtctatcttcggcatcccgccgctttgctttgccatatcattgtaatttgatgtagtacgttatttcggttatcagttcttccaagttgcttccccttaccagcgggcggctggcgggaaagagcgtggagcggaacaccgcctttttatccgccaccagttcctttttgtagcgtttggtatcggggataaaggttttcatcagcggcagttccagttccttaatggtcttgtcgtaggcggtgtaaaggtctgttttctccctaccgtccaccatattccaaaagaggtacagcccggcaagtcggcaggcttcattcctcaccagcagtttttggatagccattgcgaacgacaggctgctttccagtaccaccttgtcggctgaaatgggggtgaagatgtagtccatgcccgcaagggagtttatcacgccctcgctgttcaccgtgccgggcaggtcgaaaaagacaatatccggcacgtgtccggcggctacatattcgtcagccgttgcaatcgccttttcgggcgaactgcacaataccgggtaggctttcttccccagtcgggtgaactgttcatacgccattcgcttgtaatcttcatccgccccgacctgctcggcatcccgcttgcgcatcccggcaatggagtgctgggggtagtcgcaatcgaccaccgccacatcgtagcctttgaggtagtataggtaactcgccgccagcacagtaaaggtggttttgccgaccccgcccttttgggtggaaaaggcgacataaaggggtgttttctcgttttccatattgcttccgttcattattggttgatagatttatttattgctttcaatcattcattccatattgcaatcttgaaatattgaaagactgttttatttcaatcttgttttcctgctttcattctttcttgaaatattgaaatcctgcaatcacgttttattgaaatcctgctttcaatcattctttcctgattggaatatttctttcaatcttgctttcaatattgaaatccgatgcaaaaaaagggagaaaaaacatcccctgaaaaccttgtcccgatttgtcctacgctgtcccgatttgtccaccaaccgcctattttacagcattataaatcaccgttactttgcagcggagtaacgaaccgcagggggcaggggtgtaaaatcaggctggtgcataaccgggcttaccgtttcacgctaaccccaatccgtccgtgacggatttcgattttcgtcagaaaatagcaaggtgtgttttgtatgctacaaaaccgttttccgtgcctgaaaacgccttgccccttgcgggggtaaaaatcactccgaagtcgtaattttttaattgaaagaagcatggaaacaagaaaacctaacaagggcggtcgccccgccctcgcagacccggcgaagcatcgccatgtcctttacctgaacgaccgggagaatgcccgcttcctctcgcaatgggagcagtcgggcgttacgagcaagtcccgtttcatcgccgcccggctgttcggcgagccgttccgggtggtgaaagtggacaaatcggcagtagaatattgcgcccggctgaccgaattttacgcccagttccgggcggttgcagtcaattacaaccaagtcgtaaaggcgttgcacagcaacttttcggagaaaaaggcactggcttttctctataaactggagaaagcgaccaccgaactggcgatgttgaaccgtcaggttatcgacctgacaaacgagtgcagggaactatggttgccaaaataagcacgggcggcaatatgttcggcgcactggcttacaaccaaaacaaggtggacagcggggaagcaaaggtgcttttctccaaccggatgctgttgggcgaggacgggaatttctctatcggcgagtgtatgcgcagctttgaaatgcagatgcccgtccagctatccaccaagaagccgatacttcatatttccataaacccgcacccggaagacgtgctgaccgaccagcagctttccgacatcgccaaagagtatatgcggaagttgggctatggcgaccagccttatctggtgtacaagcataccgacatcgaccgccaccatatccacatcgtggggttgcgggtggacgagaacggcagaccgctgaatgacaggttcgagcatcggcgcagcaagcaaatcacccgtgaactggaaaagaaatacgggctgcacccggcagagcggaaggaacgtgccgaacgccccgaactgaaaaaggtggactatgccgccggggacgtgaagcaccaagtcggcaacaccgtgaaagcggcttgctatggctaccgcttccagtcgttcggggagtacaaggctttgcttgccgcttacaacgtgtgcgccgaggaagtcaagggcgagataaacggcaagccctatcagggcatagtttattccgccaccaatgacaagggcgaaaagacaggcaacccggtaaaggcttcccgcatcggcaagtcggtaggttatgaagcggtgcagcgcagaatggagaaatcgggcgaagcaatcaggaacgggaaactgaaagagcgcacccggaagattgtagccactgccatgcagaccgcccgcagccgcaaggaactggaacagcagctaaggaagcggggcattgacgtggtattccgtcagaacgacagcgggcgcatctatggcgttacgttcatcgaccacgacagccgggtggtgctgaacggttcacgcttgggcaaggagtattcggcgaacgtgttcaacgaacgtttttcgggcgaaaccggaaagatacaccagtccgaagtggcagcaccgcagcaagaccagcccacgcatcaggaacagccgggcttcacgccgaaatccgacatcgtttcgggcatggcttccgtgctgggtgctttcggcggtttgctgggcggcggtgcatctggcggtgacgagccgcaggacaccgcccgccaaaagagaaagaagaaaaagaagcgcacaaggcgcattgactaacttaaaaacatacaattatgcagcaagaggatgatttgagagggcttgcaagggtcatggactttatgcgggctgtcagtattctattcgtgggaataaacgtgtactggttctgttactccaccctgaaagaatggggagtgacgtttgaagtgatagacaagatactgtggaacttccagcgcaccaccgggctgttctcgtccgtcctttggacgaaactttttgcggtggtgttcctcgccctgtcgtgcatcggcactaagggcgtgaaagaggaaaagataacgtgggcgaagatacattgcagccttgtggcgggtgtcgtgttgtttttcctgaactggtggctgctggaacttccgctgccacatacggcggacactgtgttttatatcgccacgctatcggcgggctatatctgtatgctcatggcgggtacatggatgtcccggttgttgaagaacaacctaatggatgatgtctttaatacagagaacgagagtttcatgcaggaaacaaggcttatcgagaacgagtattcggtaaatctgcctacccggttctactataagaagaaatggaataacggctggataaatgttgtgaacccgttccgtgccagccttgtgttgggtacgccgggcagcggcaaatcgtatgcagtggtaaatagttacataaaacagcaaatcgagaaaggttttgcgctctactgctatgattataagtttcccgatttatcggaaatcacttataatcatttgcttaaccacttggacgggtataaggtaaagcccaaattctacattatcaattttgacgacccacgcaagagccaccgatgcaacccgataaacgccagtttcatgtcggacattgcggatgcctacgaagcaagctacacgataatgcttaacctcaatcgaagttggataagcaagcagggcgacttcttcgtggaaagcccgattatcctgcttgcagccattatttggtacttgcgcatttatcagggcggcaggtattgcacgttcccgcacgccatagagttgttgaacaagaaatacgccgatgttttcacgattttgcgcagttatcccgaactggaaaactatctttccccgttcgtggatgcttgggaaagttcggcagttgaacagttgcaggggcagattgccagtgcgaaaatcccgctttcaaggatgatttcacccgccctttactgggtaatgacgggcgatgatttttcacttgacatcaacaacccgaaagagcctaaaatcttggttgtcggtaacaatcctgaccgccaaaatatctactcggcggcactgggattatataattcccgtatcgtgaagctgataaacaagaaaggtcagcttaaaagttcggtgataatagatgaattaccgactatatattttcgtgggcttgataatttgattgccaccgcccgaagcaacaaggttgcggttctgttgggctttcaggattacagccagcttacccgtgactatggggacaaggaaagccgtgtaatccaaaatacggtgggcaacgtgttcagcggtcaggtagtcggtgaaacggcaaaaatactgtccgagcgtttcggaaaggtgttgcagaaacggcagagcatgacaatcaaccagcgggaaaaatccacctcgataagcacccaaatggacagcctgatacccgccagcaaaatatccaacctcacgcaaggtatgttcgtgggtgctgtggcggacaacttcgatgaacggatagagcagaagattttccactgtgaaatcgtggtggacaatgaaaaggtgaagcgggaaaccgcccgttacgtgaagttgccgcagataatcgacttcaccgacaaggacggcaacgaccggatgcaggaggagatacaagccaactatgaccgcatccgtcaggaagtccggcagattgtcgaggacgagataacccggattaagaacgacccggagctatgccaccttataaaagaggaagaataaccgatattctttcctgacagacagtatttttactaattttgcagacaaagaaatgattatgaatgaaaaccaaaatacggaatggaaagaaagctggcgtgacgagtatctgaaatggatatgcggctttgccaacgccacaggcggcaagatatatataggtatgaatgacaacggtaaggtagtcggcgttgccgatgccgacaaactgctggaggatataccgaacaaagtgcgtgacgtgctgggtatcatcgtggacgtgaacctgctggaagaaaacgggctgaaatatatcgagattgacgtaccgccttattccaatcctatcaattacaaaggtcagtaccactatcgcagcggcagcacgaaacaggagttgaaaggtgcggcgttgaaccgttttatcctgcaacgtactggcaggcattgggacgagtttcccatagagtgggcaggcatagaggaactttcccccggcgcattgaaccgtttccgcaaggaagcggcgagaagcgggcgtgtggacgaagatgtgttgaaagatactaccgaaaatttgctgcacgatttgcggctgattgacacccaaaccaaccgtccgacccgtgccgccttgctgttgttccaccccgacccggaacgctttgtaaccggggcttatatcaagataggtttcttccgggatgataagggtaacttggagtttcaggacgaggttcacggctctttaatggagcaggtggataaggcaatggatttgataaagaccaaatacctgatttatcatatatcatacgagggaatttcccggcgtgaaacaccgcagttcccggtggaagctatcagggagtcactgatgaattgtgtggcacataaagactatgccagtgccgtacccattcagattagcgtgttccccgaccatatcaccttttggaacgccggacagttaccggaaagctggacgaccgaaaaactttttgaaagccacccgtcctctccctataacccgctaatcgccaacgcctttttcagaagcggggatattgaaagctggggacgtggctacaagcgtatcttggaagctgtcagcgcatacaagttgttgccacccaaacttgaaatgttaagcggtctgatgattacctattataccgatatacgttcgcagctattggcgcagcgagtggatgaaaggtatatacccattattgagtatgccgcccaaaatgggagtataaataattcagatgtgcagaatttgttaaataccagtaaaactactgcttatcgaattttgtcgcaactggataactggctggaaatacaaggaacaacaggaaaaggcactcattatacacttaaagggttcacaaagggttcataattgaatgtttttgcttttatgaaatgctgaacttcctgtttaacaagcatttgaaaaccattaaaagggttcacaaagggttcatcgaaagagagtgattgatttcactctcttttttatgcttaatttcgcaaccattggttgaatattttatcttaattgcgtttttcttgttttataatccaagttgaaccgtgtcgtgggaagaatggtctttgccatttctgtttgcaatacggtttgtctgatgtcgcccagtatgtccgccaccacctttctgacacgtggcgggtaacttttcgccaaagatacgattttttccagttccagcaggctatacccgttgaaatattggctcttgacccggttgtagatgtcctgcccggttgttccgggtatgcgcttcatgtcctttatcgcatcgagcagccgcaagtacgggacaaggctttcatccgggtagtccatgcagtaggctttcacgcactctatatccaagttcttgaaacggaaacggcgaaccgggttaggagtggctatcgttatggttgtggctacctgttcggtcagccccattttgttatagacgtaagcacccgtgatatagccgttcagtttttcagtcagatagcggaactgttcatcctgatagacaggcagctttcccagtcccagcactgatttcttgggacgatagtacgcccccttttcaacccgtaccagtacccctttgcggctctgttcggaaagtagcaccgcaacattggcggtcttttccgtttcaaacgacaaatcccggaacgtgaatatacgcccggtatctatccgttcaatctgcccaagtatctctttcctgaatgaagccatatttatgtactttgtttctatctgcaaagatagtatattatgtaatcacctgcaaaaacataacaaatattttgccgaagatgttttcatttctccaactgttggttggatattttcatctgacccggacaaatcgggacagcgcaggacaaattcggacagccgtttccgcccgtccaaatatagcatatttagtcgctacctttgggcgggactattcccgtaaccgctaaaatttcaattatttatggcaaacagaatgaccccgcccgcagaggggcaggaaaaagacgtgctgctggtcttggataaacagcagggcaaggtgagtgccgttaagggtatcgacaaggagggcaatttgcagaccgtaccgccgacacggggcggcgagttcatgcaggtggacaagaacagcgatgtgttcagcaacttcatttccaatttcttccgcaagtttcaggatacttccgggctggaacttttcagtgtcaaggcttccgaagtggagcaggacgcaaaggcaatcgaggacaaccaccgcaaccccacgacggagggcgacaagcgggctgaaatgcttcgagttccgaagcccgacttccacgagttcaagcagggctaccgcttcgacccggcaaaaatcgactgggagaacctgaaaaaagtcggcatcaccgccgacacactgaaaaacacgaaggacttcgaccgggtgatgcgtggatacaagtcccgcaacacctacaccgtttcggggacggtgggcggcttctacctcaaacctaccgatgtcaagctctctttctatcaggcaaaggacggcacggtagtacccaagctgcacggcgtgcagcaggacgagaaactgttgcaacgcccgttccatgaacacaggttcaccaagcaggaacagggcaacttgcaaggcactggcaacttgggcggcatcgctgaaatcaaagacccgaaaagcggcgggcaaatccccgtgttcgtcagccgggacaggtacacgcacgaactggagtatatgcgggctgacaagtggaaatgccccgacaccatttgcggcgtgaaagtcagcccagaacagaaagccgcctttgaagccgggcaagcggtgaaaatggaaaacctgcaatttagggacggcacgaagcgcagtgcctatttgcaggtcagtgcggtggagcgtggcttggagttcctgccgaggtctgccgtccaattcttgcagcagggacaacagcccacagagcagcaggtagccgggataaaggacggcaagggcgttgagttcaacggtcatgtgcagcccggcacacagggcaaatcccccgacaaggtgaagccgaaagacgttacccccgccgccgagagccggatacaggtagcggtcaattcggagggcaagaccaacgaagccaccaaacggggcaaagagccgctgaaacagggtcaggacaagcccaccgccaagcagaaagagaagcatgagaaagcgcaggacaagagcctgaaagcggacaagcccaagaagtccagaggaatgaaaatgtaatatccaccattaaaaagtaaagaattatgattgcattgatagcagagaagcccagcgtggcaaaagacatcgcccgcatcatcggtgcgacccagcgtaatgacggttatctttccggcaacgggtatatggtgacatgggcgttcggccacttaatccagcttgccatgccggaagcctatggcgtggcgaacttccgcagggagagcctgcccatactgccgcccgatttccagctaatcccccgtcaggtgaaagcggagaaaggttataaggcagaccccggcgtgctgaaacagttgaaagtgataaaggaagtgttcgaccagtgcgaccggattattgtcgccaccgatgccgggcgtgagggtgagctaatcttccgctatatcttccattacctgaactgccgtaagcctttcgtgcgcctgtggataagcagccttaccgacaaggcaatccgtgaggggctggataacttgcagccgggcgaatgttacgataacctctacctctctgccaagtcccgcagcgaagcggactggctgatagggataaacgccacccaagcgttgagcgtagccgccggacagggggtgttctcgctggggagggtgcagacacccacgctcgtgatgatatgcagccgctatttggagaacaggaatttcgtacccgccaagttttggcaactcaaagcccataccgccagcgggggaataagtttcaccgcccaatcgaccgccaagtgggagcagcagcccgaagccatagccgccctgcaacgggtaaaggatgccggacaactctttgttaaatccgttgagaggaaagaagccagccaagaaccgccgcttttgtacgaccttaccacgctgcaaaaggaagccaatacaaagctgaatttctcggctgacaagacgctttccgtagcgcaaagcctgtatgaaaagaaagtgatgtcctacccgagaaccggaagccgctatatatcggaggacgttttcgatgaaatgccggagcgtgtcgccctgctggggcaatactctcgctttgccgggtatgccgctgggctggacggcacacccctgaaccgccgtagcgtgaatgacggcaaagtgaccgaccatcacgccttaatcgttaccgagaacctgcccggcgaactcaccaaagacgagtgggcggtttacgagctggtagccgggcgtatgctggaagccttttcgggcaagtgcgtgaaagacgttaccaccgccatattgtcggctggagataccgacttcacggtgaaagagtctgtgatgaaagaagccgggtggcgtgccgtgttcggcgagcaggaaacgggcggggacgaagaagccgccagcctgccgccgcttcaagagggcgaaagcctgccgatttccaacgtggaactgttggagaagcagaccaagccgaaaccgctgcacacggaaagcagcctgcttgccgcaatggagaacgccggaaaggaactggaagatgccgaactgaaagccagcctgaaagatgccgggataggcacgcccgccacccgtgcggcgattatcgaaacgctgttcgcccgccagtacatcgtgcgtgagaagaagaaccttgtacctaccgacaaggggcttgccgtttatgggattgtcaaggacaagaagattgctgatgtcgaaatgacgggtatgtgggaaaccgccctttccaagatagaagcgggcagcatggatgccgacacgttccgaaagggcatcgaggtgtacgcaacgcaaatcaccgcagaactgctatcggtgcagctatctgtcgctactggtgaaacctgtccctgccccaaatgcaataacgggcgcatcctgttctacccgaaagtggcgaagtgttccaacgtggactgcacgcttaccatattccgcaacaagtgcgacaagcaactgaccgacaagcagattgtcgaactggtgacgaaacgcaagaccgggctaatcaagggcttcaagggcaagaacggcaaggctttcgatgcttcgctggtactggacgaacagttcaatgtcggtttttcattccccgaaaagaaagcgaaaccgaagaaatagcctatctttgccgctgaaatttcattgtgataggttttgcaacttataataattgaaattttagtggttgcgcccggcgggaaccgggcgcattttttatacgcttccgccaaacaggtaggtcgaacagaccaccccgttatccagcaccctgctttccgagagtttccaatgtgagccgaatgtttccccgataaagccgatgcctttgcccgccatgaccgggacggtgtatattgtcaggctgtccagcagtccggctttaatcaatgaagtaagcagcttgccgccgcccaccaccagtatgtcggttttctgtttcagttcatagaccctttgcagcggttcttcggtcaggaactccacgccgcagtccggcgttacgttagtgtcgtagtgtgacaccacaaaagaccgtttgcttttgtgcggccacccgccccagtgttcaaagatgtagttgtaggtgttcgcccccataagcaggcaatctgcatccaaatagtatttgccaacgatagtttttacttcatcgggtaaccaatccagttccttatctaaggtggctgtatgtccgtcaagagatacggcgatatgcgctttaatttgtttcatcctatcaggtattaaacagttgataatctttttcaacctattcgttgatacctcaaaaaagaagcgtgaacttacactgctccactacgaggtactggcatacccaaagaaacgaaacaggcaagtccacgctatgacaaagcatagcatagacattgcgctgaaaatcccgtttcttttgaaaagtgccagttttcgtagtgagatattcggcgaacgaatatgttatatataatgacgatattgcagccgaaactgttcaatcgccgttattctcttatgttacttttgcaaaagtagcgaaaatcaccgaaataaccttgcaaataatagaaatcctgccttattatcataacaagacaggattttaaagaagaaaatatatgatattgattat

SEQ ID NO: 76 - DNA, 13003 bp, Butyricimonas faecihominis
gctgctaataacataggcataccgatttatatgttaccagtagcgttcatccgccgagccgtagagagccagcacccggtcggtgtcgttcttcttctttgcccgcaggtaggacacggatatgttcttgcgggtgtagtagttcacgaggttgcggtaattcaatagatttcggtaggcattatcaataatagccagccgttcggcatccgtcagtgacatacccgtgatgttcactacattcttcaagtcctgcaacacgtccgagctttccgacatcagtttggcatagccgaacgagattgccgacagttcgtcaggcgtgaaattcgggtctgccagcatactttggaaattgcgcacgtagatttcggatatttccgccaccagttcaatggacttcttcaccttgacaccgcccttaaccacgtcatgcaccgctttgagcgcatcgtaatattttttaccctgctggaaaatcttctgcgcttccatgaagccgtccagcgtgttcttggctgtggtggaagtctgcactatctgcttggtggtgttgatgataccctgtgccaagttgccggggtctgacaccacccattgggcggatgccttgccgatgaagcaaaggcataccgccataaggagaattgttttcttcatgttcctgatttttaagttgttgatgattggggattgcgtttgctttccgcaagccgcttgatagccagttcaaggttgccgcccagcttctcggcgagggcgaacagttccattttttcgctttcctctgtcgtgaacgtgtaatattcttccaacgaaacttctgtggcgtacaccgccgactgcgtgccgcccagcgagaagaaaacttccttgtacttccgtccggggtggttcgccatgttgatagacaatatctgcgaacgctccttgtcggtcagtccgagcaggttttgtatgctgtcaaacttgttgagatattttcgctggtctaacaggattttgcagtccgagttgttgatgatactctctttcactatgggcgaggaaataatatcttccacttcctgcgttaccacaatcgcttccccgaaatactttcggacggttttgtacaaatattttatgtagtccgccatgttcgctgacgcaatcgctttccacgcttcctcgattagtattaacttccttattccctttaatttgcgcatcttatttataaaggcttccatgatgatgatagtcgttatcgggaacaaaatcttgtggtctttgatgttgtccaattcaaagacaatgaagcgtttatgcagcaaatccagttccttgtcggagttcagcaggtagtcgtactcaccgccacgatagtacggttcaagcacgttcaggaagttatctatgtcaaaatccttttccctgacgttcttctgttcaagttgtcggcggtaatcatcccggacaaactcgtagaacgtgttgaagcagggcgttaccgacctgtcgcccgtgatacgttcgatataggcacttaccgcatttgacaacgccacttcttccgaccgcttgggggcttcatcgtcccgcttccacagggtgagtataagggtttttatactctctttcttctctatgtcaaataccccgtcctcgacatagaacgggttgaacgctatcgggttctcgttggtgtaggtgaaataaatcccgtcctcgccgtgcgtgcggttgtggattagctgggacagccccaagtaactgttacccgtatctactaatagcacgtgcgcgccctgctcgtaatactggcgcaccatgtggttggtgaagaaagacttcccgctaccgctcggcccaagtatgaacttgttgcggttggtggtgatgcctttcttcatgggcaaatccgatatgtcgatgtgcagcgggcgaccgcttaccctgtccaccattttgataccgaacggcgaaagcgaactcttgtagttcgtttcttccacgaacaggcagagagcctgccccaagaacgtgtagaaactttcctctgcggggaagtccgcctcgttgccgggtatgcccgcccaaaagagcgtgggcgtgtcggtggtgttgtggcgtggtttgcactccattagtgcaagctggcttcccacatcgttgcgtatgcgtttgagttcgtccctgtcgtcactccatgccatgacgttgcagtggcaacgcaccgagataagccccttgctgtgggcttcgttcaggtactcgtctatccactccttgttcacttggttggcacgggagtaacgggagagcgattgcatattccgggcggtctgctcgaagttcttcaggttttcggcgtggtcgtctatgaagatgaactggttatagatgtggttacacgacaacagcacgcccaccggggcggcgaatgacagtcggcagtcgctccggtctgtggacagcttctcaaatcggcagtccgtcccgacctttccgggcaaattttccacgtccgagagcgtgtgcaggcacagtatgtcgtccccgacacgcatttcttccgggtacagcccgatgtctttcaggcaggtggtatctgtctgcgagagcgagaagtatttctcgatgatgcccgcctttccgtcctgcccggtgatttccgatgccgccagccgggtaagggtgacaaacccgctgtcgttcataatcctttcaaactgcccgaccgcttcgatgaactttgccgccgcttccttgtcggctatctcccgagggagaatcctgccccggcagagggtggagaagtcgctctgtcggcggcttctctcccttgtcgtctttgtcaggaacaggtagcagtaatggttcaggaacgggcgttcattgaagtgccgttcaaaggagcggcttaaaaaactaagctcgtccctttcggtgtcgggctggtagttcttcttgatgaagaagtcctgcttgtgtactatggagtagtctggcagcaccttgattgccttgtaccatgccgagtgtatggcttcgtactcggcactggtgacggtgaacagttcgggcagttccaccctgaaagccaccgttatgtcggcatcctttgaaatgatgcaaccgttctccaccgccaaaagtggaaatttcctctccagcgtggtagcctttaatgtattcctcatgttctttcttcctttcttcttttgtagttgaacagccggggtatcgcctttcggctgataatgaagcgtgggtgtcttttgcgtgcggctgctttcatcagcccgtgcgtgccgtaccgtgcgttgagccggaacgtctgccacacgagcagcagcgaagccgacacaatgaaaccgatacatagccactggttcacgcccgccatgaacaggacgatgaacaccacgaagacggcaagcaagccgccgcaaaagataaagaggtactggcttttcagccccttgaactccaccggcttcccgatacccctgtttaccggatattcagacatagccgctggtttagaggaagaacgaccgcaggatagtggcggcgacaatcaggaagatgcacgccccgaaccaactggcggcggtctttgaggtgtcggggtcgccgctcgaaaacttgttatatacttttaccccgccaatcaagccgcagaccgccccgattgcgtacaccagttttgttccggggtcgaaataccctgtgattaggttcgtggcttcggtgatgcccgcctgcccgttgccctgtgcgtaggcacttaccgcagcggcaaggatagccgccgacaaaaagattttctttctcattgtgatttgtttttaatgccgggcggcgggtgggaagtccgccttacccggctggtgaataatttgaaattttagtggtcggggatagtcccgtttgtctgtttggttttcaggttgccaatcaaccgtaatcacgttgcttcatgctgtcagatttatacattattatattataggaaatcgttcatgtcgaacgcttcgtgttccttgcttgtattacctacttcggcagggacggcagccgtagccagttccgcttcgttgcgtcccagcagttccgccacctttgccagcccgccattgatgttctccaccaccgcatcgtagaggttcgtcccctcaatgcttgccagtgtcccggcggcttgccgctgttccgcttcggtggggttgtcggcgttcgccgtgcgtaccgctttgcccagttcgtcaaagctcacgcccgtagcccgcccggtatcatcgtcaccgtccatgtacccggctatttcctcgtcctcgtagtcgggttcgtcattctcgtaaccgggcgtttcttccacttcggctgctgcttccgaaatgttttcttccggctgtccgtcagcctgcggcgcaaaaatagtatcattttcagccgctttcgggaggtgtcccgatttgtcctgcgctgtcccgatttgtccgcccttgtatcggctttcacctatcagcgtgtagcctgaaaccccgtttcgtggaagcggcgtatcatccgttctgcccggtgatgtccggctgtccgtgtagcgataccacagccacagggcgatgtagtacaccaaaagcccggttaatatgcaataggctaccatagctaaaagggtttttggaagtggctttcatacaaggcgtttatctcgtcttggtactgctcgaagtggcgcagcagaatgttttccacgtagctgcttaccgttacctttcgcccgcctatcaccgtcacgatacgcatcagcttctcgtgcgtggaacggctcacgtacaagggctgtcggtctgccagttccactttctgaaagtaggtttcccggtagtcgcccgaaccgcccttgcgcttgcggggtgtcggtttctctacttgcaccgtttctgtttgtgtttcttgcggtacatcattcgtcttattattatcttgtttactgggtacgccctgcgagataagttctttcatgaaatcctcgtctatcttcggcatcccgccgctttgctttgccatatcattgtaatttgatgtagtacgttatttcggttatcagttcttccaagttgcttccccttaccagcaggcggctggcgggaaagagcgtggagcggaacaccgcctttttatccgctaccagttcctttttgtagcgtttggtatcggggataaaggttttcatcagcggcagttccagttccttaatcgtcttgtcgtaggcggtgtaaaggtctgttttctcccgcccgtccaccatgttccaaaaaaggtacagcccggcaagtcggcaggcttcattcttcaccagtagtttttggatagccattgcgaacgacaggctgctttccagcaccaccttgtcggctgaaatgggggtgaagatgtagtccatgcccgcaagggagtttatcacgccctcgctgtttaccgtgccgggcaggtcgaaaaacacaatatccggcacgtgtccggcggctatatgttcgtcagccgttgcaatcgccttttcgggcgaactgcacagtaccgggtaggctttcttccccagccgggtaaactgttcatacgccatgcgcttgtaatcttcatccgccccgacctgctcggcatcccgctttcgcatcccggcaatggagtgttgggggtagtcgcaatcgaccaccgccacatcgtagcctttgagatagtagaggtaactcgccgccagcacggtaaaggttgttttgccgaccccgcccttttgggtggaaaaggcgacatacaggggtgttttctcgttttccatattgctttcgttcattattggttgatttatttattgctttcaatcattcattctttccatgtttcaatcttgaaatattgaaagactgttttatttcaatcttgttttcctgctttcattctttcttgaaatattgaaatcctgcaatcatgctttcttgaaatccgatgcaaaaaaagggagaaaaaacgtcccctgaaaaccttgtcccgatttgtcctgcgctgtcccgatttgtccaccaactgcctattttacagcattataaatcaccgttactttgcagcggagtaacgaaccgccgggggcgcaggtgtaaaaccgggctggtgaacggcagggcttaccgcttcacgctaaccccaatccgtccgtgacggatttcgattttcgtcagaaaatagcaaggtgtgttttgtatgctacaaaaccgttttccgtgcctgaaaacgccttgccccttgcgggggtaaaaatcactccgaagtcgtaattttttaatccaaagaagcatggaaacaagaagaaccaacaagggtggtcgccccgccctcgcagacccggcgaagcatcgccatgtcctttacctgaacgaccgggagaacgcccgcttcctctcgcagtgggagcagtcgggcgttacgagcaagtcccgtttcatcgccgcccggttgttcggcgagccgttccgggtggtgaaagtggataagtcagcggtcgagtattgcgcccggctgaccgaattttacgcccagttccgggcggttgcggtcaattacaaccaagtcgtaaaggcgttgcacagcaacttttcggagaaaaaggcactggcttttctctataaactggagaaagcgaccaccgaactggcggcactgaaccgccaagttattgcattaaccaatgaatgcaaggaactatggttgccaaaataagcacgggcggcaatatgttcggcgcactggcttacaaccaaaacaaggtggacagcgaggaagcaaaggtgcttttctccaaccggatgctgttgggtgaggacggaaatttctctatcggcgagtgtatgcgcagctttgaaatgcagatgcctgtccagctatccaccaagaagccgatacttcatatttccataaacccgcacccggaagacgtgctgacagaccagcagctttccgacattgccaaagagtatatgcggaagttgggctatggcgaccagccttatttggtatataaacataccgacattgaccgccaccatatccacatcgtggggttgcgggtggacgagaacggcaagccgctgaatgacaggttcgagcatcggcgcagcaagcaaatcacccgtgaactggagcagaaatacaacctgcacccggcagagcgaaaggaacgtgccgaacgccccgaacttaaaaaggtggattatgccgccggggacgtgaagcaccaaataggcaataccgtgaaagcggcttgctatggctaccgcttccagtcgttcggggagtacaaggctttgcttgccgcttacaacgtgtgcgccgaggaagtcaaaggcgagataaacggcaagccctatcagggcattgtctattctgccatgaacgacaagggcgaaaaggcgggcaacccggtaaaggcttcccgcatcggcaagtcggtggggtatgaagcggtgcagcgtagaatggagaaatcgggcgaagcaatcaagaacggcaagctgaaagagcgcacacggaagattgtcgccactgccatgcagaccacccgcagccgcaaggaactggaacagcagctaagaaagcacggcattgacgtggtattccgtcagaacgacagcgggcgcatctatggcgttacgttcatcgaccacgacagccgggtggtgctgaacggttcacgcttgggcaaggagtattcggcgaacgtgttcaacgatttgtattccgatgaaagaaaagcggacatacggcaggaacaatccacgcatcaggaacagccgggttttacgccgaaatccgatatcgttccgggtgtggcttctgtgctgggtgctttcggtggattgttgggcggcggtgcatcaggcggtgacgagccgcaggacaccgcccgccaaaagagaaagaagaaaaagaagcgcacaaggcgcattgactaacttaaaaaaacattacaatcatgcaacaggaagatgatttgagagggcttgcacgggtcatggactttatgcgggctgtcagtattctattggtgggaataaacgtgtactggttctgttactccaccctgaaagaatggggagtgacgtttgaggtgatagacaagatactgtggaacttccagcgcaccaccgggctgttctcgtccgtcctttggacgaaactttttgcggtggtgttcctcgccctgtcgtgtatcggcactaagggcgtgaaagaggaaaagataacgtggacgaagatacattgcagccttgcggcgggagtaactttgttctttctgaactggtggttgctggaacttccgctgccacatacggcggatgccgtgttttatatcgttacgctatcggcgggctatatctgtatgctcatggcgggtacgtgggtgtcccggctgttgaaaaacaacctcatggatgatgtctttaataccgagaacgaaagtttccagcaggaaacaaggcttatcgagaacgagtattcggtaaatctgcctacccggttctactataagaagaaatggaataatggctggataaatgtcgtgaacccgttccgtgccagtcttgtactgggaacgccgggcagcggtaagtcgtatgcagtggtaaacagttacataaaacagcaaattgagaaaggttttgcgctctattgttatgattacaaattccctgacctttcggaaatcgcttacaatcacctgcttacacacttgagcggctacaaggtaaagcctaagttttacgttatcaattttgacgacccccgcaagagccaccgatgcaacccgataaacgccagcttcatgtcggacattgcggatgcttatgaagccagctatacgattatgcttaacctcaatcgaagctggataagcaagcagggagatttcttcgtggaaagcccgattattcttttggcggctataatttggtatctccgtatctatcaaggcggtaagtattgtacgttcccccatgccattgaactgttgaacaagaaatacgccgatgtgttcaccattttgcgcagttatcccgaactggaaaactatctttctccgtttgtagatgcttgggaatcagacgctcaagagcagttgcaggggcagatagccagtgcgaaaatcccgctttcaaggatgatttcacccgccctttactgggtaatgacgggcgatgatttttcactcgacatcaacaacccgaaagagcctaaaatcttggttgtcggcaacaatcctgaccgccaaaatatctactcggcagcactgggattatataacagtagaatagtgaagctgataaacaagaaaggtcagcttaaaagttcggtgataatagacgagctgccaacgatttattttcgagggcttgacaatctgattgcaaccgcacgaagcaacaaggtagcggttctgctgggctttcaggattacagccagcttacccgtgattacggggacaaggaaagccgggtgatacaaaatactgtgggtaacgtgttcagcggtcaggtagtcggtgaaacagcgaaaatcctttccgagcgtttcggaaaggtgttgcagaaacgacagagcatgacaatcaaccagcgggaaaagtctacctcgataagcacccaaatggacagcctgatacccgccagcaaaatatccaacctcacgcaaggtatgttcgtgggtgctgtggcggacaacttcgatgaacggatagaacagaagattttccactgtgaaatcgtggtggacaatgaaaaggtgaagcgggaaaccgcccgttacgtgaagttgccgcagattatcgacttcaccgacaaggacggcaacgaccggatgcaggaagagatacaagccaactatgaccgtatccgtcaggaagtccggcagattgtcgaggacgagataacccggattaagaatgacccggagctatgccacctcataaaagaggaagaataaccgcaaggaggtgtgtcaaaattcacacctctttttttatgcacaaagccccgactttcacaatctgggactttgttattacctaaagattttgtttctttaagcataaagttttcgttatgccaaagatacattttcgcccttacaatcccaaccaaacagtgctttttcctcaaagaattgatgaggatattgcagaaaacgatccggtgcgcatagttgacgctctggttgagagcctgaatcttgaaagtttcaagaaattgtataaggaatgcggccgcagcccttaccatcccaagatgatgctcaaggtcattctgtatgcctacatgaacaacgtctactcctgccgtaaaatagaaaatctccttcatcgtgacattcattatatctggcttgccggatatgagcaaccggatttcattaccatcaaccgtttccgcaaccgggtgaagaaggaaatcaacgaggtgtttacccaaaccgtacttcttctctctttcaaaggtttcctcagtctgaatgtggaatacattgacggaacaaagattgaatccaaagccaacaagtacactttcgtctggcgaaaaacggttgagcggaatcgtgaacgcctgatgaggaagatacatgtcctgttaggacagatagatgatgtcatcgcccaggagaaatcatcgaaaagctatgaggcagttgaattcactccggctatactgaccgaaatggcgggagagttacgtcatgcacttgaaagagttccggagccttccactaaagaggaaaagactgcgctgaaaaagaaacgcaaacaactgaaggagctggaagaacacagggataagctgcaggaatacgacaaccatttggacactatgcaagagaggaactcctattccaagacagacaaggacgctacttttatgagaatgaaggaggatgccatgcgtaacggccagacaaagcccggctacaaccttcagatcggcaccgagaaccagttcattaccgattttgcactcttcccgaaccctacggatacactgaccctgataccttttctgcaatccttctcaagcagatatgacagattggccggtacggtggttgccgattccggttatggatctgaggagaattaccgcttcatgtcagaaaacggtatggaagcctacgtcaagtacaactgctttcacatggagcagcggccgagattcaaaccggacccgttcaagacggaaaacctctactacaatgaagaatatgactattgtatatgccccatggggcaggagatgcggaggataggtaccagacatctaaaaactgcatccggatatgtcagcgaaaatgccagatacagagccgtcagatgtgaaggctgtccgctaagatgccgatgttttaaagcaaaaggaaacagaacgatagaattgaatcacagactcagaagatacaagcagaaagccaaagaactgctatgttccaaggaaggactgaaacacagaggacagagatgtatagaaccggaagctgtgttcggacaaataaaatacaatatgaactacaaacgtttccgccattttggaaaggataaggtattcatggacttttccttcttggctattgccttcaatataaaaaagatgtgtgcaaaaatgagaaaagaaggtatgaattggatgatgagactgttttatgaacttacaactgctgtttttagatgttgggaacaaataaatcaaagaagtatccaaaatatcgcagcttaaaaaatgaaccgatttttatagtatacgaaaaaaagaaggtacatcgtacattacgacacaccttcttgtttttaagttgattttattatatagtttctaatttcgtaacatctaatacaatattatcagcagctatacgattacacacacttaatttaatttcttcttcgattatctttttgtcaaaatctaacttatctaataagaaacgatgttttatctcaaataactgaaatacatcatcccaagtcattgcgtatatttcaaattgttcttttatatgaactaaaaaccgtttattcttatcttgaaatgatttatattggtcttttatgaaatcatcaactttgttgcttacaacaaagaatttccacgaacgcatttgactattaaatcgttcttctccttttattaagtctaagtaatcttcaatttggcgaaattgttttttgcctattgttactgtcggacgttttaattcaactatgacattttcttccaacatatttgaaaaatccgaactgtcagcaactttatgttttctacacataaaaatatcaggtcgtctattccgttccgctgaatctatctgttggctatcttcattaccatctaatatgtataagtaattagacaacgccttttcaaaggtatcatcggctgataccaaatgaaattgttctccaaataaccaataattttcttctatcgcaatttgaatatgttctctttccgtagaaaacttttttaggtcgaaaacaagattttttagttgttcaacaacttcaaatctatttcgtatcatttttatagttcgtaatattcggcttaacgatgttgttcttaaagtttgagatagttgaactcgttcttctgttgataaagtaacgattccgctaagaatagagagtatattttctctttcgtctgtatccaataaaagatttaagaatccaacacaagtttgttgttgttctttctttaagcctttaaatattttgggttgtatgcagtatatttctttgattacatttaataaatcgagcttcctttcttggtcgtacttattatctcgaaatgctggaagcacgccatttctttcataatcagcgattaatttattcgccgcactttcttttacatatttcttttccttttctttcaaaaaggaaagaagtttcttttttagaattttataaac

SEQ ID NO: 77 - DNA, 12939 bp, Butyricimonas faecihominis
catacaaagtcaacctacgcaaggcataaaaatacacccatgacgaatacaattgactgacataagtacgtcgggcattatcctgctccgtctgtgccgcattcaaatccagcacactgatctgccccaacacgaaagtctcgtatgccgtcttgtaacgcttccgggcaacggtatccgccaaacgcacgatctcgttcagccgattctgttcctgatattgttttaccgccgtcatcacatcttgttcgaaattcaatgtttccttctccacctgtacccgtgtgatctctgcttgcgaacgggccaactccacctgtccccgtcccttcccccaattcaatattggaatacttatccccaagctaaccgcctcccggtttcgcagattctggtatgtctctttaaacgtcctatcacttcccgtgaacccgatcgaagcataaacgtctgccttaaaccctctcccggcttttgcttgtgccacctgctgacgtgcttgcagcatccggcaaaccacatcataacggaaaggattattcctattcgccagctccataacctctttaaacgtcacctcgacttccggacactcttccggcatatcaggaacaatcaccacgcgttcattatatcccagataattacgcaaagcaaacattttctgctcgtaagcctgctccgtctgaatcagcgatgacgaggcattcaagtaattcaacttcaattgtaacaaatcattatcggaaattaatcctctctcacgtttgccttgtgctatctgcatcagtttttccgaatttttcaaattctgccgatcaatatccacgttaatcatcgccagcaataaatcgaaataatacgatatagcctgtactgccacgttttccatgttcacggcaaactgttgacgagcttgcttgtacttttccggctcgatcttcatactccatttcaagggattcgccgtgatcaacggctgtgagaaaatcacgttaaacggcacgctcatatactccgttgtcttgtcaccatccaactggtccacccgctccacctgtgattgtaaggacaacgcacctcccgtcagcgggatattctgtgtcaccgacaacgccaactgctccgaaatcgaattactggaaatatatttgtacgtcccatcttccttcaaataactcgataacgtccggttaaaactcggtaatgttcccgtcaatgtcacgtttggtaacaaatcggatctataatttcgatattgccagtatgctgatctcaactgactttttgccaccatcgcatccagcgattgttcccgtgccaaacgaatcgcctcttccaaagaaacaaccttctgttcttgctgagctgcaacaggtaaaactaccaataaacaccaccatataaataatcctttcatcatatctccatttttactgttacgcttctcgcattgcttccactgggttcacctgcgccactttataagccggccaccaggcactaaacaccgcaaaaacaatcatcacgaccaaagtcatcccaatcgcagccacgtttactcccgtccattcatacacgaaaccaaaaaaaatcattcccggtaaggctgccaaaacactcaaaattaaactttccgttacgacaaggcctatcaagcgctgtttcgtagcaccaaccaccaaacgcaaagcaaactccactttccgctttttagaacttaaccaaaacaaaccaaatgtcccgataaacgcaaaaagtaacaaaaaagccgtgggaatagctcgcatggcaacaccgaaaacgacatcgaacatagatcctcgtttcaatccgctcatttcataacaaaacgatactgccttttctgctaaccccagtcgcttatattccttgctaaaacaagagtgaaactcattttcgtatcctagcttgatcttggcacaacattcctcgtaagaagataattgttcctcatccctaggaatgattatcgccgtaggcatatcggaaaaaacattttgtttcacgccaggacttatccccacgatagtcaacgtacgtcccgctaggtacaatcttttccctatcgcctcactccaccccaacttattcatcaactggcgagttatgactgcaggacgaaagccgtcctccaaagcattattcgtaagccactcaccttcctccaatttcggttgaaaaacactctgcgcctctttatcagcaaactttacaataactaccacggattttccatccaccttaaccgtgtcggcaaacatcccgtcataataaacatccgaacgtagataaggagccaaaccgtaactccgggtgatcgccaccacgaacggttccttcttcaatttttcaataataatattcattccctgtcccacatcccgcatgtcatacggactaccattaccaccaccgtgcaacatatacccgaaaatcatcgtattatccgtatttaatagtccgggttcccgatatttgtctatcgtttcaaacaaagccaccatacttaccatcagaataacaaatatcaacatttgctccatcaataccccggcatattttctccgctcctgccaaagcatctttaatacatgccctatcatttagaacctcctttcaaaaccgtagctatatttttccgggcaataatatatgccggaattccaccagataataatgtaaacaacaacgagagaggaaacaccccgcatagaataaccagatagtccaaatcctctatcaacgatatttgtccctcgtctccgttattaaaaaatgacacactgatccaatccgccaccgggtacgtcaggaatatacctaaaatagccccgacaatcaccaacagagcgatctcagagatcacttgcatgaacgaatccccaagccctgctcccaaagctcgtttcaacgcaatttcatccgaataattatccacgttcgccatattcaaggtaacaatatttatcgcaggaataagtagcaacaagagaatagccacgggaatcccgtaagcatacaaatcagaaccgaaattatcaattcttgcctctcggaatgtatataaattctccggtttcacatccacttgcatatttatttgccgccaataatccttaaccgccacggcaacatcttctttcatattttggacggggacatcccggggaaacagaacacccaaatcgtaatacccaaacccacgaggcgaaaagctattaaaaacatgaggtatccatatcccgtccgcacgaatcgcataagtcggaaaattacgcaccacgccgataaccgtgtactctctcccctgaatctccatttttttcccgacaacactttccctcttgaaaaacatccctgccatatcctccctcaacacgacatacgcatctttattcaggcattcctgttctgtgaaaggacgcccttctataaaatggaactggttaatcttccaataacctccatttacaaaagcaaaagaaagtgtcttgtacacgtcattcacggccacctccccgacactattataatacatgaaataatcctctttcgtccgtatcctttccattaaccaagccgtactcttcgagtatatacctccaacatcccgtccattcatatcttgaaaagtgctgaacacaattgtcctatcaccattcacaaaaggagctttatcactggttgtatcatacacgagttgaagcatgataataatgaacacgaatgtaaatgctgtaccaatcacgcagaacaaagcatacactttattatgccctatactacacaatgctgatcttaaataatttttccatttattcataatctctttatttactattcttctcgcatcgcctccacgggatttacccgagtcaccctataagctggccaccaggcactaaacaccgagaacaaaatcatcacccaacaagcacatcctaacgcagacaaatagaccggatccaacggatagacaaaacaaaataaaataatccccggtagtaacgctaataccgaaagcaataagctctcacttatcacaaaacaatataattctcggggcgtggaaccaaccacaatccgcaaggcaaactctttccgccgtttggaagaatttagccaaaacaatccaaaagttccgataaacgcaaatgaaaaaagaaaaaacgtaggaatccctatgccaagtaagataataaagacatctcgcatatcattcagtttccacttttcaatatttccaaaagataatctcacataatccttgcccatcatcagattaaattctttgctcatcaaactcctaaaattatccgcctctccctcttttatacgagctgtatattcaaaccacgtatccggttgtactcgattaggcacgatcatcgtgggccgtgcaacctttaatggctcctgctttattcccgccaccacgcctacaaccgtaaacacgatcccattataatgtattctcttaccgatcccttgtgaccaactaagttcctccatcaactgactggttatcacggctggataacttccatcctccaacggctcatccgtcagccataccccctcttccatttgtaattgaaaaacttgattcatgtacttatccgcaaacttcaaaaatacctgaatctttctcgttcctatttggatcgaatcactcaagtacatctcttcaggacgagtataaggaaccaaccatttactttttcccaaagcagtcacaaaaggagattttcgtaccttttcaacaacacgatccatcttttgctgtaattccgcaggcgaaaaatcttccgagggtaaaacaggatgtaacatacatttaaatgtattcttagtattcaatatccccggcgaaaaatattgagcaatcttctctccgacaataacaaaacaaaatagtaatgcaagaaacacaagtatctgttccgcaagcatacccccgaatgttcttttttgatttaaaaacaatgtaaaaatatgcctcatcatttcgtacctcctttcaacatatctacaataggacgtttcacagtcaaatatgcgggaattccccccgacaagaaagaaaacaacaaagccaaaggcaacacgctgatgaaaataatggtccaattcaactctggtaataacatcatttgtccctctatactgttcgaaaacacaatccaatcgattccgcaacacacgggaacagtcaacagaatccccaaaactgtacccataataaccagcaaaacattttctaccaaaataaataaaaaagacgtttttttactggcgcctaacgctcgcttaagccctatttctctcgcttgcacacttgtattcgccatactcaacaaaacaatattcaaaacaggtacaaccaaaagtataaaaaccatcacgcccactccagagagaaataaaccacctccatacattttccgaataaactgtttctctgtactaatctgtttcaccgagacacttttatctatattataatatgtcttaacaaaaaattgataagcattagttacacttcgaattattgtttctgtactcatattttctggataaagaatataagtttctacccaatcatttgattcatttttactaaacttctcaggaacccataaagaagcctttccctgcggagcaaaataggaaacatcagccaccacaccagtaatcctatacgtgttaccttcaatctgaatttccttattgataaccgatttatccggaaaaaaacttctcacgaaattttcattaacgatcacacaagacatctgcatctcgtcctctgtaaaaaaatgaccttgcaaaagctcaaactggaacacattccaataattgcgatcgataaaataaataccatactcatcatatcgtccattcacgataatatctaccgcttcataatgataagacgtgtaacagacctcctctctcacattgttcatcaatgttcgaatatccgacttattcaaacctttcaccgcctctcccttgttatctctcaacacgaaaggaacactcacaattcgatccgccgcaacagctggagccgtatcacacaatatcacgtatgccacttgcaacaatatcgtgataaacacgaatgtcaacatcgtcccgaacacacagaatccggcatacgctttatggtgtatgatattataccaaattggcttgaaatatattcttattctttccatacgcctctctttttattttaaagtctccgccggatttaccttcgtcacctggtaagatggataccaagtactcaacatcaacacgtaaaaaatcgcgaacgacaggttgtgccggatatggtaaaacgccgggataatataatttttccgccgattcataatactaacttcccgtcaaacaaacgaatgatccgtccggtttcctctgccaacctctcatcatgcgtcaccatcacgattgtcgttccctcccgattcaattgcacgagcaaatccatgatctccgctcccatcttactatccaaatttcccgtcggctcgtctgccagaatcactttcggctgcccgatcaatgccctcgctatcgccacccgttggcactgtcccccggacaactgcgaggggaaatgtttcaaccgatgagtcaacccgaccttttcaattaattccagtgcccttttcttattggccgatgcggaacttccccggcgatacaacatcggaagcaacacgttatccaacacgttcagcgacgggatcaaatggaaactctggaaaataaaccccagtttctggttacgaatcctcgccatatcccgatcatacaaagaatccgcccggacatcatcaataatcacccaaccactcgttggcttatccaacaaccccataatattcaacatcgtactcttcccacaccccgaaggtcccatgatagccacaaactcacctttctccaccgtcaaattaatatcttccaatgcccgtgtctccacctcgctcgtgtaaaacgttttattaatattttctaaaattatcatacgatttaagtattagttgattcatgatttattttaccattacaaacataacgaactccttcctagaaaatcaccctgaattattgtaaaactattgtaaaatttcactcccgacatatcgctcaaccacaactccttgtaaaatcaattctaaatacgtaatttcgtctcgtctatgtggcggtaaccattcaacaaacgtgcatgttgaaatagcaaaagaaaagtgaatgaaacacgatttaagaataataggttatatcacgttcacgatattcattttattgtggatcaatcaattattctccggtattaaattatacgaaaccgtcaagacacgctggcagattcacatggattctataatagaatcagttattcccccgtacgtggaaatcctgcaaacggactccgttcaagaacgaacccatcttttcttgtcattagacagcgtattacgctcccaaacacccgatgccgttcatttcaccatcgcacaattagacagcacaaatcaaatcatagtccgattccagcatcacaaaacgcctacgcccgacataacacgaggaaacagttttccgataaataatctttcccacgaatccttggccatttattacaattttccaatctccttctttttagaggaatcatggcaagacatcctcgccattgtcgcactgacactactacttgttctaggtttacaatacctctcccacgcccaacaacatctatcccgccttcaggaagaaatgattaaacaagtcgtgcatgactggaagacccctctcgcaagtatcgttaccctgtctgaacttgtagaaaagaaatccatccccgaggatgacgaaaagggacgtgcgaaaattaggctcatccaagaagaagccaaccaactgaaaacaagctctcagcaattgcttaaaacgttaagtgggctcgcccacttgaacatcacccgggacgaatttaacctgaaaaacgagatactctcgttattcgagaaacaatacctcgccaaccacgaacaaaaagatatccagttaaacctgcgctatctcgttgaatccgaaattgtttatgcatcacatttctacctactcggcgctcttcaaaatctcttggataatgccgtgaaatacagcggagaaacgccacagatcaccgtaatctgttaccaaaaaagaggaaccttcgttatagaaataagggacaacggtcccggtattcccaaaaagcaacaaaaatatattttcaacaaatattatcaggcaaacaaagactctaccagtaaaaaaggatacggtttaggcttgacatacgtctacaacgtcatcaaagcccacaagggaaaaatcacggtggacagcccgccgggaaaaggatgtacattcacgatatacttacgcaaatggaagaaaaaataaatatactctatgccgaggacaacaccacggccgccatgatatacacggaaatccttgaagaagccgggtacacggtaacccttgccaaagaagggaacaaggcatggcaactatacgaaaccggagcttgggatctcctgttacttgacatggacctaccgggaaaagacggccacgaactgattcgccttgtacgggaaaaaggggatcaggttccgatcgtgattctcagttccgtcaatcacaaccatgccctgtacgagggagccgacgattatctcgtgaaaggttgtagcgtggacgacgtgaaagctcgcttggacaaggctatcgccagaaccaaacgattgaacacggaaaaagaacaaggccttttccgcgtctctcccgacaccaccttcaacaaaaacaaccgactgctcaccatctccggcaaacgagaagagttgaaaagtatggaatcaaacatcttatggctattctgcctgcggatcaacgaggtgattcccaccgtggaaatgtgcgaaacgctctggggtgtctataccacagacaaggaaaaagccctcaccagatacgtctgcctgctgaataaaaaactgaaagcggataaaagcatcgctatccaaaacgaatttgctcgaggttacaaactcgtgaacggcttgtagtataaaaattcaccctaggccctcaaatacataaatgcaaattaatgtcacaaaacgtgacattatcactaacatattcttatcaaattgcgagccgctcccattccgctcccattccggccctatccccctcctacaattaaaattaaatattgcaattaatttgtttttttaaagtaatctatctacatttgaaaactcctacatagcattattttagtcttaaaataggagactgactcataaacacgaccgaaaggtcaacaaaatcagaaaatacatggcaacattaaacgattcggtattacaaggagcctccgggaaaatcgggggatacgtgacttacacggtaggaaataaaacgtatgcccgaaaattggcagacaccatcagcaacccgcgttcggaaggacaaacgacacaacgttcaaagctccccggagcccagaccatgtatcgtgccacacgaggaagcatgctggaaaaagtgtacacgctcgtggcacgggaagaggaacgacgctccggctaccactggttccttcacgcaaacatgaatatgttcggcccgaatgactacatcgattacccccggctagtcctgtcggatggtagcctgcaattacctttcgggatgaaagccacggccattcacgcagacaaactggaactggagtggctggataacacgtcaaccgtcaccgcgcaagcgaccgaccaactgaccgttgccgccatctttgacaacgaaccctatcaacccgtcgtgctggatgacacgggattctgccgatcaaatggaaaagccatcgtacccgtcccggaaggaacatggacaacagcccatttatattgctttttcgctgcccaagacgggaaacgttactccccctgcatgtatttctctacttccaaatcttaaaacacgaatatcatggcaatctttaaaccgaccatatttcaagacatctccggttccgtcggcaacgtaacctcctacaaagtgggtaaaactcaaatcgcgagaggaaaaccgggtttcgtgaaggatgcgaaaaccccggaacaattgaaacaacgtgccagacttagcctgatcacgaaattgcgtcgccgtttcctcaaaatcctatccgtggggtattgttccccctccggcaaaatatgcgccaactgcttcacccgtgacaatattcacaaagtaaacgccgatgacgtggaaaatcccaccgtggacctgttgacgctctcgctctccggtggcgggttacgattacccctcatcgaggctgaagtgaacaaggaaaaacggctggtcacgttccggtggaaacaacaaccattaatgcctttcatggctaaagaagaccgcttgatgggtgtgattcatgaacgggaagaaaagaaaagccggctcgtggaactcggaactagaggtacaagcggggaagaagaatggtcgttaccggaagactgggacgtgaatcaactggtcgtgtacggtttcgctgtcagcgcaaacgggcagaacgcatcggggacactgggattactcgaaactaacggggacgcctgatcacgaatcaatttccagattcgtgaaatcccccgtgatttcaattctcggttccggatattcaaaaagggcaaaacgggattccgtgcgcccttcagtataatcccacaacgaactataatcctccacacgttcgcccaacgcttgcaattggcgtaaataagccgcgatcgacttactttccacgatataaatctctccctcgtgatccacttgagggctatgtcgtcgtcccacgtccagagaaaaacgtaaaatacgctttccctcctttgtcatcccgaccgtctggtacgtcatgctcttcccgattccgggcaggttcatcacgtttcgatccgtggccaaaaacggttgccagtatttatccaacaaatccggtaattcagagggaatcctttccgggtatttcaacaattccaagatctccttttccaactccacgggtaaatctccgtacactttttcctccaacatctcttgtagcgaacgactattcggggcaaacaaggcataattctcctcgaatcccttcacggaaaaggtataataggtcagaataccgattcgattcaaaacctctctcaacctcgccgtatgtccccgacgtgaaactgccacagtgaacacagcctgattggtgataatccatccggcctccagcaagcgtcgggtagcctgaatcacctcctcggtcacttccaaaggcgactcgaaatgagtctgtatgaaaaattgctgaatcccgacctgttccgccttctcccggaatcttttcaacacttcgatcaaaccgtcatttacacgactgggtaaataagccaataacctcgaacccaatctcacccgttgtatctcggcatattttttccctttcccacgccgtttgttcaattctcgcttgcgcacggccatacggaaaacagcatccagaattttctccaacgtctggttctgactcatcagagcatcccctcccgtgatcaaaatatcccgtaattgagaatcatgctcgtaatacatcatcagacgctccatcttgacttcccacccgtctgtcggtttcagccgatccaagttaaaattcaaatgtcctttctgaaagtcgtacattcgctggcataaagcgcacagcccgccacaagcccgtcccatcgaatccgggatgaaaatagccacttcgggataacgacgatgaatattcgtggcattgggcaacaaccacccggcagcattcggttttcccggttccaccacatcctctttttcccacgcacggatttgcccgaaattctccaccagctcttcggaatagatcacgtaactacgaatcgtggaatcatcgtacccatccgtccgaacgctcaacaaggaaagataatagggtgtcacgaaaaacgggattcctttctgcctcgcccggtgtaaaagctccattaactccggcgataacgtgttacccatgaacaggttcaactcatccggttcccggacagctaaagcgagatgaaatttataatccccccaccattcactcaccaactcccgttttctctccatgctcattccctcttcaaaacgataacgggtattcaacttatctctcttctctattttctcgatcaacaaaccacatatccgctcccggttctcccgtcgctcttgagctacatcctcatccatcccggttttccaacgtccccgccattgatcacatcgtgcccgctccggtaaaacgacttcatctgtctggtatttcttaaatagataataccaatccaacaaaaaatccggatgtatgccatccccctctccccgtaaagcttgccataaccatttaatcggttcataacgaatcttctcccccgtggaaaaatcacgaatatgccgggtctcgttcataaacatccggaaaaatcgttttatagacgaagaagtcgaatattttgtcaaagcggcacgcacgtaccccttcaggaattgttcaaactctttccaatccttactaaggcttgcaccttgcatgatcgtcgggaactcccgctcaaataaactcaccaactctacacacgaaaaattcaatacatctttctccttcacattttctccttatcttagattaaacaaaaacgacaaatggatatcgcccaaacaagtccccggaagtcagggtttcgaacattcatatag

SEQ ID NO: 78 - DNA, 12931 bp, Butyricimonas faecihominis
ttttcatactatattaattagttacagcctataaaattacaagtttctattcaaaaaatcaatctgcaacacagctcatcaggcaaaacaattccaagccctccgtttcactcaaattttaacgaagaaataaaacatttgttacaagataattacattttcatgtaccgagccttcataccacgtttaacggcaactcgagcaaccatggataaagcgtcctgcaggggccacggaccttattacggactttatagatcttataaactttgacaaactttaagaaccttatgaattaatctcgataaaaaacagtattttcgcgttactatgaagaaattggacatcaaaggcatattcacaaggccccggaaactactacttcaccccgaaatggaatggcaggtgatcggtcgggagaacatcgagggaatcgaacttttcaagaatttccttgtgcctctgtccgtactttcttctgtatgtgcaatattgctacgtttgttatcaacctcacctctctacgccatcggaaccggcatcatcctgttcatggcctccgtcgtgggaagctacatcgcctaccgggtgacccgggaatatctctctaataaagtggctgaagccaaccggatggcccttcgccttgccgtgtacagctcggccgtcttcatcccgttccactgcctttccagtggattctcggaaggatttatatcccaactcatggcaatatgtagcctgttatgcctgcgaacccttcacgtcgggttgaaccaattgacagccctcgacgtacaataccgcaaaagcgccatcgtcatcatcggtttgctcgtgatcgtgtccccgatcatcatccagcaactattgatgattatgttcagaatacccactatttacgcttaaacatcaagacctatgcaaaacgacattaatataaaaaatagaagagcatccttcgactacgagttcttggaagaatacaccgccggtatcatgctcaccggtaccgaaatcaaatccatccgagccgggaaagccgggttggtggattcctactgttacttccacaacggcgaactgtggattaagggcatgtacgttgccgagtacaaactaggtacctactacaaccacatcgaacgccgcgaacgtaaacttttactacaaaagaaagaacttgtcaagctcgaacgcaagaccaaggaatcgggactcaccattgtccccgtccgtctctttcttaacgagaaaggctttgccaaactccgcatcgccctcgcccggggaaagaaagagtacgacaagcgggaaaccctcaaacaaaaagacgccaaacgggaaatggaccgctacatgaaaaaataaaacctacaaacatgcaaaaatacattcttatctaccttctttttctacttgtcacttcctgcgagaaggacaagttcgagggaatagaattatcaataggcaacgaaatacaggtaagcagcgagcaacaaaccatccgcattgctcttcggagtggttcagattggtcatttgccagcccaacctcttggtgccgggcaagcaagatcagtacgccacaaggagatacacttgtgatcaacacgcaagtcaacacgaccacaaccgaacgcacggggaccgtcacgatctccaattcagaccaacaaaaaatccttaccgtgacccaaaagggagaaatctacttcgaacttccggtcattttccacgtgtactcggacggttccgcaaatgatgcaaaagtcaccgccgcctacattcaagaatgtatggattacgtgaataacttctaccgaggcaacaacgggaaaagcgagaatctcaacctgcaattcacccttgccaccaccacgcccgaagggactcccttggttgaacccggaataaataccattcaaagttcatccacctcgttcaatgtcgataattatttaagatacaacacatacaacggtacacaaataatatgggaccccaacaagtacatcaacattatcatctgctcctttaccgaagaaaacgtgacgggaatcgccatgaccccgtacaccccgcaaggcaaatccctaccgggtttaagaagaaatgatacatattataccagtcttcccaccaactccgtgcaagccgtgatgataaacaagacatttgtaaacaaactagaaacaggagcttacggtccacaaccggtatggcccaccacactcgcccatgaactagggcattatcttggattatttcatgtgttttccggtggtgacaacggacaaacaaccgattattgtgaagatacccccgactacgatcgcccagcctacgacacttggttggcaagtgtcccccgactaacttttgcccaagcagcacagcgtcaagaccgtaacgggaacacgttcacatcatataatataatggattataattacggttatcgtgatcgaatcacacccaaccagcgagctcgcatcagacacgtccttgattacagccctctcatcccgggaccaaaaatcgcagttgagaattccagtcgtgccactatcattaccgaggaaccactcatactcaagtaacccatcatgaagcgactaccttctctaatccttccttacacaggagggtataccacttggtaattagctctccccctgtgtaagggggagctggagggggtagttggttaatacagataagacttttaagtcagcctcttgttttcaaactcacgagactattccctacttttccccctgtggcaataaaaaatactgttcacccttcctgtccaacttcttttgttcctcagtcaactgcaaaaagttattttccaaacacaaccgtttcaatacaggcaaacggaacaagaaatccgggaccttgcccgtcaacgcgttatcctgcccccaaaaatattccagttttttcattccttcccacgctttcggtatactcccacgaaacttattacccgtgagagtcaatcttttcaagtttttcaactcaccccattcggcgggcaaaattccctccagctcattcctcgctacattcagttcctctaattccgagagccatcccaaatcagcgggaacctcaccttgcaatttattgtaggcaagactgagtaaattcaactttctcatattcccgatttcagcggggatcgtaccactcaacttattaccagacatgtccagcatggtcaagttatccaagtaaccaatttcagcaggaattgcccccgttaattcattatgacgcaaatcgagcttttccagcatcatcatttctccgattcctgcaggaatctctcctgacaacttattattacacaacaacatcaacttcaaatttcgtaaatttccgatattctcgggaatccttccacccgaaaaagcacttgaggcatttagttcttctaaagattccaaatcccccaactcttccggaaacgaagaaaacgtattattaggtatagccaaaatcttcaaccgtttcaaattactgatcgaagaaggcagagttccactaaaacgattatttgtcaaatacaaccactccaaattctccagttctcccaattccgagggtaacgtcccactcatcttgttccagaacacacttaaaaatttcaatcgtttcatcttaccgatcgaaggaggaaatgttcccgtgatcttgttacttcccaagagtaacgactccaacgcctcccaattccctaattcgtctggtaagtctcccgaaagattattactattcaaattcaaatacttcaaatttgaagctcgtgtcatttcattaggaatctgcccggtaaaggcattattattcaaatatgccgtaaccaaattctccaactgccccaattccttgggtagctcgcccgacaaacggttctctcccaaactcagttccgtcaagtttctcaacttaccaatcgacgggggaatactcccgctaaactgattcttccacaaatacaaatgttttagttcttcccaattcccgatttccgcggggatcgtccccgagaaattattaaaactcaagttcaagtattccaacttgaccaacttcgttaacaccaccgggaacggcccggacaaacgattcgttttcacgtagaaatttctcaagtttatcagattccccagcgtctccggtaactccccggaaaactcgttctctgagagcaataacgaccgcaagtgaatcaatcgccctatctcttccggaagaggacccgaaaacctgttcgatgtcaaatccagtaaagtcaatcccgtcatttttccgatttcagcaggtaaaggcccggaaaacctgttattttgcaaattcaagtaattcaatcgcaccaactcacaaagttccggcggcaacggcccgctcaaacgattattactcaaatcaagagatgtaaacgacacggcctccttgatttcagcgggtaacgaacctgaaaggccattatccgacaattccagacgatacaatttcggcaaagtaaataacacgccggggatcgctcccgtcagtcggttattcgataaaaccaacgcccacaattccttcagatgccctaaagtagtggggatcgcccctcgcaataaattattgtccagtgaaatatcttgcaaagtttttacgctccccaacgaggcgggaatctctccgtctatccggttttgtcccaatgataaaattctcaactttttcagccggctccagtcagcaggcaactcaccccgcaggcgattaccgaacatatttatctcttccaagttttccagaaacataagctcgtccggaattttccctgtcagcaaattcgaaggaatatccacacactctaacaacgagaggttcccaatagcagccgggatgtcccccgtcaatctattcgtacccattcgaaggaatttcaattgcttaagccctccgatttcctccgggatctcccccgacaactggttacgagaaagatccagcgtcaccagattttccaatttaccgatcccaacaggtatttctcccatcaaacgattgccgttcagtgacaactgcctcaacgctgtacactctccaatatccgttggtatactccccgtgatctcgttattacacaagttaagcacctctaatgtcttcagcctgaaaatagctcccggcagaactcccttcaaaccgtttgctcccagatatatactcaatttcccgttatcatagttccgcttcaccccgtaccactcctctacaggccggtcacttaaccagttctccttcgcccgccaatcttcccctcccagaacccagtacaattctttcaaagcggctcgttctgcggccacttgctgctctttcagcaacaaatccaccgcttgttcccgaacaattttcttttccttccctttttgtctctctttacgcgtttgtgcaactaacgggtcattcccgtaacaaatggaaaatacaaataacagaataaatgacacaacttgtttcatagccgatctttttaatatccgctactaatttaaacatttacaaacaaattgcaataactttgaacgggaaagtgaaaacttattaattttagattccagccgcacaaggccgacgcttcttaattttctactttcaacttttagtttttatcttttatcttttaactttccaactacccccaccaactcccccttacacagggggagagacgaacgcaagaaggagtcacgacgtaacaatgcaacgtgtcctccccccttacacaggggagagacggacgcaagaaagcgctacaatgtaacaatgcaacgtgttctccccctttccaagggggagctagagggggttcaatctaaaatttaaaatctaaaatctaaaattaataagatctttcattcctcccttctacccagttgatataagcggtgttgaccaccttattaccaccgggagtgggataatttccggtaaaataccagtcacccgtgtcattcgggcaagccacgtgcaaatcttcgacagactggaaaaccacttttacctcggcattcagatgctcgtcacgcaccatctcggcgatcttgtcggaaatctcttcctcggtaaaaggagcgtaaatctctttcacgtggttcaccacctgctctttgggcagtccttgttgtgctttacacttccggtacacctcgtcaatcagtccctccatgcctcgttccttcaacaactcgatggccgcattgaacgctataaactcgttcatccgggtcatgtcgatcccgtagcaatcggggtaacgaatctgcggggcggaagacaccaccacgatacgtttcgggccaagacgatcgagaatacgcagaatactctttttcaaagtagttccccgcacgatcgagtcatcaatcaccacgaggttatccgtgggttgcacgaccccgtaggtcacgtcgtacacgtgtcccaccagcccgtcacgtccggaatccgaggtaataaacgtgcgcagcttggcatctttgatcacgattttctcgatacggggttcgcggcaaatgatctcgtcgagcgtttcctcgctccacgttgcctttccctcccggatcaaccgttttttctcctctaccatgtattgctggattcctttcaccattccgtagaaggaagtttccgccgtgttagggataaaggaaaacaccgtgttgtcgagatcgccatccacggcctttaccaaacgaggcgtcaataactcgcccaattttttccgttcccggtatatattcctgtcattcccgcgggagaagtagatacgctcgaacgaacaactggcacgttgtcgcggttcacgcacgagttcctcggtcacggttccatctttcttgatcaacagggcgtatcccggacggatctcggaaatttccatgttcatgccttgaaaagccgtctggatcacggaagcctcggaagccaccacgaccacctcgtcatctttgtagtaataagctggacgtatcccccacgggtcacgcatcacgaaagcatcgccatgcccgaccactcctgccacggcatatcccccgtcccaatcttcgctactccgggaaaggaccttgggtaaatcaacagtacgttcaatcaacggggtaatctcctgtttcgaaaatcccttttccttgtagaaacggtacaaatcctgaatctcgctatccagaaaatagcctaccttctcaagcagggtcaccgtgtcggaataatttcgcgggtactgtcccgcccggatcaaactctcgaacagctcgtccacgttcgtcaggttaaagttcgccgccagcgctaaattgtgcgcccgccagttgcttgcccgtttcagcgggtgaacgtaatctatattattctttccgaaagtagcgtaacgtaaatgccccaagtaaacctcggaaacaaatggaaggttttgctttgcccaaacggcatccttctcccggagaatctccggtgtaaacggctcgtgaatccggtcaaacacgtcctgtatcgggttcgcgtcacaggaacgcacgcggtccatgtacttgtaacccggctccatgtcgagcttcaaccccacgactcccgcgccgtcttggccgcggttacgctgtttttccattaatatgtacaacctgtttagcccgtaaaggtaagaaccgtatttcttctgataataatccaatggtttcagcaatcgaatcaacgcgaaaccacactcgtgatgaatggtgtcactcatatttttttccctaatttcatgtattacccccgggatattctcctttcccggagagattacaaaagtaagaaaaaaatatggtttataaaccttatggacccgaatgttaatctcacgattaacattctttaccacacatttttcaaccaaaattcaaaattaggttatctttgcgaaccttaagtaaaaagaatgatgttgaacgtgctgaagaatagtatattgatcgtgttattcgtgctgataagttccagcgggatattggcaaaagggcaaaatctgtccttcaatggctcctgcttagaatgcaatttctgccggaacgagatctgtgaagtctccacgattcccctgttactctttcttcacgaaagttgcgaactcacactgggttacttccatgttgtcccggactccaagtcacaattggttccctttttcctgcaaaggaacagcaagaacaacaccgcggtagcacactccaaacgcaacttgtatttccacccgtattcgactctcgggaagaccaaatactacgtctttgccctgcgagaaatcattgtttagccggagatcaaacaagttacaggccgggttggtggcccagcaagttgcagttacaagttcgcaacttgtcgtatttatcccctgtaactaaacttgtaccttgaaacttgaaaacctgaaactttttataattatgaatcttactttattcgtggttgtgttgattacagccattttgctggtggttatcgctatgagcattgctcgggccatttctccccgtaccttcaacaaacagaagggggaagcctatgaatgtggcgtgcctacgcgaggaaaatcatggatgcagttcaaggtaggatactacctgttcgccatcttgtttttgatgttcgacgtggaaaccgtgtttctctatccttgggcggtcaccgttcaggatgccggaattaacggtttactgaatgtattatttttcatgctgatccttattctcggattggcttacgcgtggaagaaaggagcattggaatggaagtaaaaattaaatccatgaaatatgaagagttcaatgataacgaatatcttgaacaacttcgggcatccggcaccaatgttatcgtgggatgccttgacgatgttatcaactggggacgctcgaattccctctggccgcttacctttgcgacaagctgttgtggtattgaattcatggcagtgggagcggcacgttacgatttctcccgattcgggtttgaggtaacacgagccagcccgcgccaagccgactttatcatggtggcgggaaccattgtacacaagatggcccccgtgctgaaacgcctctatgaccagatggccgaacccaaatacgtgattgccgtggggggatgtgccatttccggtggaccgttcaaaaactcttatcatgtggtgaagggggttgactctatcatccccgttgacgtttacatccccggatgtcccccgcgaccggaggccctcctctacgggatgatccaattgcaacgtaaggtaaaagtggaacgtttcctcggtggcaaaaaccacaaggaaaaagagaacaaagaataatgtagaatttagaatgaaaaagattccgtgattgccgattcgatgattgagtgattaaaatcacttcatcgaaaatcattaaatcacttaatcaataggatctaaaatcattaaatctaaaattagtacatgttagtagataaaataaaaaatattgtccccgaggcagagatcgacgagagcggtatccttaccgtgacggtagagcccgccaagtacagggaactggctctccggctaaaaggggaccgggatctctctttcgacttcatgatctgcatgacgggaatggactggggcgacacgttaggcgtgatcagcctgttacaatccacggctcacgagcataaattatttttaaagacgttcactgccaaccgggaaaacccggaactgcccaccgtttcggacatctgggccacggccaacctgaacgaacgtgaagtgtacgactttctcggtatccggtttatcaaccatcctgatatgcgacgtctgttcctgcggaacgactgggtcggctatccgttacgtaaagactacgatgcagaccccgaaataaacccggtacgactggaaagtgaagaaacgttggatgcaacccccacgttcgaggctgattcccacgacggggaagtcagcgagaaagagaacatcttgtttgaagaagacgagtacgtggtgaacattgggccacaacaccccgccactcacggtgtactccgtttccgggtatcactggaaggagagatcgtgaaaaaggtggatgtcaactgcgggtacatccatcggggcatcgagaaattgtgtgaaagcctcacctacccgcaaacgctggctttgacagaccgtctggattaccttgccgcacaccagaaccgccacgcactttgtatgtgcatcgaggaagccatgggcttggaaatcccggaacgggtgaaatacatccgcaccatcatggacgagctaaaccgtctttcctctcacctcttgttctggtcatgcctctgcatggatatgggagcgctgaccgctttcttctacggtttccgtgaccgggagaaggtgttggacatcatggaagaaaccacgggaggacgactgattcagaactacaacgtgatcggtggcgtgatggcggacatccacccgaacctgatcaaccggatcaaagagttcatcaaatacctccccccgatgatcaaggaatatcacgacgtgttcacgggcaacgtgatcgcccaacaacgtttgaaaggcgtgggcattctcaagaaagaggacgccatcagttacggggcatccggcccgacgggacgcgcctgcgggtggtcatgtgacgtgcgtaaacacacgccgtatggggtatatgacaaggtgaatttcaaggaaatcctctacccggaaggggactcgtttgcccgctacatggtgcgcatggaagagattctcgaatcattacatatactggaacaactggtagacaacatccccgcgggagactacgccgtgaagaccaaaccgctgatcaaattaccggaaggtcactatttcaagagcgtggaagccagccggggtgagttcggtgtttacctcgaaagccggggagacaaatacccttaccgggtaaaattccgttccccgtgcctgccactggtatccatcgtcgacttgatcacgaaaggcggtaaaatcgccgacctgatcgctatcggcggtacgctggactacgttgttccggacattgacagatgaataaaaatgtaaaatgtagaatgaaaaagattccgtgattgccgattcgatgattggatgattaaaatcacttaatcgaaaatcattaaatcacttaatcgataggatctaaaatcattaaatctaaaatagaaacatgtttgatttctcaactataacacaatgggtagatgaactcttgaggagttttctcccgcacgctgctgccacgctggttgagtttatcctgatcgggctttgcttgctcgtgggatacgccgtgatcgccctcgtgctgatctacgtggaacgtaaagtgtgtgcctttttccagtgtcgtatcggaccgaaccgggtggggccttacgggaccatacagagtgtggccgatatgatcaaaatgttaaccaaggagatcatcgacatcaaccacgtcgaccgattcctgttcaatcttgcccctttcgtcgtgattatcgcgtcggtactggcttttggttgtattcccttcgcgaaaggactacacgtgatcgacttcaacgtgggaatcttcttcctgatcgccgtgtcgtccatcggtatcgtgggaatcctgcttgccgggtgggccagtaataataaatactcgttgatcggtgccatgcgaagtggtgcgcagatgatcagttacgagttatccatcgggttatctatccttaccgtggtagtattcaccggaagtatgcagctctccacgatcgtggaaggacaggcagacgggtggttgctattcaaaggacatattccggcctgtatcgcgtttatcgtttacatcatcgccgggacagccgagacgaaccggggtcccttcgacttgccggaggccgactcggagttgaccgcggggtaccacacggagtattccggtatgcacttcgggttcttctacctcgccgaatacttgaacatgttcgtggttgcatccgtggccagcaccctattcttaggcggttggatgccgttacacgttcccggctgggaaagtttcaaccaaatcatggattacattccttccatcttctggttcttcgggaaaacagccgtggttatattcatcatcatgtggtttaaatggaccttcccgcggttgcgtatcgaccagttactccgcttggaatggcgctacctgttgccgattaacctgatcaaccttttcctgatggtgatcattgtcgtatttaaactacatttttaaagacgaagttatgaagagtattataaaatatattacctcgtttttcaagggtcttttctctttgctgaccgggatgaaagtcacgctacgggaatttttcaccaagaaaacgacggagcaatacccggaaaaccgggccacgttgaaaatgtttgaccgtttccggggtgaactggtgatgcctcacgacgagaacaatcaccacaaatgtatcgcttgcggcatctgcgagatgaactgcccgaacgggaccatcaagatcacgtccgaatttgtcacggatgaaaccggcaagaagaaaaaggtgttgataaaataccggtacgatttaggtagctgtatgttctgccagctctgcgtgaaaatgtgccctcaacaagccatcgagttcaaacccacgttcgaacacgccgtctacacgcgcagcaagctggtgaagtacctgcacgacgagtcaattgaaaatggacaattgaaaattgaaaattgaaaaggactacccccaccggctcccccttacacagggggagttagagggggtagttgggaat

SEQ ID NO: 79 - DNA, 12924 bp, Butyricimonas faecihominis
ttttacaggttaattatatgattcaacgaataatatgtgcattgtcgttatgccttttattgtttatcccgttccatgacatcatggcgggggaactcgtgacaagagattcgctgaacaatacaactgacacgttgaagaatggattctttcaccgtctctatcgttatttcgagcaatcgaacaaggtgaaagaagaaaagaaattcgacttctccatcatcggcgggccgcacttttcgagtgacacgaaactgggactcggcgtggtcgcatccggactgttccgcatcgaccgggaagataaaaccatctccccgtcaaacatttccctttacggggatgtcacgaccacgggtttttacctgctaggtatccggggcaacatgattttcccgaaagaccgtttccgggcaaacatcaatatgtactttttctcgtttcccagtgaatactggggaatcggctacgatgcggggaaagacgaggatcacaagacagagtacaaacgattggaacaacaggtaaaactggaacttctatacaaactcgcacccaacttgtacgccggggcaaacctcatgttccgcaatgtcacggcaaggaatttcgatgacatcacgttcctcaacggggccaagaaaaacgtgaacaccttcggaccgggactcgttatatcttatgactcgcgagactttatcccgaacccggcaagaggctttttcgcccaactggaacaacaattcttccccggatggctgggaaatgacgatagtttcaaacgcacaagcgtggatttcagatattaccagaaaatgtggaaaggtgccatactcgccagccagttacaaggaacattcaactacgggaataccccttggagcatggtttccctcatgggaggatcatacgccatgcgagggtattacgagggaagataccgggacaacgacctgatacaatttcaggtagagtatcgccagaagatatacaaccgccacggaatcaccgcatgggcaggagccggaaacgtgttccccgacatggacaaattcaagtggaaacaaaccctgccgacctacggaataggttatcgctgggaatttaaaaacagagtaaacgtaagattagattatggattcggcaaaggcgtcagcgcattctacttcggcattaacgaagctttttaaagggatcgtgaatttcgtgaaacggccaaaactattgttttggctctttatcgcattgaatttagtcccgaatttctgtctgcttttcacggaacctctctccggactgggcaaaacgatcttgattctgctaccacttggtgtttacatggtcgtgttctccctgttcaaacgggcgggcctcatgcaattgatactgattccggtactgatcttacacgccttccagctcgttttgttctatctcttcggagagtcggtcatcgctgttgatatgttcctgaacctacccaccacgaacgcctccgaggccggggaattgctgggaaatatatggccctccattatcattgtctgcgtcctttatatccccgttatcgtgctggcctctattgccgtacactataaagtgaaacgtactgccgtattccgcaagcacatgatcacgtggggaatcatcttctttatcattggttccggactggtcgctttcgagaaacaccgggataacacctacgaggtaaaaacagatatatacccggcaaacgtgatgtataacctatattacgcgggagtgaaatggaaccgcagcatgaactaccccgtcacctcgaaagatttcgtctatcatgccacccgtgattccgttcatcaacgccgggaaatatacgtgctggtaatcggggaggctggaagggctgaaaactgggaactgtgggggtatcatcgggaaaccaacccgttattaaaaaacgaggataacttggtactatacaaagatgccttaacacaatctaacacgacacacaaaagcgtaccactcatcttgtccgccgccgacgcttgccactacgagtacctctacacgcataaaagcatcgtaactgccttcaaagaggccgggtttaaaacaatattcctgtcaaaccagacaccgaaccgatcattcacggattactttgccgcggaggcagacattcatgtcaatgtacgtccacaagcggacggagggttaatcacggtcaataaattcgacggagaaatgctcccgttgatacagcaatacgtggattcgttgagcgagaacctatttattgtcttccacacctacggatcacacttcaactataaagaacgttacccggaagaatttgccaaattccaaccggccaacgccacggaagtcgagtacaaaaacaaggaccaactcatcaacgcttatgacaacagtgtcctgtacacggattacttcctgcacagcctgatcgggatattgaagaactcgggagctgatgctaccatgatttactcgccggaccacggggaggatttactggacgacagccggaaaagattcctgcacgcctcaccgatcccgacctattaccagatacacattccattcctgatgtggttctcggataattacatcgacgctaggccgaggatgtacgaggtcgcacgttacaatagtagcgcccccatttcttcgaacgcctcaatcttccataccctgttgaatatggccgagattcagaccccttattttgactccacttactcgctcgtcaatcccggttttgtccggagaccacgtatgtacctcggagaccacgaccaacccgtgaattattacgaggtcggattgaagaaacaagataaagagatgattctcaaaaggggaatggactgttcaattgagtgattctatgatttcctattaagtgattttatgattagatgattaaaaagagttaagaatttaacatcccgtatgattgttgaaaaaataacatgcccctattgttcaagcaatgcttattcactacttttgaggcgttaatataacctaactcataaaaagactcccggaaagggaatctaatcattaaatcaaattatacacgatgaaagtagcagtagtaggagcaacaggattagtcggaagaaaaatgttgcaggttctggaagaaagaaacttcccggtaacagagttaataccggtagccagcgagcgttcggtaggcaaagaaattaccttcaaggggaaaaactacaaggtcatgggtatgcgggacgcaatcaacatgaaacctcaactcgctattttctctgccgggggagacacctcattggaatgggcaccccaattcgccgcagccggaattaccgtggtagacaactcgtcagcttggagaatggacccgacgaaaaaattggtgatccccgaaatcaacgcaaacaccttaaccaaagaagataagattatcgcgaacccgaactgttcaacaatacagatgctggtcaccctagcccctcttcacaaaaaatacgggatcaaacgcgtcgtcgtttccacgtaccaatccgtgaccgggagcggtttgaaaggaatcaaccagctcgaaggcgaacgggaaggccgggaggtgaaaaaagcatacgctcacccaattgaccggaactgtctgccgcattgcgactcattcaccgacaacgggtacacgaaagaagaaatgaaactggtcaacgagacctgcaaaatattaaatgacgacacgattaaagtaactgccacagccgtacgggttcccgtcatgggcggacattccgaaagtgtaaacatcgaattcaaacaggattacgaccttgacgaacttcgtgacctgctcgcccattcagaaggtatcatcgtgcaggacgatcccgcccagaacctttacccgatggccatcacagccaacgagaaagacgaagtcttcgtgggccgcttacgccgggatttctcccaacccaacagcctcaacctgtgggtagtttccgataacctacgcaaaggtgccgccacaaacgccgtgcagatagcggaatacttgtacaaacacgatcttttgtaagaacccgtaagttcattattaaaaatgaaggtcagcaataattatttgccggccttcattttttttataaacactgtcacccgcaactacccgttccggatttaataacgtgttctgtgatcgtaaaatcattgtaaatttaaaacttgtaacatgaaatgtaagtttattatttttctaatcgcactaacctcttgtactcatactgcaagaagtcaaaacaacatcacgctctccgtagatgtggagaaaaccccggaaatgggttttgtcatttcctacttgaaagagtccatgattggtatggatttcgatgacaaaggacatgcagaatatcgtatcgaagatatggatgcgatttacttaaccctccataacggctttgccgagcagaagacgatttatgccgaaaaaggagatcacatccaattatcctttgacggagaaagcatgaagaaaacactaaaaatggagggagtgcgagaaaacattgccgattacttgaagaacgtgaaaatatcagggcccgcgaataaggacttcgctttagacataaaagactttgtgaaattgctgaaagaaaaagtaaagaagaatcaacaattgttagacagcctgacaccagccttgacaaaggaaagcagtaaattcatcaaactcgaaaaaaatcggattaaatacatgctaggcttgtcattactcgactatccccggatgcacccctatatggcaaagattgaatataccccgggagatgattattacaacgagcttaaagcttggttggaagaagacctaaattcattgtgcctatggcaatatcgcactctcatgaccgaagttcccacattcatcatgagtcgtaaaacgcctattcatactccctacgaaaaagccatgaaacaaatggagtacatcaacaataacaccaaagatgaacaagttaaacagaatttactcaccattattgccaacaattatatcaaggatgccggaattcagaaaagtacggaactggatgctttctaccggaaacacgtgacagacaaagaactacttgcccaataccagcagacgtatgatagttgggccgcagtttcccccggacaacctgctccggattttaaagccgttgatatttcagataaagaattctcccttaaagacttcaagggcaaatatgtttgcctctatttgtggccatgtgtcagtcccgcaatacaacaattttccgagttgaaaaaactacaacctctatttaaaaagaaaaacatcgttttggttaacttgtctattgacaataaaaaagacaactgggttcaaaccatacaaaacgaggaagcacaagtcgggactcatctttacgcgggattcgataaacattttttacagaaatgtcattacagtgctgccagcatggttcaatttattttcattgatcccgctggaaagatcatagaattacaagcccctctccagtcttccaacatggaagattttatcaaagagaccatccaagattagacttttgcggcccgtgcatggggccgcaacttttttatttcaataagtttttgtttatttgcaaaaacaattggaaatcacaccgtgtcaagtcaagagaaattcttaaaagggataaatcagaaagaatctgatgcatggaaagagctatatcgctatttctacgggactctatgcaattacacgaccaaaattgttgtagacgaaaccgtggcggaagacatcgttcaagaatgctttatctccatctggaattcttcgctccatttccaagagatgaaagccctctcggtttatctataccgttcggtacacaataacgctttaaaatatctccgggataagaatgtcgataatcaaagattacaaagatggagcaaagaacaagacgatgttgaagatgttgatttctaccaagccgtcgaagaagagcttatccgcaaattacacgtggtcattgatcaattaccggaacaacgtaaaaacatcttgctattgagtattgacggcttgaccgtgcaagagattgccgaccaactgaatatcagcatcaacacggtaaaaacgcaaaagaaaagagcctacgtgtttctcaaagaaaatttaaaacaaagtttacttctcatatacattctagaaatattaaagtaaaaaaattactctagctgtcacccgcatatagcactttcggatttatagataaaataacgcataaaaatcgaatccgatgaaatggaatgcattatcagataagaccgagtggctattaaaaaagatcacagaacacacggaagaacctatcgatgacaatatgctaaaacaacttgcagataaactgcaagagaagggttacgtatccaaaaaacttcgggaacaacaacgcttcaattacctaaaggcctaccagcaagttgttcaaccaagaaaaagatgggtgtcacccggcttattaaaaattgcagccgccattattatcctaatcggaacagggacattcctgtatttccagcaacttcccgaattgacacctaccccagatgaactctttcttaccgaagtacatccgggaacacgtaaagctttcttgattaaacatgatggtctggaaattgaattgaaaggagactccgtgaaaatcgacgaacaaaacgggattaacattcatatcgattccatggggctacggtatgataccgaacaggctcaacagcaaacggcaaccctctataacacgctggttgttccccggggaggagaatactcgttagtgttggcagacgggacaaaagtgtggctgaatgccgattctgaattaaggtacccgatccaattcacgggtaacacaagagaagtttccgtggtaggagaggctttttttgaagttacaaaacaagaaggcaaaccttttatcgtgaagacgtccctaggaaacatcacggttctcggtactcaatttaacgtgtgtaactatccgggaaaagagaaactcgtaaccacgttagtacaaggaaaagtatcttgtgatctaccgaatggtaagagcattgtccttgctcccgatcaacaattatcgatcaacgggagcggagaaagtaagttaagaacagtggacaccaagtacttcacctgctggaaagatggtatgttcttgtttgaggaaatgaggatggaagatattctggaacaattgtccagatggtacgatattcacattttctacacgaatgaagaggtaaaagatttgcatttttcgggagacctcagtcgtttcaaggatattataactttcatcgagatgttcgaaaaaagtgctgatgtaaaactaacattaaaagggaatactttaacagtaggtttataaaaaaacaaaccggaccaagcgccaactaaaatccggtttgatatggtttaatttatataactaaacgtctcaaaattatgaaaaaaaaaggaagaatcatgcaggttcttgcaagctttctgtttttatttgttttgcttacgtgtcatatgaacttaaaagcacaaggcaaagcagtaaacatgaactacaaagaagtttcttttgtcgaagcgatcaattcttttcggcaacaaaccggggtaaaatttctttacaacttggaaaaagtaaaagataaaagatgtaaagacctcgtactgaaaaatgtacctgtaaacaaagctattgaaaccgtactaaaacacttcggtttaacctattcgatggtggaaggggtggtcgtcgtgaaagagacggaagaaacatcccccacgacttcgacacacacgatcaccggcaaagtcgtcgatcaagccggcaacccgctccccggggtaacggtaattattaaaggaacaaaatcgggtgtcgcaacagacgtaaacggaaatttcacgatcacgttaaatgaacaaaaagaacaaactctcattttctcgttcgtgggtatgcaaacgaaagaggtctcctgcatggccgggaaaaccgtgacggtaatccttgagccagaggaggcccaactggatgaagtcgtggtgacaggttatcaaagcatcaatcgccgggacatggtaggttcttacacgacagtaaaagccgcagatattatgatgccggcatacaattctatcgaccaaatgttacaagggaagattccgggaatggttgtcgtcaattcctcttctcgtataggtagttcacctaaaatcacgatccgcggaacttccactattttcggaaacacggatccgctatgggtcgttgacggcatcatccagccagacccactccccattgatgccagctccgctgtaacggaagatatgaaaaacttgatcgggaaccagatatcatggttaaatcctgctgacattgaaacaatcactgttttaaaagacgcatccgcaacggctatttacggttcaaaagcttccaacggggtcatcgtgattaccacgaagaaagggagcgcagagagaacaagcattcgttattcaacgaatttatcatttagagcccgtcctaactacgggatgttcaacttcatgaactccaaagaacggattcaattcagtaaagaagcttatgacgccggaatcaggtaccagagcgatcctcttcctcaaatatatacctatgaagggttaatggccatgtacaataatcgtcaaatcagcgaagaaaatttcatgaaacagatggaatacttggaaacgtgtaacactgattggtttgacatcctgtgtcgaaattctgtcagtcattctcataacttaagtattaccggaggttcccagaaagtgacatacaatgcttcttttggctactcttcaagccacggaacgcaaaaaggtgatgacatgacacaatttaacgctcgattgaatgtcaacgcccaactactggaatctctttctgttaatttcaatctaagtaattcatttactgacaggaaaggatatggaccgggagttagtcctgaaacttacgcaaaacaaaccagccgggcaattccttttgttgatgaaaacggagatcgggtattttataaacaatactacgagtacaaactaaatagaaccgggcaacttgaatacggttacaacatcttgaacgagatggaaaacagttactctaaaaataaagcaaaaaacgtaaatatgtcacttaacgtgaattggaatattgttacctggcttcaataccaattcgtgggaagtattgctttcaacctgaataattcggaatcatttgcaggagagaaaacatcctacattgaactcaactatcgaggttacgcttatggctcagagtcatccggttccgccaaattcaaagcagcgttattaccattcggaggtgaactggccacaaacgagacaaacaatacctcgtacaatatgcaacacaaaatcgtgttctccaaaaccattcacgaattccaccggatcaacgcaatggccggaatggaaatccgttcagaagcaaacaaaaataacacaaacacggtttggggatacgttcccgaacgaggcgagatattagtctctccctccaagccgacaggaattgttcccgttggcggagtcgtccctatttcctggggtgcgctggataaactctaccaaggaggatgggcaaacacaagtattaccaataatttcgtgtcattttttgctacgttagcctattctttaaaagatcgctacgtattcaatgccaacataagatcagacgcatctaatagattcgggcaagatgtcaacaaccaatttgacccgacatattccttcggtatatcttggagaattgccgaggaggaatttataaaaaactacctgtcatggctcaaccaattgaatttacgtgcgacctacgggattcaaggaaatgttgtaaattccgtaagccctgatcttatcgcccagtaccggggaattatggaaggttatgacgaatattacttgagcatatccagtttgcccaatcccctgttaaaatgggaacgcacaaaaacttggaacttagggttagacatgcaattgtttaatggtatcaccatgagtttcgaatactatggaagacgttcaaatgccattatcaatcaggatattgcacaagaatacggtatagcaactatgaaattaaacggaggtcggattcataatcacggaattgaatactctataaatttaactccatacaaaagaaaagatttcgcatggaccatcggtatcaacgcatcgaaaaactggaataaagcccaaaacgatgacgtccggataaaagcagataaactgacaaaagataatttccttaacggtagtactgaccgtttattaaagaaaggatatccactaagtgccttctggtcatattcttttgccggacttgacccgcaaacaggttaccctaccttcaaccgcattgatttcgacgaaatcgaccccgatattgatcctaccacgtttttggtatattccggtcaaaaggacccttacttcacgggtggagttaacacacgtgtgcgctacaagagtctgtcattaggtgtcgatttttccgtgttactcggtgccaagaaacgccttccgaatccttatgcaaatttcaactacgggaaacttccggacccttaccataacctgtcgaaagacctgctaaaacggtggcaaaaacccggcgatgaaaaacacacgatttacccggctttatacacttccgtcgaagacgtatataacatacaacttcctgacggaacacaatccaattccatttactccatgtgggcaaattccgatgcaatggttgttaatgcctcttttttacgatgtaatcaaatttcagtatcgtggaatatgccaccccggatatgctctaaattcggagccaccaattgttcgattagtgcaaacctcaataacccattcgtcattggcagtaatcgtttcaatggattcgacccggagttaggagatagtgtcatgcccaagatcttttcttgtggtttaagtgtaggattttaaagataacattatgaaacaacgaattatatttctttgcattgtaagtctaattcttggaagttgtggagattttctcgaacccaaatccaagagtgaatttgttcccaaagacgccaactccttaagtgaacttttacttggagaagcttatcctcgtaacaatattacagaattaaatgtatttctccacctattggatgacgatatcgccccagctccttatcaagaagtgcaggtcggttcagatgcaaacagatggtatgctccttacacttggcaatccaacatgtatgacattatgggttctgccggagagaaatacacaaacctttatagctcttattatgccttgatattaggagcaaatgctattctggactatgttgatgatataaacgatgacaagaatgctatcaattcggtaaaagcccaagctttagcccttcgcggattcctttatttcaatttaatcaacatattcggaaccccttacaactacgataaaacagcgctaggtgttccattgaagttaaatagtggtattgaggaatccgaactgaagagaaacaccgtagaagaagtgtatgttcaaattataaaagatcttctagaagccgaacgcttatataagaccttaccgagcgatcaacaatggcaacccaacaaaagaaccagccttcccatggttcatctccttctttccagagcttatttatacatggaagaatgggaaaaagccgcaaccttcgcaaatcatgtcattacaaacgggaattttcatttattggatttgaacacaatcaaaacatactcagaagaagaccctagtatcccctcttacataaactatcactcttacacgacgtcgagcgaagttatttgggtatacggaaatattacagatgtaaccaaatatgtttacaacgcaagcgcctcaacaaatgaccatccgttttttagagcctcgaaagaactcatgaattgttttgacgaaacagaaaacgacctgcgtaaagaacgttacgtcattcgtagtaaatttcaaattatcaatgaagataacgagcttgaagcaatgccctcagctttcgggaaaataaacgtaagttctaaggcatattatcaaccggttgcaacgaatgatgcttttggtagaagtcttcgattgtcggaagcttacttgaatttctgtgaggcaaaagccatgctttacaaagccggagtagcgaatgccggacaagaagccctaaatacactaaatgaatttagaagattccggtttcctttaaattatcaaaacgagaatatcacggaccccgagaaattaattacatttatacataacgaacgacgtcgagaactctgctttgaggatcatcgctggtttgatttacgccgttggggaatgccacaaattcaacacacatggcacccagatgcgcaatcaacgctcgtttacacgctcaaagaacatgatcccggatacacgattccattacctcccgatgctttggaattgaataatttactagaacaaaacccattggcccccgcaccacgcaacggtattaacctttaattaaatagtatgccatgaaacagatcatattgttaatagctataagtagtatcttcatattaacctcctgttacaatgaaggtgatgttaccccttccggtaattattcggttttacgacttgaattccctcaaggaaacaattcgtgggataaagaaatcaaggacattcacgatgtctatggggtatacttactatataaagg

SEQ ID NO: 80 - DNA, 12823 bp, Butyricimonas faecihominis
atttatatacatatataaattacaataaagatagtatcaccttgtgaaccggatttgatcacgtttataaaccgaacttgaaaaataaaaaagtatggcatcattgaaagactctctactggacggcatatcgggaaagctggataaatacatcatttaccgggtgggtaacgaaacgtttatccggaaaaggccaaaaaaggtaagcaatcccaaaagtgagaaacaacagatgcaacgggcaaaacttccgggagcgcaaaccatgtacaaagctttggatggtagtctgttaaaagaaatctgcaatctagcagcccggtataacgagaaacgttcggggtatcactggttcctaggcaaaaacatgaacctgttcggggcaaacaattacatcgactactcccgtctggagttttcggacggtagccaacaattgcctttcggaaccacgatgaaacagacccaacccaatgccgcggaactgcattggacggataactccagctcgatcactgcacaatccaccgatcggttaatggtagccgtaatatttgacaacgagccttataccccagtattactggaagatattaatgccccacgaaaagacggttacgcacgagttactctaccggaaggcgaatggcaaaccgcacatctatactgtttcttcggacgggatgatttgaaaaacttctctcccggaattcattttcaagtgacgaaatcttaacacaaaagtattatggcaatttttgaatctactatattcgaaaacctatcgggaaccgtgggtaacgtgaccagctacaagctgaaagacaaacaagtggcaagagcgaaaattttctcccggaaagatgcgaagactcttcaacaattaaagcaaagaacccgcatgaaaaccatatcgctcttcaaacaccatctgaccccgatcttaccctccggattctgcacctcttcaagaaaggatgcatccaaccgttttttggctctaaacatggggaaagttgaagtcgatgacgagttaaacgtaacgattgacccgctacaactggccatttccgacggtcccttggctttaccggtaatcgaggcaaaaattgaccatgccgggcgccggatcatcttccggtggaaaaaacagccgttaatgccttacatgtataaaaacgactgcttatacggggcaatctatgaaacccagatgggacggagccggaaagtgatattgggaaccagagccgaggccggagaaacaacctgggagctgcctaaagattggaattcccatcatctggtaatttatggttttgcaaccaccgcagacggtcaaaagtcttcccctaccttgggtgtattgaaaagtgaagagttgtaacgatataaccttcctgtaagacccgctttataaaattaatcttttttaaagacataaggataaccctgcccgattttgtgacgtatacgccatagaatttgaatattctattagtcattctttcaaggactagcagaagatggtgagaggatatgtcaattcgtaaactaaactaatcagaataaaataaaaaagagacgctatgaaaaaaattatttttttattggcaatgactacattcctgttcagtgactttgcaatgcaagcacaaacaaaaaaagaactacgggctaaaagaaaggcgcacagggaatgcatgaggatgcacaacagaatggttcgcgagcaacaaaacatgatcgcctaccaagacgcggttaaagcacttaaaagtaacagttgggtattacaggccaacacgttgtttaacaatttcggggcagccattcccgtaacgaacaacttgaacttcgtggccatggacaacaatcaagtttcattgcaattggcattcaacgggtttaatcccggaccgaacggtttaggcgggatcacgctcaccggctggccttccagcattaacgaaagagttgacaaaaacggaaatatcacttacacgttcaacgtgatgggcgccgctttattcgctcaagttaccgttcgcctcggctacgggagtaattactcgacagtaaccgtaagctcaaacacaaatggaagagaattgacattctccgggaacttggttccttacagccagtcaaacattttccagagtggattcagtttttaagcaagcaattaaaaaaactctcgtttaatattcaattactcagtcacattcgtgtgaaaaaggggttccatggggaaccctttttcattatagaaaaaacaaactttataaacaaaccgggcaaaagctttttttcattttaaccgggtcaatacatttcgtattttatcgcctgacgagggacgatccgccttgtattgcatcaaagttccgtctttactgtaaagcaggaaatgaggtattcccttgatgttcatcatcgtggcgaattgatctccggtcacgatatattgatgaccgtgcatgttcaattgtttcatctttttcttccatgcctctttattcgtatcgagcgagatgctgataaattccaccgccggattctttaattgtttttccagtttctgcaagtagggaacttcctgacaacacgggccgcaccacgaggcccataagtcgacgtaaagatattttcctcgaaaatccgttagcctgtgaattttaccatccacgtcttccaacgtcacgtcgggcaaagcggctccttccatggaatattttttggattcgaaatctttcaccagtttccccccttcttcccctagatcggcggtcatgtttttcaaacgctgtaaaccttcttcgaaaccatttttataattataatctgtcacgaagctctgtaagaccagacgactcacggattccacgatagacttaaccgtaaagcgctctttcaatagttgaatctgttcttcgggggtctcccgttctttcttcaggtaattgaacacgaaggtattcgtgttataaaaacgcaaagccatcggatcatccaacacctcgtaaaccgggggaatcagttctctcataccatcaggtaatgcctcgccattccgggaatacatatacgtcacgccatccaaagcctgtgcaaaagataaataagcctgtattcgcagatagctctccaccatattggcgggccggagttcttctgtcacgtcattcacacgagtatggatttcactcatgctattttttaattcactcgccacgggcggattctcccatatcgaccgacttttatccaagtaaaaacgattataggtgatcaacgccgtgttgttccgatcctttttatccgcggtcatttcagcccgccgattcttgaattgaatgtcaagcttgacttttgttcccggttcaatatacaatgcctgttcgaacggccacttgttttgtccggttcccacgattcccattaaggtcacaatccggggagtatcgcaatttaacaggagcgagaaaaaccttgtttgagcgtcaacagtcaaagaatctctcttgcccccgtcaacaataaataattgatactccgaatattctcccggattcaccgttccggtaatctccgctgggcctttctgcctgcaaccgatggttgcaagcagaagaaaaatactgattacatatttcattttaccttatacattatttttatcggcttgtaggccacgttcttgtaagaattgatcagacgaccggttctcgtgtcgtagatatagatatacccgttttctccggattcatccgagcgataagctcccacgtacacttgggattcatccggactgatcgccattgtcgtgatctctgcattcgaaatatcatcaatcgtggcccacgattcagtcgggaacgaagtggacgaatagtaccaacgataaatcttgttaccttgtgcgtagaacaagcactggtaagaaggactggccactttcggatcctcttttttaagtaccgggttagctatcacccgttgcacatcacgataatcgacactagctttctggtaattatcatcaagtttataaatcgtgttactcaaagacgttttccatatctccccgttcaactcggtcaacacagtaaaggatgaacccttctcattttcaaaaatggcaattacatcatgatctccattccaaatcggaccaaaatattggcaatactcggcggtataaccattgtaataacaaatcgtatgctggtttacatcccacaggtaataatagggttgataccccccgaagtaactgtgttgaacagaggaataagttgaagtcaaaatggtatgagtaagaatcaaaccttccatactggccagattataaaccttgccgttctcagatatggcaacagccgtacgagcttcgttgtctggtaacatcataaccacgggaaggaaatctgaaaactcgggagccttcacgatattctccaattcaaacgttttagcattgaccacgtaaaccgaaggatcatttttatagctgataaacaactgagataatctttttgccatatccgtgggggatttcgggaatacctctccgggattattcattgtcaaacaatgagtttcaaaatttcccatggttccgtcagccatctgacgcatgaaagaaagcatacccgtcccgtcgccgctttcactcaacaccgtaattccttcttcataaggagaattaatatgcaacttgaactcgtagaacgcactactatgctcgttactcactttcacccgcatcgggaaggttcccaaatcctgacagtccacgtacaggacggacgaatccgaataaaacttgtaatccatgtcccactggaacgtcaacggaaggtctttttccttctgggtcacataaggagtgatatcaatcaccagagtttgatttttgtccctgttatactctttctgtaaactattggtatcaatggcgatctcggagatccgaaccgtgtcaacagtcgtgtcatcatcaaaacaaccgattgccaataagcctattagccatatatatagatatttccacttcataataatctgtttttactacatgaataattcatttcatcaatacggtttcggaatatcattcttcccgctttgcaataattccgggttcgcggcaaagaagtcatacatcgggatcagaatgtacttggtcgcggcgtaattatactcgtccatccacccgtattgtacattttccagattcggcccgtacatatccaccatccccttgtaggtagccggagctgtctgttccatcgcccggaaatattccatgaatttaacccatttcacggggtcccatacccccaacttataattcggccacacgactttgccagaccaatctttccattgcggaggttctacgatattgttgaaagaagcaatagacacggtcccgacctctgcctccggttcaaaatcatccgttgacagcaaacggaaagccacctgccaatacccgtcacttcccagatgttcacgcaataccgttaccggtaacacgccattcacggaatccggttcgataattaattcggtcggcaacgtgtaatgtactcccgcctctgccgtagtcttggcagccacggcttccaccttgaaagaacgcacctctttaaccggagcccccatgatcttcacggggagtttcatctcgtaggaagtaacttccagtttcgtcaccccgaaagaatacaccacactgtcttccgtgaagtaaattcccgtacgggaagaatcgaacaacttgtaatcctgttcattgcaggagatcaatcccatgccgaatagcacgaacaggcaaccggtgaatatatatgttatgtttctcatatgttttctatttaccatttcatcttctaaattcgaactcttgtgacgggatgtccaccacgtagattttcttgtcggctgttacggtctgcccctcgacattaagaatatccagattcaatcgtttcatgtggtagaaggattgtccttccccgacaaattctttataccgatcatccgtgatcttgtcaacggtcaaagtttcagccggaagtctatcgtctaaagcaactaatccccgactttccaacaactcgttaaaataatcaagagcttgatcgtaattacccaacttcaaggcactttcggccgcgatataatacatttcgggtaagcgtatcatgttgattccgcggatctcacctgccggacggttatattccgtgttattcagcacgtaagtatctgtcagtttatccagtttccagtattttatcgtgttgttatacgtgtaccatgcaccccagcggtaatcattcccggccccattaatctggtataattgttgaatattataacgcatttcgaaagaatacgcggtctgggaattgtgcagtatcttgatcaccggttcggcaaaattcttggaataaattccgaataccgtttccttggatgacaattttcccgccagatctccggcaatatccgtgtaatccaacagggaaagaccgggagcttgtatcacttgctgcgcgtaatacaaggcactatcgagtgttccttccgtcaagtaaacccttgccaaagtcgcttgcaccgcctgtaagttaaaatggatattctggtctttcaggaaattagcgttcgaagaggctgaggcatacagttcctcgtcatccaataattgctctgccgatctcaaatcagaaataatccgcttgtacacgtctttagatttcagaatgtctggggcaaacaaggagaaccgggttgaataaggaatcccgtcagcactttcgttcaccgtgatttgctcgctgaaaatacgcaacagatcaaaatgcataaaggcgcgcagacctaaggcttctcctttatagatattgtaaaattgcatatccgcaggagagaatttttccaagtgttccaacacgttattcgcataggcgatattggaatacatatcacaccagatattataaaaaagatcttccgctttcgtattcgtatagtcatattttataagtggctcaacctcttcgttatttgtagaggtataatattgagccatcagatccaaagcggaataactcagattctgcccgtacaagttcgttgaccccatcttggcatagaccccgtaaagggcattctcaaatccctttgcatctttcagtaaatcaccttccagtacctcacctttaggttgcacgtccaaaaagctgtcacaggaacttcccccaaggattaaggctaaaagtaccattatatttttaaatcctatcttcataatctttccttttaaaatgttgtactaagcgtgaattcaaacccgttactatatagataagtggtccctcgttctattttcacgtttgaccaacgcacgatgtccgtcaagttcactcctacacgtaaattccgtaccccaattttggaacagatgttcggtctgaattcgtaaccgaaattcacggttcccaacgtgaacacattttctttttccacgaaacggtctgtatgtttcgggttcgccccccatccttcagaatcagcgatatccttgtagaaagctatatcacccggatttttccaacgactgctgaaaactcgtttatctgcattctttttcgggtctgcaccctccactttcgtggcacgagtcgtgttatacaagtaagcgccacattcataacgacctaacagatacaagctgaatcccttgtaaaacaagttcgttgaaacggttccccggaatttcggttctgtatccccgatcacgaatttatcatccgcggagtattcgaaggttctctccccgttcaatttaataaacacttcctgtcctgttgccggatcaattcccgcggatttaaccactttcaatgccgaggtggattcaccttcctcgtattgtgccagcggagttttcgaatctaccttattggcatcttcattcgctttcttcaaggcactgtttattttcaagatccggttccggttcatacttccggtagccgcaacctgccagtagaaatcatttctctgcacgagcataccatctacctgaaattccagtcccttgttttccatctccccgatattttctttggcagaagtcgttccggtggacggcgcacgagaggcatccaataccaagtcggttgtctttttcaagtaaacgtcaaacgtgaaattcaatcgacgatcaaaaagactgatgtctgttcccacgttataggaaagttcccgttcccaacctaaatctttattaccgattccttgcgggatagccccgattccgttcaaatattccagatcaccggaaaattgatacatggtcatcgcttggaaaggagagaaattcaccttacccgtgtatcccaagctaccccggattttcaaaatatcaatcttatttgaagtaatgaaactttcgttatgtatgttccatcctagcccggcagaccagaaactaccgtaacggttgtttgccccgaattttgacgatccggtcacccgatataccacgtcagcataataacgattgttatacatatagtttccattcacgaaaaatcccaattccgtgctgacggcctgtgttcccgtcggtttttgatccgaataaccagcggcctgccccatgaaattcaacgcatcatcataaaagcccactcctgtcatggtggaggactcgctggtttccttccggatttccacacccgcattcacactatacaaactgttattatcggtcatcaggttgaatgcccctgtcaaggttccggcgtatgacacaccactaccatttttctgggtcaaagaaccttttttagaaagttcagtctcatttttaaaatcttgagaatcgggagatctaaatacctcgttattagaatttgttaccgtgatattaaagtttcccgacaaacggaacaatttgttgatttcccaacgaaaatccgtggtattcgagatggatttatcctttgaaatatcataattacccaagctagcctcgtacaaaggattgtccaagtcccaagaaagatttttattatattccccgtactggtcataaatccgatcataaggattcatttccacgtatttagaaaaagcaccgtaaggtgattgcttgtaattcacctcgctataagtggtacgattcgccatcgtcaacttgttctgcacgtgatattccaatttgaaccccaagttataacgacgacggtagtcctctttcataactccctgcacgttattgaaacgtccggacagttcataacgaatattggaggctccaccatacaaacgcaaagagtgatcgtgagaaaaagccgttctggcaggttgtgacaaccaatcggtatctactccccgctgcacttcttgataacgctcgttatataatttatctaacgcatattgctctccttcattcgtgatatttccccaagcatctttttttacttccgacgtgtacaaacctgccaaacgctcgtattccaatttctgggccgcattcagcatatcataatctttcagataagggaattgcacgttacccgtaaaattataagctacccgcatactgccttccgtcagtttctttctttccaccacaataactccactggcagcacgagacccgtaaagagccgttgccgatgcatcttttaacaccgtgatattttcgatctcgttaatatccaaatcgtacaattcctgcatactgatttcaaccccatccagcacgatcgtcggttgattcacttgggtcgtcccgtcagagaaagaactcataccgcgtaataataattccggaacgtgattcgggttagaccccaactcacttctttctaccagattcaaaccgggcgttaaggctgccaatgcggcaaccacgttcgtaccggagatggttttcaactgctcggcagtcacgctcttcacggctcccgtgtaactggactttgatttcgtgaaataaccggtcacaacaacctcatccacctcgctcacttcttcttccatacgtatggtcatttccttatccaattctaccggaacaatggccgttttataccctacaaaagtaaacgtcaagtcacgtatatctgccggaaccacgatctcgaacttaccactcccgtcggaagccgctcccgtcactagaatctccccacgtttggccacaacggtcacgcccggaagaggttccccgtgggcatccaccacaactccttttattttattcgtttttaccacactgtcccgcacggcaaccggacgggcgggacggatgatcacgtaattctgttccaagtcgaaatccatgttcgtcccctccaacactttacgaaataattcattcaaagtatatttacgaacatcaagagttattttacgattcacatccaattcgttattgctgaacatgatcaacaagcccgtctgtgattcaacctgttcaaatacagtttccaaagtctggtgctgtttttcgatcttcacgctttgtgccacacccgttgctgatagctgaaacacaaaaccgatcataagtagtaatgttaatctcatgatacataaactttttttacatggtattttcccgtaacgataccaagtgtttctcttttttttcatacttttgtatttgaaattagtactctcatgctcttgaaaaaagcatgaatcttatttaaacaaagcggggagtatggccgtacttcctgctttttatttttcttgtattattatatccttctgatttataataaatttcacatttgtcgtccgttctatcagacgaataaattcattaaagtccacatctttccgaatggctccggtgaaacggtagtttttacaatcttcattcgagaaaacaaaatgcacatcataccaacgttccaacttcaccgtcaataagtccaacggcatattatggaaacggaacattccgtcaatccatgaggtatatagtttcacgtttacaggtttcacttcaatctcttcatttgtcgtgtctaattcgaactgctctcccggatgcaaaaggtatgtctcgtcgtgatgtttcacttccacgccaccttgttccagagttacctgttcaagagaatcttcttcataactgcaaacattgaaagaggttcccaatactttcacgctggagcgacaagtacgcacgataaaaggccattctttacttttagtaacatcgaaataagcctctcctttcaattcaaccacccgttctcctttttcaaagttcatcgggaatgtcaattcactccccgagttaatccacactttcgttccatcactcaagaccacccggtattctcccccttccggaactctcacggtactcctttgcccgctgttacccccttgaattaccaacgtattcaaagagtccttacctatcgtggctcccccgctgttcgtgatatcacgtcccagattttcgcttaactcatacttctctccaccttctaaaacccagacggctttcaaacttcccggggttatttgcgctaacttctccggctcggtctctacgggtgactgcatcaacaggatccctccagtagtcagcataattgcaaccgcagctgccacgctccaacgaattgccagatgacgttttttccaacccggtcgggaagaaagtttttgttccacattttgccaagcatctttcatctgaatggccttaaatactcgatccgcctgtaccacggaaccacactctaccaactggcgaaattcttcctgcaattccacgttctccaaaagccactgattcaaaaatccccgctctcctgcagtcaatccctctttacgagatttcaaagccaattgtactatattttctggtaacatgatgatttattctccattggttctatacttatgacaggagaaaagaaaaaatagatgacaagaattcgaagaaaaaatcaaaaaaattacacgaagagtaacaatatcgaatatgttttttcgcttaactcggctcgtaaagccgctaatgctcttgccaaaagagtttttaccgtggtcacggaaatttcaaattcttctgcgacttctttatgccgtttcccgtccagcacgattcttttaaaaacttcccgcgtccgatcgggtaaacgatctaccgctttatataattgatcaatacgggtattccattccgactcatctaaatattcattctcggccatatctatactcgagttgatgggttccgtaagaaccacttttttcccttccaacaaattcaaacaatagttacgcacggattgatacaaataaggacgcagactattttttatagcgtgaaaacgctttccctcccaaaacttaataaaaacctcttgtacggcatcctctgcctcctcttgttgcacaagaaaattcatggcataaaataccaatggtttataaaaatggtggaacaatagttctaaccctcgtcgatctccttttttcaagagttgcaatattttatcaaactcgtccatccattacacccctaacttcatttatgtaaactttatttttaataacataacccctcaacaaacgatcaattaatgatgttcagaggattgcctatctattcgttacgaaaattttcaaacgtattaataattagccattaaaaaaaatagtatctttttacaagtgtcaaaaaataatgtaaatttgtatttcaataattgatcgtttatttatatttcacaccacttgactactacat

SEQ ID NO: 81 - DNA, 12772 bp, Butyricimonas faecihominis
gtataatcatgggtgaaccatttgcttcttttatgtcattattcgggtcgtcgtcagcaagtgatgcttcaatagccttttttaattgtaagcaaagctctcttttttcccaaggttctttattttctaaggaaacttcaccggtaacgagtataaaggcatcgtatttttctttagaatatatgcctagatattctgtttcaatgacttcatcccaccataaaggacaactgataatgttgttatatcttagttgagcttgttgtttgtcgtgataacctgcgataaagttcgagttcccttcaatttgaatttttaggagataagatttttcttctaatttttctttatgtagggtaatccataaagtgtcacttgttctttctttacgaaaaattggggaggtgggaagttcgtaatccccagtaatagcggttgtcaacgaatcaactacggagaccttatattcaaggtcttccgaaggagtcggaccaataagagagagaacaaaaggaacttttactgtattttgtcccggatagtggctaaaggaaatattcaccgtatcctgtccgttttcatttgggaaaaatagttgcctttgagaagaaaatctttcgacatcttcttttgaacaagagatcgttgcaataatgaggcataatataatgatatattttttcatgttcttggatttttaaagaatagtttcactatctggtaagggaagtgtaaaatcactttctttcattgaagagtaaattggttgattaaatttcttaaaatagaaaaatacctgtccttctccaataaattcacgttgggcttcttttatcaactccttacggaaagatttttcgtctttaataatatcatctagacggcctttagtgcattcgcgtccatcccggacaatatccatttctttaatagcattagagaaatcatttatgctggcataatattcggcccgaatatagtacatttcacttaggcgaaccatgggtatgagttttgcgcaaatgtgactagtgatactgttaatagatgaaggcaaatattttgtagaaaaatatttggtcccacttttggttaatagtttagtatttcgataatcagcattgtcgtcaaacgttattgtataatgatcgacatatagcttcccggtggcattgtattctgccgtgtaattatctgctagcttttcattggaaagtccgaataacagatcaaggaatgttttgggattttcttcaacatcggcatttggcgtgaatgaaaataatcgttgtttggtgttgtctactgctgttatgatctcttcggtaatgttgaatgcttcttcatatttcccgatgaatgcataggctctagctaacaccccgtttattgcataataatttatacgaaaacctcgatatgcttcgaataaatccgttacgttatgttcgatattcccgtctatcgttcccatggtaaatctatttttactatttaggcgatctctacgttcactaactgtgtcagtgggagcgactaatgttttcgctttttctaaatctcgaattaccttttccatgaattcactaatagatagatttggttcgtacgtggatgggtatttctcgaaataggggatgtaagttgtgttggactcttcttttgctggagcaaataatcgcaacatatcaaaatgaagaagagcccttaatgctaaggcttcgccttcaattgtgtttttctccatttctcctcctgaaaattttgagggatcttcactgccgattctacttaataagttgttactgttagcaatggcattatatgttttggaccacatcccgtcaatgagagttttagcattttcatcctcatatttgtaattactcatactctcgtatgaatccggtagataataagcatagtaaacttggcccaagacatcaagagttccccaagtcatttcttttccgtacatggcgtttgatgccatatttttatatattccatgcaaggcattccggtagcctgcgcctgttgcgaataattgatcttcatccaaactgtcttttggggtgacagttaaccaatcgttacacccggttagggagaacaagatagagattcctataattaatttcgtaatattcatgatagataataatttaaaaacttgctcttaatgagaaattgatcgttcgggcaaagggataacttaatcctcgttcttcttttacacttgaccagcgagcgatgtcttcagctccaatttcgaatcgcactacacttaatccggtacgtttaagccattctttggaaaagtcataaccgagactgattgagtttaaagataccatattgtaatcttgtacgaaacgggatgtcggtcttgtagatgcgggacgtccgtctcttccgctttccaattttttatatttagcaatgtctcctggcttttgccatctggaagtatatactcgtttatccacgttttccgaataaatatcagcgttttctactcggtcgaccagtgtactattataacgctggcctccaaattcgtacatgaagttggcaaaaagagaaaaattcttataacttaaatttaacccaaatgatccttgtgcatcgggttctgtagtacctaaaacaacttgattagaagattgccatgtatctgagctagaaccatccgggttgaggaaaacttcttctccggttgcaggatttattcctaatgaacgaactccccatattgatcgcatggatacaccttccacatattttgtgaatggtttattcgttgttccattatatcgattactaatatcagaaaaatgttcatcaacttttttgttgtatgctttcagactttcggctattttcaataaggtatttttgttgtgtgataagtttgcatagattgccatgtgtacatctttttgacggatgatttcacctctagcttcgatctcgaatcctcggttacgaacctctccgatgttgtctttataggtggtaaaacccgtagaactgggaatggtgacactgttgatacaatctacggtttttttgttatagtaactgactttggcatataacaggcggtctaaaatgctaacttcaataccgacatccaatacattcgttgtttcccatttcaagtctttattaccaaaagcacttagggcagctcctgctcccgtttgataccaactttcgtcatccaaggtgtacatcgtttttgcttcgtaatctgagaaatttacgttaccagtttgtccgtagctacctctgatttttaattctgagatgtaagcataattttccatgaaggggtaattgtgaatgttaatacctattcctgttgaccagaatggggcatattttttatcagcaccaaatttggatgaaccatcaatacgtcctgttaggtcaaataggtagatattctgatagctatagttgattgttccgaaagctgaaaataatcgggaactaccttcgtttgtagaaggtttttgataaatttcttgggcataattaggtgagtgtaaggcaccagaaggaaatcctctgtattgagtagatgaattattagatgaggtttctttgatatttgtacccatcgtaacattaatattatgtttggaaatactacggttgtaagaaatgaaagcgttcatatcccaactaaaataatcgctactacgttgtgttaactctccagaagttagttgtgttaaactaagtggctttgaatttctttttgaaagaggatcgagaaatttttctccttttgtaaaggttcgggtaataccaatagttgctttcgcttgtagatggggagtaatgtaccaattggcgtttaggttgttaataatttcttccgttttacttttatcgaaattaaaaagggtagattcgtataaaggattttcccggtccctatcagccgtatttttgtagttttttaaagttggtgtatattctccattttcatctttgtaggagtcatagggttgggcccgagaatatttagaaaaatctccataaggtgattcttcggatttggtaatggtgtaacttacttgattccgaatttgtagagagccaatacgataatctagataaagtgctgctccggtattatctcggaaagaacctttcataactcctttattcgtgttgtatgataagtctattccaaagcgaatgttttcagaaccaccttcaacaaacaagctgtgtttgtgattaaacactgtttccagaggtttggataaccaataggtatcaactccggatttgatattagccagtttgtcataatattcttcttctccttcaaaagttgtatccccatttttgtctttatagcatccggcaagttcttccaaatcaagtttttcttgtgcatttaatagattgtaatctgataaatcagggaaaacgacggagccggtcatattgtatgaaacatttatttttccgggtttgggtgtgacggttgtaatgacaacaactccattggcggcacgagaaccgtagagtgctgttgcggcagcatcttttaagatggtaatactttcaattcgattcgggtcaaaatcgtataacttttgtacattgatttcaaaaccgtccatgataaaggttggaagattcggattgttctccaaattaccacgggttgtatagttgggatccagttgtttgatacctgttcctgaagctcctcggatagacatttcaggaagggtgttcggatcggatccccattcattgttttcttggatacgaaatgacggatcaaatgcttgtaaagcttttattacgttagttttagacactttcaataattcatctcgttttactgctattgtgtttccggtaaagctctctttatttacattggcgtaacccgtaatgacaacttcgtccatttcggtcacgtctggttttaaacgaataacaatttctttatcgtcatctttgggagcttgtttcacatggatctcttgagtttgcattccgacaaatgatacgactagaatgatagaatcttgatcggctatttcaatcttgaatttcccatccatgtcagtaacaacacctagactggtgccttttagcaggatggtggctccaggtaaggtttctcctttggaatcacttacagcaccttttatggttcgttttttttgtaaggtagattctttagctttgacgggacgaatgataataacgtcattttctatttcatacgttaattgggtatttgagagaatcgattgtaaaaattcttcgatggttacatctttgacattgatattacgtttcccaaatttatttacttcctctacacggtagagaaatcgatagttggtttctgtacgaaccttttttattaattcgtcaattgtagcttcttgcatttttacggtaattcttgcattttgtgcgaatgcctttgtttgagataccatggtaaatgtgaccatgaaaaagaaacttaatgtaaagagataaaacatttttcttagcctttgatgtgattcaaaggtgagttttcgttttttttccataactttgattcttgataattttaataatcgattttaataggactgtttataaattgattatgctgggggaattccccaattcccccaattttaatttttaatttgataaatttcttcaactgttacattattctcgttaataataaagtgtatagatgttgctttttcaagcatttggagagtttgtttgaaatcactatagcgttcgagatctcctgtaaaatggaaatctttaactgcaggatttgaataaaatacattaatgttgtaccaacgagccagtgttgtcatgatgtcttcaagtggctggttttcgaaaacaaataagccatctttccatgcagagtaaagagaagcatccacgtttcgggtatttatttgtttgtttgttttcgtgtatacggcctgctgattgggttttaattccacactttgctgtttgcttgatatttttacggcaccttgatttagcgttgtttctatcgtccttgcttctgggtaagctcgtacgttaaattgtgtaccgagaacttttatttctatttcatccttggtcttgacgataaatggttgtttcattttttttgcaactgcaaaatatgcttctcctgaaagtataacttctcggttctctttgttaaaatgcacggggaatgagagctctgaatctgaatttatccaaacatgagtactatcgggtaaaattagttcgtattctcctccgcgagggacttgaatcgtattgaatttgtttatgtttagaggctgattatcacttcccgaatattcgaatgtattgccttgattgatcgctattaggccattttctaattttagtgtttgtatggtgtcttgtggagttagatggatttgttttccttcaggggtaataaatattgctttcggactaccggagtgaatacctgcaataattttcgacacttggtctgattttggggcattgaataaaacaagagagactccgatgataattaaaatacttgcaacaattccggatatccatgttagagaatgctttatgtgactgtatttgggaattatttgttgttgcacatgtttccatgatttttctaagtttaattctttgacgaattgatctctttgacttctgttttgagggtcaaggatttgtttgtaaagttcttgtgtcgagtgattttcatttcgccatatctctaactcttctcgttcttcaagagatagagtgccagttatctcttttgcaagaagttgtgcgattctatattctttatcgtatatttgcataattagtatattgtcatctttatctgtagaacacgtaatcatgcgaaaaggatgaatggatcttccttttttttgtaaaaattgagtattttatcagaatgaattcttcgtacgccattttttcggatacaagtatatttaaaataatagtattggcgttgaaaattaatcctttttcgaaagaattaggaatgaaatgtcttttgagggaattctggatattaatgagaaaggaggagcgtgaatgaactcctacagaagtttttgttcaacttctagggatagttcgttcacgcttctttttaggaagttattttcctctacgtttccaccatagtccaagactaagaatgatgatagaacaaggtaataatcctataaatagtaatttgatccatagagatgcgttttccgtaagataaatttgatcatcagacgggcgtggacgtctagtatcaacagggaactctccgtttgaaagcagacgaaaggattcagttatcattgtaaaattgacagaagggattccttctctagtacgggataattctgaattgctgaaacaatcggaatctccggtaacgatgattcgttgagtttttccgttgatctcccgagataaatataatgcgatgggaatggatttttcaacttccccgatagtaggattgagagttgctgttgtctcgataaaattagtggtttcaagttcattccatgaacccgtggaatctgtttcaatgagaggaataatctcaaatcctttgttcgaaatttgttcaataccgattgcaccaggcattgaaactttacttccattatattttaaataacgaagtttaggagtaaggtttattgcttgtgtggcaatgtttcctaaaataagatcttggggataatctttgttttgttgaacgagaatgcctggcatgaaacgtaagccgagttgttcaagtattggattcatattgttttgacgtcggctttcgccggcgatgattaaattaccaccgatactaatatagtttgaaattgccgttaattctgagggtgaaagagatttttttatatcagaaataacgagaatgtcgatctctttaggaatactttgtatattttcaagagataaagtggaaatattgaatccttgattgagtagagaatagcgaaatgttttattttctgcaaaagcggcatattcttgttccccggcactataaatgttacgttctccgtggccagagagaaatgcgacatgaggagagggaacaaccattcgctttagagatgccgtgatttctgtttcaccgggaaaaatgacattatccccgaaaagacgtaaaaatgatttttgaccgtttcctctttcgaaaattctaacaaagcgataatcttctcctgaaagatcaacttgttgattgatttgctcgggagttaggactttagaaaaattaatgttggagatgtcactgattctacgagctcgttcttcatcatttaggttgggatagcgtgtatctagaagtggaaaataagttttgtgatagtaatagacatatttcatctcgatttccggtttaaagcgaatatatctttcgaaacgatcgatatcttcgttatagcttttgggaagaccgtaatagtagtgctcggaaagtaaatttacatatgtggttaatgttaatggaccgtcaagttttttcatgacgtcaatactgctttgagttaaggtattgtcttttgtctcggtcgcatcgtaataacacattagctgggggcgagagctggcatacccgattcctagtgccaagataataacacagccataatgtgcgatattttgaataaggttttttttcgtccgttcagcttgtaatttgatgattgatagagaaataaataaaactatgacaagtataaagtagagaacatcttcgctacaaattagcccttccaggaatgtatcggaacgtccggacatggataaccagtatgtgatgtccctgataaatgggatttcttgacctacattattgataaagtttaatacagacaataatgcaagagtcccgactgcagccacaacttgataggaagttaaggtggacatgaaaagtccgatagctgcataagcggaaagaagtaggaaaattccgagtactcctgctaaagcatagggaatatccatgtttttaattgtaaatagggaaaatagaatgtaaatgaataggaatgcaataaggacaaggatatacacgataattgcgagatatttcccaaaaatgatttgtttattggtgatgggagatgaataaagtaatttaatagagcctcggttatattcttgactcataagccccatcgtaagtaacgggatgtagagatagagttgtcgttgcatactagagataactccgtcccaaccgaataaaagcgaacgagtaactccgtaaaggctgtaatcaagtgcctgttggcgaagctgatcaagatatgcgtcactaaatgccatgccggcttgaaatgcaaaaatgattaaaacaagccatgcgattggagagtagaacaaggtgtaaagctcgttcttcatgatttttatgatggttttcatataataaaaattcattttaatgttttgattttcccagataattgggcaaaaatattgtcaagggactgtctttctaatgtaatctcttttaatccccaattattggaaacacttaattgcacgattttttctgaaatattattagaggcgttgaaatgaactcggtagtgataatcgtctattttttctactgcggatacatcttcaatggtttgtagcatagacatggatggtggggtatccatggtaagaataacactgcttggagccacgtagttattaaaatcatctatcgtaccagcaaaaaccagtttcccgtgttcaatcatttgaatgttgttgcaagtagcctgcacttcgggaaggatatgcgtggataaaagtacggcatgatctgcagcaatttcttttattaaatatcgaatctctacaatttgatttggatctaatccatttgttggttcgtcaagaataacgaattttgggttatgaacaattgcttgtgcgattccgacacgttgttgatacccaccggagagattactgattactctatgacggaaatgggatatgtcgcaacgtttcattgctcgttctacggcgatggatacctctttttgaggcatctggcgtaaaaaagcgcaataggttagatattcttcaacagtgatgtctggataaagcggggctttttgtggtagaaagccaatatggcgtttggcttcaaccggattggttcgaagattatatccattaaggtaaacctctccggctgtttgattcagaacaccacatataatgttcatcgtggttgattttcctgcgccatttgaaccaagaaggcctaaaacacctttttctttaatttcgaagttgatatcttgtattgcccattgaacattatagcgatgcgaaagatgttcgacttttacgatagaattttccatgttttttcaaattgttcttgttgaaattattggttagacagggtaagattaatgtttcttccttttactccatatcatcaagcctgtaaaaagtaatatgcatgggataatgcccatggcggttgtttttatccatggagaagctttgcgggaaatattaatagaattgtctgtaggttcgggacggaaagtttcaatgggaaattctccgtacgaaagccatttaaatgactctgtaatgaaatcgaaattagctgatccaataccgttacgtttggttgacaactctccattgctgatacaatcggcatctcctgtaacgatgatacgttgttctttttctccaaccttcttggtcaaggcaagtacgacaggataagattgttctttttctcctatttgagtatttacagaaaattctccatccacgaaatctgtggtttctaattcgttccagcttttttgcgaagtagatactacaagtggcgatattttatatcctttattgtccatcagttttattccggttgcggtaggcatgataagcttgaagtcccaaccccgaattcgattatagcgtaaggattgtagagcagcttcttctgttaaagttgctgtgattaacgagggagaaaatccttcgcttaattgtacgagtgttccgggcattaattctacgcccaaatgggagagaagtggattcatcgtttcgagacgtcctggttcgcctagaatgaataaattgcctccgtgttggatgtaatttttaattttctcattttcttctgcatttagagcagtgcgcatatccgaaatgacaatgatatctatgtctgcgggaatttccgtatccttgattgataaatcaattacatcaaatccttgattgataagtgaatgcctaaaaaaaatacttttggcaaaattgtaataataacggtctcccgtgctatgaagactacgttccccgtgtccgattaagaatcctactttgggtgattttacaagaaaacgttttaatgctgttgtgatttccgtttcggatggatgtttggggatgtcattgaataaccgtagaaaagttttttgcccgttttctctttcgataactcgaatgaagcgattaccttccggtttgaggtctatgattttttgaatttgttctggagaaaggaacatattaaaatcgacgttcaaagttttgcaaattttctccgcacgttctttgccttccaattccgggaaatttcctgcataagaaggttcggaaggtgtatcgtaataatacacgtatttcattttgatttccggtttaaagcgcatatattgttcaaagcgttcaaagtcgtgttttagctgactaggtagggctactccataatttttatctaaaatattcatatacgtggttatcgtgagtcctccttttaattgttttacgatttcttgacttccaggagtcaatgtgtttgctttagtttcggtggcatcataatacagtttgaatgtgggtaaggtgctaaaacatcctaataatagtgcaatacatattgtgcaagagtaacgagaatagctagctaaacgagtccgcttttttcgtgttgattgtaaacgagtgatggaaagaataatgaacaacgtgatgataatgacgaaataaagaacatcttcactacagatcatacctcgcaaaaaaacgtaggatcttccggacatggatagccaataggtgatgtcgcgaacaaatgcgatgtcttgcccaatgtctccgataaagtttaaaacagcaagaatggcaagagttcccattgcggcaacgacttggtaagaagtgatgctggacatgaatagtccaattgcggcataagcgcatgttaataaaaatagtccgagaagaccggataatacaaaagctacgttcatattgtgaatagtgaatattccaaatatgatatatagggacaggattgccattaatacaattgcataaatgatcatagctgaatacttgccaagaatgatctgcgtatttgtgataggagaagagtaaagaaattttatcgatccactactatattctcggctcataagtcccatcgtgattaatggaatatagagatataaagattttaacatggagacgagtaaaccggaataccgagcgtaggtttcttgcgtaactccatataatccgtagcctagagccatacgttttagctgaatgtcaaatatattggaaaatgccatacctgcttggaaggcaaatatgacaaggataagccaggatactggagaacagaataatatacgaagttctgtttttgctaatctaaatattg

SEQ ID NO: 82 - DNA, 12741 bp, Butyricimonas faecihominis
caaatcccggaacgtgaatatacgcccggtatctatccgttcaatctgcccaagtatctctttcctgaatgaagccatatttatgtactttgtttctatgaagcaaagatagtatattatgtaatcacctgaaaaaacataacaaatattttgccgaagatgttttttatttctccaactattggttggatatttttttattcactcggacaaattgggacagtaccggacaaattcggacagtccttgccgcccgtccaaatatagcatatttagtcgctacctttgggcgggactattcccgtaaccactaaaattccaattatttatggcaaacagaatgaccccgcccgcagaggggcaggaaaaagacgtgctgctggtcttggataaacagcagggaaaggtgagtgccgttaagggtatcgacaaggacggcaatttgcagaccgtgccacccactaccggacacggcggcgagttcatgcaggtggacaagaacagcgatgtgttcagcaacttcatttccaacttctaccgcaagtatcaggacacttccgggctggaactgttcagcgtcaaggcttccgaagcggagcgggacgcaaaggcaatcgaggacaaccaccgcaaccctacaccggagggtgacaagcgggctgaaatgcttcgagttccgaagcccgacttccacgagttcaagcagggctaccgcttcgacccgtcaaaaatcgactgggagaacctgaaaaaagtcggcatcaccgccgacaccctgaaaaacacgagggacttcgaccgggtgatgcgtggctacaagtcccgcaacacttacactgtttcggggacggtgggcggcttctatctcaaacctaccgatgtcaagatctctttctatcaggcaaaggacggcacggtagtacccaagctacacggcgtgcagcaggacgaaaaactgttgcaacgcccgttccatgaacacgagttcaccaagcaggaacagggcaacttgcaaggcactggcaacttgggcggcatcgctgaaatcaaagacccgaaaagcggcgagcaaatccccgtgttcgtcagccgggacaggtacacgcacgaactggagtatatgcgggctgacaagtggaaatgccccgatacaatctgtaacgtgcaagtcagcccggaacagaaagccgcctttgaagccgggcaagcggtgaaaatggaaaacctgcaattcagggacggcacgcagcgcagtgcctatttgcaggtcagtgcggtggagcgtggcttggagttcctgccccgtgccgccgtccagttcttgcagcagtggcagcagcccgcagagcggcaggtcgccgggctaaaggacggcaagggcgttgagttcaacggtcatgtacagcccggcgcacagggcaaatcccccgacaaggtgcagccgaaagacgttacccccaccgccgagagccggacgcaggtagcggtcaattcggggggcaagaccaacgaagccaccaagcagggcaaagagccgttgaaacagggtcaggacaagcccaccgccaagcagaaagagaagcaggagaaagcgcaggacaagagcctgaaagctgacaagcccaagaagtccagaggaatgaaaatgtaatatccaccattaaaaagtaaagaattatgattgcattgatagcagagaagcccagcgtggcaaaggacatcgcccgcatcatcggggcgaccgggcgtaatgacggttatctttccggtaacgggtatatggtgacatgggcgttcggccacttaatccagcttgccatgccggaagcctacggcgtggcgaacttccgcagggagagcctgcccatactgccgcccgattttcaattaatcccccgtcaggtgaaagcggagaaaggttacaaggcagaccccggcgtgctgaaacagttgaaagtgataaaggaagtgttcgaccagtgcgaccggattattgtcgccaccgatgccgggcgtgagggtgagttaatcttccgctatatcttccattacctgaactgccggaaaccatttgtgcgcctgtggataagcagccttaccgacaaggcaatccgtgaggggctggataacttgcagccgggagagcgttacgataacctctatttctctgccaagtcccgcagcgaagcggactggctgatagggataaacgccacccaagcgttgagcgttgccgccgggcagggggtgttctcgctgggcagggtgcagacacccacgctcgtgatgatatgcagccgctatttggagaacaagaatttcgtacccgccaagttttggcaactcaaagcggcgactgccagcgggggaataaattttaccgcccaatcgaccgccaagtgggaacagcagcccgaagccatagccgccctgcaacgggtaaaggatgccgggcaacttgtggttaaatccgttgagaggaaagaagcctgccaagaaccgccgcttttgtacgaccttaccacgctgcaaaaggaagcgaacacgaagctgaacttctcggctgacaagacgctttccatagcgcaaagcctgtatgaaaagaaagtgatgtcctacccaagaaccggaagccgctatattccggaggacgttttcgatgaaatgccggaacgtgtcgccctgctggggcaatactcccgctttgccgggtatgccgccgggctggacggcacacccctgaaccgccgcagcgtgaatgacggcaaagtgaccgaccaccacgccttaatcattaccgagaacctgcccggcgaactttccaaagacgagcgggcggtttacgagctggtagccgggcgtatgctggaagccttttcgggcaagtgcgtgaaagacgttaccaccgccttgctgtcagggggagataccgacttcacggtgaaagggtctgtgatgaaagaagccgggtggcgtgccgtgttcggcgagcaggaaacgggcggggatgaagaagccgccagcctgccgccactccaagagggagaatgtttgccactctccggcgtggatctgctcgaaaagcagaccaagccgaaaccgctgcacacggaaagcagcctgttggcggcaatggagaacgcaggcagggaactggaagatgccgaactgaaagccagcctgaaagatgccgggataggcacgcccgccacccgtgcggcgattatcgaaacgctgttcgcccgccagtacatcgtgcgtgagaagaagaaccttgtgcctaccgacaaggggcttgccgtttatgggattgtcaaggacaagaagattgccgatgtcgaaatgacgggcatgtgggaaaccgcccttgccaagatagaagcgggcagcatggatgccgacacgttccggaagggcatcgaggtgtacgcaacgcaaatcaccgcagaactgctatcggtgcagctatctgtcgctactggtgaaacctgcccctgcccgaaatgcggcagcgggcgcatcctgttctacccgaaagtggcgaagtgttccaacgtggactgcacgcttaccatattccgcaacaagtgcgacaaacagctttccgacaagcagattgtcgagctggtgacgaaacacaagaccgggctaatcaagggcttcaagggcaagaacggcaaggctttcgatgcttcgctggtactggacgagcagttcaatgtcggtttttcattccccgaaaagaaagcgaaaccgaagaaatagcctatctttgccgctgaaatttcattgtgataggttttacagcttataataattgaaattttagtggttgcgcccggagggaaaccgggcgcattttttatatgttcccgccaaacaggtaggtcgaacagaccaccccgttatccagcaccctgctttccgagagcttccacagcgagccggatgtttccccgacaaaaccgatgcctttgcccgccatgaccgggacggtgtagattgtcaggctgtccagcagtccagctttaatcaatgaagtaagcagcttgccgccacccaccaccagcatgtcggtttcctgtttcagttcataaaccctttgcagcggttcttcggtcaggaactccaccccgcagtccggtgtaacgttggtgtcgtagtgtgacaccacaaaagaccgtttgcttttgtgcggccacccgccccagtgttcaaagatgtagttgtaggtgttcgcccccataagcaggcagcttgcggcggcgtgttcccttgccgccagttccttgacctcacggggcatccagtccagttcatagtccggcgtggcggtatgcccgtccagcgatacggcgatgtgcgctttgatttgttccatattatcaggtattaaagtgatataaatccctactgtcttggcacgttagccgcaaccccaaaaaagaaagcgtggcatgacgctgtttcgatgcgaggtactggcatacccaaatgtggaaacagtgcagccacgctatgacaaacgcatagcatatcctgcgctgaatatccccacattttgaaaagtgccagttttcgcatcgggacgttcggcgaacgtatatgttatatataaaggcaatattccggcaaccgccgtccaactgccgttacttttccgtgtaacttctgcaaagttaagcaaataccctgaaaaatcacgtgcaaacagaaaaaatcctgccgtgttatcacaacagggcaggacacaagcacctaaaaatacacaagttcagcccatacgcctacgggcagcttgcgttcctttgaagatgatatgaaccgatgacaaaacagctttggttcgccgtgtctttggtgatgatgtccctttcccgcatgaagcggatatagctctttgcggtgcgctccttgatgtccaatacctgctgcaactgctcgcaaaggtctatgtaggtgatgcgtgtctgccgcccgaagatgtcacgtgcgacattcaccagttccctttccttgcgcttctccttttcctcacggggcttctcgcccttgtacacgtgcatccccgcttccttgtcccatgcaaagagcatcaaaggaacgtccaacgggcttccgtcccttactttcaaggctttcacgaccgactgggcgggttcttcgtctttctctatcgaaaggattgtagccgccttacgctgcaactcactacccaaatgtccccgcagtttcaatccgttggggacgaagtgcagcacgcacagaatacacgtgttgtagatacccgccagccgataaagttcatctatcaccgccacgctttccgcttcatcgttggcactcttaacaaggtctgcgatgccgtcaatgacgaccaactggatgccgccgtactggtagtagaacttgtccatgctttgtacaatggcgttcaggcgttctttgcgtgacatgccggtaagacaaaacgctttcagttcatcgggtttgtccggctgtttggcacgtgccagcaggttgcttacattcttgaacagttgcacttccgactgttcggtgtcgtagagcaagaccgccttgtgtttgccgttggcggttatctgtatgcccagcgtatctacttccgcaccagccgggcagatgcagcccgccacgattgcggctatataattgctctttcccgttccctcgcccccggtgatgccgaacaggttgccttgtgtccccagcggaacgtcacccgccgaaataatctcttgcgctttggcgggcgggttgttgaaatctatttcgcatgatttaagcataatcaatgtgtcgctatacaggttgtctaaaaattcgataaacagtttcaggaaatcttcacgggtgttcccggctttgaagtagtcggatatgtccttttcctctttcgttcccggaagcgggagcagcaggcgtttcactccaaattcttccagtagtttttcctgtttgcatgaactttccctgcccgtcttgtccatgtcaaagagcaggacgatgtgcttgaaccggaatgtcagccgataaaccagcgtgggcggtattgtcaccgtttcgctgttgaagcagatagcgtgaaaaccgtgcgccgccagcgaaagcacgtctttctcgccgcccgtgatgaatagcgtgtcgcctttggctggcagttgttccagcccgaaacagtagttctcaccgaagctgccgccgtagaggaaacggggcgtggagaacgggcggtacagcttgatgtgctgtttgcccttgtagccgtacatgggttctgccaccgatgaagtgtaggtgtacggtttgccctctgccgtttcactgttgtattcccggagcgaacagaccttgtaacgttccagcagttcgggcgtgatgccgtactgttgccagtacaccagttcggcaagcgggaacttctgttcccggaactggtagggcttgacgggcttttcgggcgtttcttcgggtttgtccggcactgcccggcagacggttgccgggggaacggaaaccggaatgccggaagccagccccaagcccaaatcccggtcgatgatttccagtatctccacgaagtcagccgcccggttgcagtccagcccctttaactgccccacgaggaagaaacagtcgccgctgtaactgtcgttgccgaagtctttcatcttgtagataccgccccggcggtcgaaatagatgttgcaggaagccttgctgtcctcgtacagcgggttaaggaagttgcgacctatgcgccaattgccgggcaggtagtgtttgaacaccgccagcccgttacttgttctttctaagatttcctctttccttagcatacaactggtggttggttatcaggttgtcgatgttctccttgttgctccttatcaggcgttcttccagcatccggcgtatctcgctgaccttgtagaagtagcgtcccctgatgttggaataggcgatagttcccgacacccgcaggcgttgcagggtcttttcgcttattttcaggaacgtgcagacctcgtagctgtccacccacatgtcttcctcgctttgccttgccgtttccatgtggttgaagatgtagtcggcaatggcggtaatcttgttgtccagttccttgtaggctttggactcgaatgttattatttccataacggtaactgattgatttgccgcaaagttcgggtgtcctgaaaaataaaacgccacagatgtacccacctgtggcgaaataaattttgttaaagcacggttgcctaatcctgctccctcatgcgcatcagcaacctgtctttcagggtggagaggaagcccgttcggtctttggtcttggcttttagttccatgtaggtgtggtagaagtcgccgaggtcgatgtcgaacacgtattcaaagtaggctacaatctccttaatatcaaccgtccccttgttcagacagccgcaggcgtccagtgcgtagataagttccaccaacgcccttttcgtccccgtccagcgcaacacctttcccatgaagccgttcttcacccgcttgcgttgttcccggcgttccagctcgtgcagacggttggtgaggtatatttccagcagttcgttggctaaaatcttggctaccttgaaatcgtgactggtgctgaactgtgggtctgtttcgtaatagaaactgtccacgatgatttgtatgtcaggcttcccacgcatgaaatactgcctgtccaagtaggtggctttcgttcggtggtactggtagaacgccaagttccgctggaacgactttgaaatccggtcggtttccgacagcaggtagtccctttgcacttcctcgctgccgctggggaagcgcacctctatcttgtaaacggtgttgtaatagatgattttgctcgctaaaagcggtttcagttccttgaagaagtgtatttcctcttccgtgctggcgaacgggtaggagattataaagtttttgagttcgcccagtatctcttgcaggtagtccacgcacaggcggcagagcgtcagcgtgtccgctgcggtgtcctcgtattcctgtatctgccattccactttttgaagcagtccggcgaagtatgtttccaacggtatcttatgttccataaccttgtgcttatcttttatgaagcacaaagttacgggcataaaaaatctgttttattcttgatttttcacattacgttcttgtaactgtgcattttcttgtttcctgcgcttttctgcgtatctcgcccggtgtgtccagcaagtaagccttgcagaagtcgttcaggttcgatgtcgatgcgaaccccgtggtgaacgccacttccgtaagcgtgaggttggtgttcttcaggtagtgttccacgtcctttgcacgctcctttatcacccattccttagccgtgtacccggtcattttctttaccttccgtcggaacgagccgtattccatgccgcatttgtccgccagttgctcggcatcatagaccatgtagcctttcagacgcaccatttcggtgaatgtctgcctgcccagctccggcagcatccgttcggcgtggcgcagttccttttccgtcaccagcaggcggttgtcccttaccgggtttctccgtagcaggtggaaagcgtggcataccgtgttgtacacgttgcagaggtactgccgtcccggtcgcatccagtggagcgcatcgcagtaggcggtcagttcgggtatctcgtcccgcttgcggtgctgttccgccagttcgtccagtatggcgtaatgggtggtggacatacccagcaggataatgattgccttgtagtccttgtatgccgccagtgtcggcgtttccggcaggcttttgagcgtgtcgcacacgtgggcgcacagccgcacgtccttgctgaacggttcaagttccaagtagttgtccattttccggctgttgtgcagcagccatgttaccttttcgtccagttccttgcaggacgcttccaactccgcttcgggagcgggaagcaataatgatgtaatccgttgttccatatctgaataaattgatttgttttctgtacgttacccggtagcccatagccaaaacttttggattagccgccaaaccacgtgataaaggaacatggcggcaagcataagaaaacctgcccgcaggaaatattcttcaatgcgctgccaaacgctcgtttttcgttcgggcatcagtatgtccgccacttcctcaaaggtcttgcaggcgaaaatcgcttgccggaactcgtctgcgctgttccagcattcttccttgaaccaccgtgtcttggggtatcgttccgctaccagttcttgcagttttcgtagtgggaacggttcggggttgtccccgtactcgtattcaatggaaatcacacgtccctgcatcctgatacaatatccgaatatcccttgccacttcactttgtgcgcccccttttcaacatatttcgtcccggttgcatccactacaatgtagttcttccgcttcttcaacaactcggtattggtcgttgtgtacagttcttccttgcgaaacacgtatatcatgttgcctttgggggcaaagctgaatatcgggtatttaagtcgggctttcattgtaaatagtctattgttttataaaagcaaaataaaacagggtaacacctaccacaaccccgaaaaagatacaacctgtaataatgaaagcccaatcggggtaatggaaatcaagttcttcataaggaatggcagttttctttatacatctgttccatacccatatcagaacttttccaaatctatttactgtgataaggttactcatattgattaatggtttagcagggaacggcttgtccgttatcctgcttcgttaacatcatattttattctcattccagtgtaccatatcaatacaccataataacaaggtctttttgcgcttcaacggcttcatcgaaaatgaaattcaagtcgtccatttcctgctcgtaatcataatctccgataccgttaccctcttgtagtgaggtgtattccgtccgcttgctctccaaatctgaaacgggtatgctgatgatatagggaaaatcactgctcaatggaatagggatgaatgtactttggctatccaattgccaaaggttttccgcacagtagatttgcgttccataatggttgcaaatcttttcatatacatacccgtacatgaaagcaatttcgggataacggatttctccgttcactatatctgccaacgctgcataagcatctttatccgtgttcaggctatcgctgaaataatcgttcagagtgtcaagttcctgcttcaacgcaacctttaattggtttataagctgattatcacaagttccataaacagactttaccttatcggcttctgtcaaatatgcacaaacagagtaactcataccttttcttcatttaatattgtcattccagtgtaccatgtcgtatggatagtagggcaaccctttcaggctgctatcatccagccccaagaccttgaccaatgcaccgctttcaaaacaccaataaccgtcatggttgataccatatttatggtcgtcatgccaagataaatcagaatgtcctcgataccattcttttttgaggtatttttccaatcgtttcaccgcttctgctttgtcttgttcagccaactctgtaacagtgatagcaattcgatagggtgacggatataatacttggtttgttgtcctttcccaatcaggaaatctgtatctaatcaatgtatcataaatatagtctttagcttctctgtcttttatcagttgcaccagaccatgtataaggtcgtcttcgtaatccaacataatgcctattgacagaagccacaacatttcaatataaaatccgttgtccgtccaaaatctcggcattgttttgagggctttcacataattgtttttcagcttatcaatatcctgtcccatagaatactgtactaataaataacgaagcctataattgaacaaagaatcgtaacctatatgttttcctgaaagatgcatttgttcataataactaatatcttcatcatacattttcagttgcttcaaatactgttcttctgtaaaaagtttatctcttgtttccattatggtacactgctttttgatgttaatggttagaaaggagcatcgtcagatgctatctttcgttgttagcaacctatttgaaataattaatcattttatcgttattaggaatattcccagtatgccacaaatggatttgtgactttattaccttcaatttttccataaacatatatacagccagccatgaaaacggaaatatctttcatgcaaatttcgttgatttgaaaaatgaagctatttccatctttaaccactttaccatcattatctaatccccattgaataggcattacgttacccccaaacttgattgcacaatttttttcaggcatatctttttccgtactcatttcgtatattgaataaatttcatctatttcggggtgtttatatctatcacttttactttggctacttaattcatgttcaaccaacaacaatttacaatcgggatatgtgttatattccaatgcaatatcaaaatccggagtgaaaatagatatttgcttgttcggatttagagggttttgaaatgttagataaaaatagagattatctttgtccgataaatacttatcatcaaaacaagctggagcatttccaccaacccaaccaaagcagtctttttggtattcaccaatgccatagtatattgcattttctcttgttttaagtattctttctatatccataataacgataatgatttgattgttgctaatggctaagcggggaacgacgttagtccgttatcccggtttgttagtaatatattctatcgcactcgcttcaaatccccgataaattggagtaccgtttctatatacggaatagcttttagaattttgatattatctattgattctataccacccgataccaatgctgggacatatccgtaacattcatccaatgtaggaacacccttttctgattttatcataggatatttatttaaggaaaaccatgattccaaacaactcttgttgaaaattaccacattcaatagtatatcaacattctcggataaaatcttgaatgttccgtatctcacattgatgaatacgacataatctcctatcacgggattcttaacataagcaaaaatatctccaaaaacagttgtcataaatggagttacagtttcatactcatacagaggataactatcatctactattgtctgatatttatcggggttaataattctgaacaatccatcacaaaacgttccaagtccaacttctttccaaagttcgattattttttctgataccgcattagcatattttgcaataaaagtatcatctaccgtttggcgagtgctgtttaggctcttatctaaaaatttttcgtacatattgattgtgctatttattactaatgggttggaaaggaacgccgtttaggggttatctttccttgttataaacttttttatttttccaatggatatataattctccattctttagtcttttctctccaactattgcacataaaagattattttcataggcaaaattatattcctctgctggcatattgtcccaacgagaagcatacc

SEQ ID NO: 83 - DNA, 12714 bp, Butyricimonas faecihominis
aatttacaatattgcattattttaatccaaaattacaagtcaaatactacaacatctcttatcgatcctacatctgttatctattcctccatccccgcaaactacttttgtttctcgctctccttttccgcctccacgttatccagcctaaattccaacgccttcaccgagatcaatatctctttcacggaaattcccaatgaaatcactaacagcaacaaagctactccgaacgtgtaaatcgccaaagtttgtaacccaatataaataaagaaagtacaaaccacgcaaagcaacaaactgatcaccccgtaaatttgcatcgaccgagccatataaagccgctttcgtaaattatccagttgcaatttggtcatcgcactcggccgattctcatgttcacccttcaaattccggatcacttgggcatacgccaaaaaacgattcgtataagccagcatgatcaacgatatcgccgagaataaaatagaaggtgttgtcaatgtaagctcttccataaccgcaatattaaatactaaatactttacgggcacattcgtacccttgattatacaagtccgttaatttcgtcacgtcttgttcgatccgatccacctccaacggtttctccggacgaatcaaaattacttttttctcccgttccaactgttccaaaaaatcaagagtctcgttataacgtttattctttatcctcaagctctcccgtaatgccggatatttacgatacatgaaccaaggcaatgatttctctttttcatctttccggtaacctttattacgagttaggatcaccacgttacgatcgaacccgtcggctattgctttccggatcggaatggcatcacagattcccccgtccagcatgggttccccgtccacgtaagagaccggacaaacaaaaggcagactgcaagaggcccgacaaatattcagcaaacgtaccggatcatgcttttcctcgaaataattcgcctctcccgtcctgcaattactcgtcaccatcacgaaacgctctggggaggcaaagtaagtatcataatcgtacgggataatccgggtcgggaattcatcaaaaataaggtcaaaatccatgatactccgtttcgtgaaaaaataacggaaaccgatataatggtacttatccaacaaatcaatattacacgtctttgcccgtccccgctgacgggaggcataggaaagcccgttacacgccccggcagaaactccgatcgtgtaagggaaataaacctttttatccatcaagaaatctaacgccccggcagtaaatacgcctctcattccaccaccttcaagtactaatcccgcatgtgcatctaatatcataaccaacaaacatttttatcttctttcgaaacaggtggagccacgtcccacacatcactcaaatccggcccctcacttccggcggtatacgttcgcaaatgctctcccggatgttcccgccaatagttcacgatcggatcgataaacttccaactagcttccaaggcatcatcccgcgtgtaaagcatcgaatctccctgcatggcatccagcaacaaacgctcgtaggctcccggcagataattgttacaaagcgaggcatacaggaaatccatccccacctgtttcaccgtaaagccgccccccggcattttcaacccaaacttcaacatcaccccttcatctggtgtcatacgaataatcaactggttacaagacgaaccctcgcattgtccctgaaataacttgtgcggcgtggacttgaaatgaatcaccaccccggaacgcttgtctttcaaacgtttacccgtatatatataaaacggcacatgactccaccgccagttgtcaataaaaactttcaacgccacgtaagtctccatatcggaattcggggcaacatctttttcctgcaaatatccaaccacaggctgccctttcgattctccggccacgtattgcgcccggacaacattgcggggaatatcctcccctttccattggcgaagtgaacgtaacacctttactgtctcgtcccgaatcacctccggttccatcgtcgccggggattccatagccacgaaagccaacaactgcatcagatggttctgcaccatatcccgcaaagctcccgttgtctcgtaatatttcccccggttctcgattccgagcgattccaaagcgtatatctccacgtaatccacgtagttccggttccacaaggactcgaatatctcgttcgcaaaacgcaaaaccaatatattctgtaccgtctccttccccaaaaagtggtctattcgataaatctcctgttcacagaatacctgcaacaaggattgatccaattctttcgcagtctctaaactcgtcccaaaaggtttctccaccacaatcctgtgccacccgccccgttccttaacaccaaacaagcaacttctcccgatatatttcgtgattgcctgttgggaattcggaggggttgccagataatataccacccgcatcgggatggcattttcctccatcaaaaacatcacccgctctcccaactcgtcagcaccttccacgggatcaaaaggttggtagtacactttctgcaagaaacgatccacctcttccccgttcaatcccttctcccctttcaactcctgcaacatcaaacggatagacaaacggaactcgtcatcgctcatggatttcctcgaagttcccaaaataacaaaacgttccggcaacatctgccgcacgtgtaactcgtataaagaaggcatcaacattcgtttggttaaatcacccgatgccccgaatatgactaatacctgatcctccggtctattcataattacacattataagttcctgaaaccgtctttccaccttttcccgtccagtcggtatggaaaaacttacccctctcggcatccgtacgttcgtaagtatgcgccccgaaataatcccgttgcgcctgtatcagattcgccgcggaagtaaaattacgtaacccgtcaaaataactcaatgccgagaagaaacaaggtgccgcgataccattaaacacgcagtccacgaccatcccccgtaaagccggcaaggcattttccattctctcgtggaaaaaagcatcgaataacagattctgcaatcccgggctcttcgtgaatgcttgagtaatcctctccaagaatacagagcgaatgatacatccctttctccatattttagcgatagtcccgtaatccagattccaaccatttcgctcggaggccctgcgcatcaaggaaaatccctgcgcgtaagagatcagtttcgccgcgtacaaggcatccctcaccgcctcgattccggaagtgttcaaggtaatgcaagcctccatatcccccactttacccgaggggtactgcacggacgctctctctctttcgttcaccaaagacgacatgaaacgggcaaacactgcctccgacaccagcgtcaacgggtccccctcatccaaggccgccatcacactccattttcccgttcccttctgcccggccacatccagtatgtgatccagcaaatagtcaccgttctcttccttgtaatgcagaatatgtgaagtaatctcgatcaaaaagctattcagttctccccggttccacaactcaaaaatatctcccaacccgtcgttatccaacccggttcttttcttcaacatggaatacgcctccgcgatcagttccatatccccatactcgatcccgttatgtaccatcttcacgtaatgccctgccccgccgggaccgatccattcgcaacaaggagaaccgtcttccagttttgccgcaatcgactgtaatatatctttcaccagtggccaagccgtcacggaaccacccggcatgatagaaggcccgttcaacgcaccctcctctcctccggaaattccggctccaataaaatagaggcctttctcttccagcattttcacccgacgttccgtatcatggtaatccgaatttcccccgtcaataataacgtccccgggagaaagccacgggagtaattgcccgatcaactcgtcaaccgggtccccggccttcaccattaacatgatcttccgcggcaggcgtatggactccacgaactcttcaatcgtgtaggtcccgtggaaacgctttccctttcctcgcccttccacgaaacgggttaccacgctctcccgatccgggtgaacccggttgtaaacagaaaccgtgtaccctttactttccaagttcagagccaaattctcacccattaccgccaatccgatcaatcctatatctgatatttccatcataacaataatttattcgtaactctattgtacgactattccttttaatttgttcttaaatattataacaaaatttacactcgcagaacatcctacaaaaagagagccaaaattgatcggtaaacagaaaatccctgacgcttaataatctaccaaattcccgaacatcgaggtactcagatacttttctgccctatcggggaaaataaccacaatgttacccgtatctatctgttccgcagttttcagcgcagccaccatggcagccccgctactcatcccggcaaaaataccttcccggacaataatctcacgagccatggcaatagcctcctcgctctccaccattacctgtatatctatccgggagggatcgtaaatagccggaacaatcgcctcttccatattctttagaccttgaatgtaatgccctttcacgggatgcgcggacacgacttttatatccggcttacatcttttcaagaaacgggatattcccatgattgtccccgacgttcccaaggcactcaccaagtaatcaacctccccctccatctgttgccagatctcgatggccgtgttctcgtaatgtgcctgataattcccggcattactgaactggtcgggcataaaatattttccggggttttcttccacaagttgatgcgccttccggatagccccatccgtcccctccgccgctggagtcagaatgaccttgcccccgtacgaacggataatctttctccgctccacggacaccgcctcactcatcacgatctccacgggataacctttcacgataccgataatagccaaaccaatccccgtgttcccggaagtcggttcgataatggttttaccgggcatcaaacgcccctcccgttctgcctgttcgatcatctgcaaggcgatacgatctttaatactacccgtgggattaaatccctccaacttggcgtaaatattcacgttcggattctggcccaaacgattaatacgtaccataggtgtatgccctatggtttcaagaatgttcttctttaccaacatgattatttttgatttatgattcacgattttaaattacactctccacccgccagtttgaatacaccaaacctaccggagagacaatcactgcctatcgaaaaacgtttatagaaatataaatggcaggattaaagacaacaacagcaacaacaagcacggcccattcctttgaaagattcaaagttcgttcccctcacttgaaattgacgattagaaataaatgttgtcttcataaacttcagatttataatttatcaaacgacttgtaatcgttcatatcgcaaatataaacaaattatcttatcttcgcaccgctatttgaaaatgtaaattcattttcaattttcaactttcaattttcaattaaatatgatttcagtagacggattaacagtagaatttggagacagagcgctttttaaagatatttcatttgttattaacgacaaggaccggattgccctcatgggaaagaacggggcaggtaaatccacgttattaaaaattctggcgggagaacgccaagcctcccggggaaatatctcttacccgaaggaaactgttattgcttacctaccgcagcatttaatgacccataacgaaagaaccgttttcgatgaaacggcacaggcattcgcccaccttttcgagatggagaaagagattgaacggttgaatcaacaactcaccgaaagaacggactacgattctccagagtattacaaactcattgaagacgtatccgccctcagcgagaaattttatagcatcgactccacgcattacgaggcggatgttgaaaaggtattgttgggtctcggattccaacgggaagatttcaaccgcccgacagccgatttcagtggaggttggcgcatgcgtatcgagttggctaaaatgttgcttaaaaacccggacgtgttgctacttgacgagcctaccaaccaccttgacattgattcgattcaatggctggaggattttctcgtgaataacggaaaagctgtcgtcgtgatctcccacgaccggacatttgttgacaacatcaccacccgaacgatcgaggtcaccatgggccgtatttacgactacaaggtaaattactcccaatacctcgtactacgccaagaacgacgcgtacagcaacaaaaggcctacgacgaacagcaaaagatgatcgccgagacgaaagaatttatcgagcgttttaagggaacctattccaagaccttacaggtacaatcccgcgtgaaaatgttggagaaactggaaatattggaagttgacgaggaagacacttccgcactgagactgaaattcccgcccgccccgaactcaggtaaatacccggtgatcgcggaagagcttacgaaagactatgacggacacatcgtgttccaagatgcccacttcacgattgagaagggagagaaagtcgctttcgtcggtcgtaacggggaaggaaagtccacgctagtaaaatgtatcatgggtgaaattccctataacggaaaactgacattaggctataacgtgaagattggctatttcgcccaaaaccaagcctctctcatggacgaaagccttaccgttttccagaccatcgacgacgtaactcccatggagctgaaacacaaaatcaaggatatgctgggagctttcatgttcagcggtgacgacatcgacaaaaaggtgaaagtcctgtccggtggagagcgtacccgattggccatgatcaagttgttgctctctcccgtgaacctgttgattctcgacgagccgaccaaccatctcgacctccgtaccaaggacatcctgaaaaatgccttgaaagagttcgatggcaccttgatcgtcgtgtctcatgaccgtgatttcctcaccggactcgtccacaaggtctacgaattcggtaacaagaaagtaaaagaacacttagaagacatccaaggtttcttgcggaaaaagaaaatggaaaacctccgggagatcgaacgtaaaagctgattagcaagtccatttattgtaataataaaaaaatattatccattcgttttgcttgaattaatattattcgtaattttacgaacaataaataaagctaagaatggaaacgaaagaatacaccatagatcaagagcaactcgcccgtttcgcaaaagcgatggggcatccggcacgaatcgccatactcaactttctggcccaacagaattgttgttttttcggtgacatccatgaggtcttacccatatcgaaggccaccgtttcccagcatttgaaagagttaaaagattctggactaattcaaggttccatcgagcctcccaaagttcgatactgcattaatcgagagaactgggccatcgccaagaatttattcgtacgcttgtttgatcatgacaacacggaaaaaagtagttgttgttagtaacaactattttattagctatattgttcgtagtttgacgaaatacaaacacaataaattaatatcaataacaatcaattaaattaaaacgttatgaaagtaattctactgttaacaatgtgtctaagccttttcgcatgtggcaacaaaaacacaaaaggcagcaaagcccaagaacaacaaccaccaaaagatcatgtggaagttctctatttccatggcaagcaacgctgtataacctgtgcggcaatcgaaaaaaataccaaagaaacggtggaaaccctatttgccgacgaactgaaagacggcagcctagtattcaaatccattgacatctctcaatctgaaaatgaagagatcatcaacaaatacgaggtcacgtggtcttcactctttatcacgaaatggaaaaatggcaaggattccaccgagaacctaaccgaatatgcttttgcaaaggctctttccgctccagatacattcaaggcaaacgtgacccaaaagattcggcaactactaaaataaacatctatggaatggttacaatctttattggatagtagcaccaccccggctttgaccgccttcttgctaggactactgacggccatttccccttgtcctctggcgaccaatattgccgccatcggctttattggaaaagacatcgagaaccgccacaggatatttcgaaacggcttgctctacacgctgggacgtgtcatggcctacacgctcctaggcattatcctcatcttaattttggaagaaggttcaagcctgtttggtatccaaaaatttatcggcaaatacggagaaatgctactcggacccgcactattattcatcgggttattcatgctgttcggtcacaaattcaacctgccgtcattcggtttcaaaggtaatggagagggattagcccgtcggggcggatggggagccttgctactcgggatattattcgccatggcgttctgccccacgagcggcgttttctatttcggcatgttgatcccgatgtccgcgacatcggcaggtggttacttacttcccgttctctttgccatagcaaccgcattacccgtattggccacagcttggattctggctttcagcgtacagcatatcggcaatttttacggtaagataaaaaccatacaaaaatggttgaattggatcgtaggcgggttattcaccgccatcgggttatactactgtctggttataaatctctaagtttttcacacgaacaacgttcgtaacataacgaattaaataaattaaatcatggaaataaaagttttgggatccggttgcgccaaatgcaagacaacctatgaaatgatcgaaaagatcgtgaaagagaatcaactcgatgcaacactttcaaaagtggaagacattgttgaattactgaattatggcatcatgacaacccctgccatcgtcgtcgacggagaagtcaaactcaaaggtcacgttcccacggagagcgaaatcaaaaagattctcggtatttaataaccttttcgtcatgaacaacaagaaagaattgaccatcctgttttggatgattgctattttcgcaatggtcttcttcatgccgctcggcaatgagcggttcatgaccgccattgatgccacgctcgaccttgccaaatggtacgcgcaagaacacgtggtgctatgcctgctccccgcattcctcatcgcgggagtcattgccgtattcgtcagtcagggagcggtactcaaatacttcggggcaaacgccaagaaatggttatcctacacgatagccgccatctccggtggaattctggctgtttgctcttgtacaatcctaccgttatttacaagcatatacaaacgcggagccggactaggcccggccattgctttcctctattccggcccggcgatcagtattttatcaattatcctaacggctcgcatcttgggcgtggagatgggtattgcccgtatcgtcggagccatcacattttccattatcatcggtcttctcatgtcattcattttccgcaaggaagaaaaagccaaaaaagaggaacaaatgaacatcaccccaccaccggagaaacgcccgatgtggcaaacttcatttcactttttcacgatggtactcatccttgtcttcgccaattggggagcccctgccgcatctgacaaaggattatggttttatgtatttacctataagtggtacatcacgggaatcctcgccttattcttttgctggtcactcatccgaattctaaagttacctatcacatgggtattacttagtgcgatcgcaacggcactttccgcctttctcgccaacacgtttatcactgatgccaagctggttcctttgctcccaatgattataggaatcacgtcattatccgtgatactactttttgacaaacgggatgatgaaaaccgggaatgggccttttcctcatggggatttgcaaaacaaatcctaccactattggcaattggagttgttttcgctggattcctattaggttcaacacatgatgacacggctatcgccgggatcattcccaatcattggatcgagtgggctgtaggcggaaattcactgctttcgaactttttcgccagtttcacgggtgcattcatgtatttcgccaccctgaccgaggtgccgattatccaaggtctgcttgcctctggcatgggtaaaggtcccgctctagcattattactggccgggccatccttatccttaccgaatatgctggttattcgtggcgtcatgggaacccaaaagacaatcgtgtatgttgctctcgttatcatcatggcaaccgtatcaggttacatctttggctcgttcttttaaaacttgaaacccgcaactcgccataggcgaaaaaagaaacggggtctaaaaacagaccccgctccagcaaaaaaaatataaaacacaacatttatttcctatgcttatagcgcacgaagacctccatcgcctcgtactccgccattcccaacttgttatacaagtcggccgtgttacggttacggtcttcggctcgctgccagaactcgcgaggatcatctcccgggtatgccggtccgttattctgtgaaccgtgtcggtaaatcgcttgtcgtttgatggataactccgacgggcttaccggcaccgccatatccaccttctcgatctcccactccaaccaagccccgcggtacaaccacacgtaacaatccttgaaccagtcatcctcacatacgacgtcaaaagcctgcatgatcgcatccagacaaacactatgcgttccgtgcggatcggccaagtctccggcagcataaatctggtgaggtttcacctccctcaacagattcacgataatatcaatatcttcttttcccaacgggttctttttcacggaacccgtttcatagaaaggcaaattcaaaaaatgtactctctccgaggggatacccataaaccgacaagcggccaaagcctctgccgcccgcaaggccgtcttgaacttcaacacctctttaggttcacttccctccggtttcagattccgaattgtctctttcacctgcttgtatccctcgccggacactcccatattttgggcaaacaaatcggcaatatccatcatctcgtacaggtaatcatcaaacacggcgatattcccggacgtttggtaaaccgcatgcacctcatgtccctgttccaccaaacgggcctccgtacctcccatcgagatcacgtcatcatccggatgcgggctgaaaatcaacacccgtttcgggtaaggattcgctctctccggacgggttgaatcatccgcgttaggtttccctcccggccacccggaaatggtgtgctgcatatcattaaacacggcaatattcaccttgtttgcagaaccgaacttctcgatcagatcgctcaaaccgttatcttgataatctttatcttcgacttttaaaatgggctttttcaacttctggcacaaccggatcaccgctttacgaatcagcttatcatcccaatccaccttgctcaccaaccacgggtaatccgcccgtgtcaattcgctagccgcactctcatcaataataaattgcacgttagaatgcatctgcaagaaagttgccggaaccgaatctgacacccgtccttccacggtagccttgataatcggagcctttttctctccccacgccatcagaatcactctccgggcctgcataatcgtcccgactcccatcgtgattgctttcgtgggtaccagattcctacttccgaaatcctttatcgcgtcttttatcgtcaagtcattcaagaacaccttccgggtctgggacgtgataaaagaccccggctcgttaaaaccgatatgtcccgtacgtccgatacccaatatctggaggtcaattcccccggcagcatcgatcgccttctcgtaatcccgacagaatttatctatctcatccccttccagcgttccgtccgggatatgaatattcttcgggtcaatatctatatgatcaaacaaatggtggtgcatgaaataatggtagctctgctccgactctttcggcatcggcagatactcgtccaaattgaacgtaaccacgttacggaaagaaacgccttcttcccggtgcagcctcaccagctcttgatacaacttgatcggggaaaccccggtcgccaaacctaaaacgcacttttcactgctagccgctttcgtttgtaccaaatccacaatctcacgggcaacggccttcacagcctcgtccgctgtttcataaatctgaacaggaatcttctcgaacctgttggcaccctcacccttagcgatgtagtttttagtaa

SEQ ID NO: 84 - DNA, 12410 bp, Butyricimonas faecihominis
ggtatggatattaagaatataaaggcggtgtattttgtgggtatcggggggattggaatgagtgcgttggctcgttattttaagatgatgggttacgaggtggcaggatatgaccggacatcgtcaccgttgacacgaaaaatgacggacgaagaagggtttgagattacttacgaggatgacgagaagggagttcgggaggttttccgggataaggagcatacgttggtggtatataccccggcggtaccgcaggaaaatcgtattcttagttttttccgggataacgggtacgctttgcataaacgggcggaggtgctgggatttttgtctcatagtaaaaaagcactttgcattgccggaacgcatggaaagacgacgactacgacgatgctggcttttctgttgaatcgttcgcacgtgggatgtagtgctttcctagggggaatttcctctaatttcggcacgaatttgttgattgataaggattcggattacgtggtgatcgaggcggacgagtatgatcgttcatttttgcatttacatccggagattgcggtaatcacggctatggatgcggatcatctggatatatacgggacgcacgagcatttgatcgaggctttcgaggaatttgccttgcagacacgaggtgagttgtttttacgtaaggggttggaattgaaaaaaagaacgattacggggcattatgctgccggggagaaagcggattattatgccaatcggttgcgagtggataacgggagttacttgtttgattatatcgggaaagatttggagataagggatttgaggatgtgttttccggggcgggtgaacgtggagaacgcgacggctgcaatcacggtggctttgtatgcaggagtgacaccggaagagattcgggaggctttgcctttgtttaaaggggtttcccgtagatttgacgtacatgcgaagagtgaccgattgatttatattgacgattacgctcatcatccgcgggagattgaggcatctctttcttccattcgggagatgtggccggataagaggttgacggtagcttttcagcctcatttgtactcacggacaaatgatttttacccggagtttgcgaagagtttgaatcttgcggatcaggtgatcctgctggatatttacccggcacgggagcaaccgattccgggggtgacatcggggttgattgccgagcgactgacggtgccattcgtgcgggtgacgaaggaagagtttccggagtatgtgaaggagaacgtgaaggagggagtttttatgaccgtgggagccggggatatagatcgttttattccgattttcacggagatgtttggagggacggattgctgatcggggttacaggtttggatgtaatggataagagacgagaatttgaattagaaattttaaatttgtaggctgggaatagagatgaaacgcattttaccttacatattatcttgcattttgcttgtatacctgataattgtgcttacctttgtggcgacaaaatcgggggaggtaacatgtagaggggtacgggtggctgtcaaaaatacggatgttaacgtgtttgtcgatgaggaggatgttatgaaggcgataaagaaggggtacggagacattatggacaaaagtatattggcggtgaataaagatagtttggaaagggtgcttgtcaagaatccgatgattaaatcggctcaggtttactacagtttagacggttatattcatgtaaatatccagcaacgtgaacctgttttgagagtactaacgggtgaagggtattacgtggatcgtgacgggagagtgatgccgttgtcttctaagtttacttccagggttgttgtagcaaccggtgatataaataagaaattcgcttgcgagaaactgggtcctttcgcgatgaaattgaagaatgaaccattttgggacgcgtatatcgaacaactggttgtgaggtcgaacgaggatgttgtgatgattcctaaagtgggggatttccggatcgtgttgggaaaggtggatgattgcgaggcgaggttggagaagttgatgttgtttctgaaggacggtatcacgaaaaaagggtggaatcgttacaaggagatcaatttgaagtttgacaaccaagttgtttgtgttagaaaataaaatattagatattatggggtttgtagcttctttggatatggggtctggaaaaatggtgatggctctcggagaaaagtccgggagtgattgtcgtttggtcggtgtcataagtattgcctcacaaggagttaaacggggcaaaattgttgataaacttcgggcaaaagcatgtatccagcgtttgttggatcgttttaagagcgagtatgaggttcatattgatgctttgaacgttgctttgagcggggcgtgggtgaaacagattgaagaccgggagaatatcaagttttctcgtccgaagagtatagaccaaggggatttgcaggagatggaaaaaaagtgtcggagcgtggtgggggccggtgatgaggaagtggtggatgtcgttccgttcgcttattacgtggataaggagagtgaggtgaacccggtgggagttacggcgaaacggttggatgtccattatcacgtgtatgtggcaaggagtagtgagttgagggatttgagggatatgtttgccaacctaggggttgataagatagatttttattcgatggccggagccgcgcagaaggctttgatcacggcaggatcggatatatgtaatttcgctttgcttgatctaggcgcagatagtatcaaagtacaggttttccaagacgggcttgtttattttgacgaggagttgccattgggatgcagcacgattgatggggatataaatacagcattttcgattaatgacatggagaaggcacgcaagctgaaagaagagttcggtatggcgttgcgggcatcgtgcaagaaccggaagattatgattcccgatacgaagtattgtattgatagtcatgatttggtacacgtggagcaatcccgtttggaggaattgttggaaggggctattttccaaatgcaggaaagtggttgctacgaggatttggatgacgggattttgttgaccggaggcggttgtcaggtggcggggatcgaggtgttgttgtccaagttgtcgggacattcggtcggatttgcaaaggtggcaagtgttaaagcggatcgggaggctagtttgaagtccccagcgtattttacggctttgggactgttgcagtgtgaacgtcgggaggtgaaaaagcctaaatccggtggatggtttagtaatttttttaaagaataaatgatataagacctttcagctatgcttaatgaagatgatttattggttgtgaatattccaccacaggaagaatcgattatcaaggtgatcggagtgggtggaggcggtagtaatgccgtgaaccatatgtgccgtcagggtattcggggcgtagagttcgtggtgtgtaacacggatatacaggcgttgcggattagtcccgtgaagaatcgtattcagatcggtaaggagcttaccgaggggcgtggagcgggaagtttgccggaacgcggtaaacagtcggctattgaaagtctggattatatcaaaacgatattggagcgtaacacgaaaatggtgtttatcacggcaggtatgggaggtggaaccggaacgggagccgcgcctattattgccaagcaagctcgtgagttaggtattctgactatcggaatcgtgacgatccctttcagttttgagggacggaaacgagtggagcaagctatggagggtgttgacgagttgtcgaattacgtggatgccctgttgattatatgtaacgagaagttgcgggatatgtacggggatttgaaattgtcgaaagcgttcgagatggcggataacgtgttgacgatcgcggctaagagtattgcggagatcattacgttgaagggattcgtgaacgtggactttgccgatgtggaggtggtgatgcggaatagtggggtggcgctgatgggtgccggagagtcggttggagagaatcgtgcgctggaggctgcgaagatggcattggaatcgcccttgttgaatagtaatgatattcggggggcatctaatatattgttgaatatgttgtacggtagtaaggagatcacgatggatgagattaccttgattaccgattacgtgaaggagttggtcgggaacgatgtggacgtgatttggggggctggtaaggatgatgctctaggtgatgagttgcacgtggctgtgatcgctacagggtttaacggttcacctatcgaaaggaaaaagacgaatatttctttcaaggtggagaccgtggaagatttggagatgcagacggtggatgcccggaagttggaggaagaggagcggatgcgcaagcaaaaactggaggaaagtcgtcggttgcgccaacagcgaggtgaacagcggcgggatgtcgggaaacgtcaacgggctatcgtgtttgacgacgatgatgacgatgaaccggttcgggaagaggagactcaccggaaacgaatcgaagagtacgatcgggagtttgaactggagaacgggcgcaaacggggaaaaaatgaggtgccggatgtagatagttggttcaagcgtaagctggggaatatgttcaacgaggatatgaatagggattcacaaatgtaataatggacgatcatggtagatggattgataaattttaaccagtttgagattactaccccgattattaaggtgatcggagtcggaggtggtggcggtaatgctgtggaatacatgtacaggcaagggatctgtgacgtggatttcgtgttgtgtaataccgattcgcaaatattggaacatagtcctattccgaccattattcaattggggaagaccctgactgaaggacggggagcggggaaccgaccggaaatcggagaggctgccgctaacgagagtattgatgatataaaagcgttgttgagtaccaatacgaagatggtgtttatcacggcagcgatggggggaggtaccgggaccggtgcggcacccgtgattgccaaggttgccaaggatatgggtattctgacggtgggtattgttacgataccttcccgcttcgaggggccgaaacgtttggatcaggctcgtgaaggggtaaaaagattaaaagaacacgtggattctttgattatcatagataatgagaagatacaacggatattcggatcgcagacattgtcgagtgcatttgccaaggctaacgacgtgttgaatattgctgccaagggtatcgcggagattatcacgttaccgggatatataaacgtcgactttgccgacgtgagaacggtgatgacggatagtggaattgctattatgggtgcggcgaaagcctccggtgaagaccgggcgaagcgggtgattgccgaggctttgaatagtcctctgctgaataagagcgatatactgggagctagtgacatcttgttgaatattacatccgggacggatgagattacgatggatgagatgagtgaaatcacgaattacgtgattaaggaagtaggtgataatgcagctataatctggggtgtgggaactgatgaggcgctggaagacgcaatttccgtgacggtgattgctaccggctttcccatggaggacgtggaaaacacgttcacgaaacccttgaagggagttgcgtccgtgaatgatgtttcggaagaggcggtggatgccgcccgtacgaagaagatcaaggacggggtaaaggattacgtacaggtcattttaaaggaatcggaggttttgcttcaaccggatctgtcacccgaaaaaatagaagaattggcaacgactccggcgtatacacggagacatttaaaaatagacagaccctagcgatttagtgatttaatgatttagcgattacgtgatttccggtttataagtagaggcgttagccttgtgaggaggaatctaaaatcaaaaatcactaaatccgaaattgtaagggggtaatttaaaacagtttaatggaaaaatttagagaattaggattagacggggaaattcttaaaggaattgcagatttagggtttgaaacaccgagtccggtacaagagaaggccatccctgttattttgggcgaagaaaatgatttggttgtgttagcccagaccgggacgggaaaaacagcggctttcggattgccgttattacagaaaattaatccggagtggaatagtgtacagatattggttctgagtcccacgcgtgagttgtgtatgcaaatcgggagtgacttgaaaaaatattcaaagtatcttccggatattcgtgtgacctgtgtgtacggggggacggatattagaaggcaaatgaaagaattacagaagggggtacacgtggttgtggctactccgggacgtttggttgacttgttgaaccggaaggcattgaatatcgagaccgtgtttgctgtcgtgctggatgaggccgacgagatgttgaacatgggattccaagaagatctggactttatcttgagtaacacgcctaaggataaaaatacatatttgttttcggcgacaatgccgaaagaggtagagcggattgcccggaattatctggtgaaccagaaggagatttccgtgggtaagaagaatcagggtgcagacacggtgtctcaccaatattatatggttcgtgcgaaagattgttacgagacgttacgtcgaatcgtggattgcgctcccagtatgtacgctattatttttacccgcacgaaaaatgatgcgcaggatatagcgaaacatttgcagcgtgatggaattgattgcgatgcattacatggggatctgagccaagcgcagcgggataacgtgatgaacgctttccgggcgaaacggctgaaagtgttggtggcaaccgatgtggcagctcgtgggttggatgtggattgcctgacacacgtgatcaattacaatttgccggaagacgtggagagttacacgcatcgtagcggtagaacgggacgtgccggaaaggaaggaatctctattgcgattattcactcgaaagagaaagggaaattgcgtcggattgaaggtatcttgaaaaagaagttcgagtacaagcaagttccggtaggggaagagatttgtcgggctcagttggcattctatgcagataagattttagcatcggaggatcaagaggatatggatctgtatgctccggatgtgtacgaaaagttcgcagagctgacgaaagaagagttgatccaacatttggtttcctatgagttcggtaagttactgaagaagtataagaatacggctgatttgaatattagcgaggatgaccgtggaggtcgttcagagcgaggtgaacgtggagatcggggagatcgacgtgaccgtcggggacgtggagaagagactgtgtacagcacgtttatgctgaatgtcggtcgggaagacgggttgacacctcgtgatttgatgggcttgattaataaatattctcgtcgtcgggggattggtgtcggaggtattcgtatttttgatacagatactaaattcgagattgacgaggagagtgcatctgatttcgccgtagatttcagcaaggttctttttaatggtattccattggagataaaggctatcccgactcgggacaatggacgtcgtcgggatgaccggagtcgaggcgagttttccggaagacgggaacgtcgagatcgggacaaacgagatagccgaggtggcggacgtcgggaagaaaagagtggtggaaagagaagaggaagaccgggaagtgatccgaaaaagccgagaaatttcaatagatcgtcttctcgcggctagaaaataatttgtacatttgaacatgggaagtgtaaggtttactttacattttcacatgttcaatgtttatatattcaaattgaaaaatgatggaaattaagagtgccaattttgtgataagtaacacggatgtgaagaagtgtccggatccggatagacacgaatatgcgtttatcgggagatcgaacgtggggaaatcttcgttaattaacatgttaacgaaccacagtaaactggccaagacatccggcagtccgggaaagacacaattaatcaatcattttttgattaatgatgaatggtatctggtggatttacccggatacggctatgccagaacatctaaatctcagcgaggacaattcagttccatgataaagaattatattttaaaacgggagaatatggtatgtcttttcgtgttgattgacagccggcacgatccgttgaagattgatctcgatttcatggagtggctgggagagaatggggtgccttttgttatggtcttcacgaaggccgataagttgacgaccacggaacgaatgaattgtattgccaaatatcaggaaaagatgaaagatacatgggaaagtatgcccatggcgtttattacttctgctgaaacaaaattgggacgggtggagttgttgtcttatatttctgagttgaatagattagaactggaataagatggtgtgatgaaatgattttataatcatgaaatcatagaatcggcaatcacagaatctttaaatcataaattaacatggaggctattggattataccaattgaatagtttggtgaaacgggagttaaagaatcgttttccggatagttttttggttatagccgagattgctgatgtgaaagaaaatcggtccggacattgttatctggagttggtggagaagagggaggaagatgatgcggtgatagccacggctcgggctacgatatgggcttttacctatcggatgctaagaccttattttgaaacaaccacgggaaaatctttacaaaaagggatcaaggtactggttcgtgccgagattgtctttcatgagttgtacgggtattctttaaatataaaagatattgatccgactttcacggttggagatctggagcggaaacgtaaagaaattattgatcgattgacgcaagagggggtaattgatatgaatcgggaattggagtttccgatgttaccgaagacggtggctattatatcttcccctacggctgccgggtatggtgatttcgtggatcagttacatcgtaatgtttacgggtatgcttttcataccaagttgtttcctgccgttatgcagggggagaaaacaacagaatctattattgctgccttggaaagaatttacgagtatgaatcactttttgatgtggtggtgattattcgagggggtggttcacaaacggatttgggtagttttgattcctacgagctggctgctaacgtggcgcagtttcctattcctattcttgcaggtatcggacatgaacgggatgaaacgatcgtggaccgggtggcttatcggagtgtgaagaccccaacggcagcggcggcttttctgattgagtgctttaacgaggtggatagtgtattggaggacgctaaggaaaccttggtgagagaaaccagaagaattttgcaagaagaaaaaactcgtcaggtagtacgaattacggagttcaagcaatttacccgtctttttttagaggggcaggcaaataatttgaccttgtcgtcccggagagtagaacacgcctcaaggctttttgtacaggagcgaatcaatggattggagcaattgaagatgaaggtagaagggaaggttggaaccttgtttgagcgtcagaggaatcgtttggacgatatacaaaagacaatggtacgtaaaacaacagaattgtttacggctaatcgttattttctggagttggcagaaacgaaaatgaagtatgttgatccgaaaaacatactggaaaaaggattctcgattactcgcatcaacggaaaggcggttcgggagacggatcgtgtgaagaaaggggatgtgcttgaaacagaattgttcaagggagttattcgaagtgaaataaaagatattgagacaaacatctaatatataatcggttatggaagaaaaattgacatataaatccgctatggaggagattgaaagcttggtgaagttgttggaagaaaataagttggatgtggatgagctgagcgagaaagtgaagcgtatggcggtgcttgttgagttttgtaagggtaaattacaccggacggaagaggatgtaaataacgtgttgaaatcaattaccgaatgatgaaatccggttggctgtttctttgcatgctgatttcagtgacctctgcgttagggcagactcgaacaggagaacgaaatttgtggggaagggatgaagtgaaacatgcagcgataggggtttgcgtgaagaacgtggaaacgggacaggttgtgtacgagcataatccgggaatggcattacgtccggcctccgtggttaaattgttttcttctgcattagcattaaaacgggaaggagattctttaacttacacaacagaggttttttatacaggggagattgatgaagggaaactctctggaaatattgttatacaggcgggaggtgatccgacattagattcaaaatattttccaaaaacgtgctttatggatagtcttgtttctaaagttgtgaacttggggattaaacgaattcatggaaatattattatagagacagaaggtgaaccagcccgtattccggggtcttggccgtgggaagacgtggcaaattattacggggctctttatcattcatttaattaccgggataatacgtacacgataaacttgaaatccggaaaaccgggcactcaaaccaagatcgtgtctgttgagccttctgttccgggagtaaaattacggaacgaagtgatggcttctgccaagaatgcgaatgatgcgtggatatacggggggccagagactgcgacgttattaattcaggggactattccagccaatcgttcttcttttgcggtgaagggagctatgcatcacccggatgcttgttttagggcagaactggaaaagcgattgaaggggaaaggtatcacgttggataaacaaaagatagaagacggagagcgtcacgctttgtttacgttagtctctccttttttaaaagatattgtttattataccaataagaatagtatcaatctttttgccgaggctttgggcgaattaatcagtccgacagattacgcgagaacagtgaaggcagaattaagtggtatgggaatagattcatgtggaattacgttgaaagatgccagtggtttatcgccagcgaatgccgttccggcggaagtattcacggatttattgatttgggcaaagggacatttaagtgatgtttttgttgcctccttaccacaaggaaatgtggattggggattacgaatttattctgatcatccaattttacgggggaatattcttgccaaaacggggtctatgtccggggttcgggcgcttgccgggtatttgaaaactcaacgaggagaaacgttagcttttacgattcttgtgaataattacgtgggtgatcccgtgaaggtgcaggagatcattagggatttattgaaagagtttgcagataaatgaaaaaaaccggcaaaacgccggtttttattctaaatatatagaacgaattattcattcttgaattggtcatctccgaatgctaacatcgggaaggtgataaaggggaagaaaatagttgcaatggtgaatccgatgccttttccaaatttctctaaaaactcttttaaagcaatgatcgagaagatgatgttcgcaatgggaacaaagatcataatcaatagccaccaccacggtctgttaatgatttggagcattacgtaaagattgtaaatagggataatgccttcccagccttgtcttcctgctttttcgtacactttccacattgaaacaagtaataatacgacaataagcaagtaaatgatagatactaacatagttctgattttttagttaaacatttatagtaatagaattcctttttgccacacagcatttctgttgcaaatgtataaaaattgatatgaatgtcaaagatttttgatgtttatcgtgcgtcttttttctttcaaggaattgtaggatttcgtttttgaagtagagtgtatggaaatgaagcgataaagataaagtctcgacaaaatttgatcatttcacaaaattgcatacctttgccctaggtgttggtttgggattaacgataggatatctgttgaggagagggagagggtatatcgatcgaatccgaagaaaagaagttctatatttaaatttacaattccttatcaag

SEQ ID NO: 85 - DNA, 12209 bp, Butyricimonas faecihominis
tattgtttattactaaagtatttcatgaactgggctctttcataaagatccggattctcgatggacgaataggaaagcattccccggtaatccccgatcgtcttgaaagctttcgtgtccatccatttcccgataaaattatttatatcctcgatcacgtgaatacccttctcgtaaagaaccgaacaaacttgaactgtcgttgctcctgccaacaataacttcacggcagcctcaccgccatgtacgcccgtggatgcagaaatttccaactttttatccttcccggccaatattccggtccatctcaaggttgtcctcaattcggcagccgtgctaaacacggatgcggcccccatttctaatgtattaatatttatatccggctcgtagaatcgattgaataacgtagttgcattcgccccgtaagccttgattttatccacgaaagcggaaaggttcgtgaaataatgactgatcttaacagaaacaggtatctttatctggctcttgatggatttcacgatctcgaaatacacattctccacttccgcactctccctaaattcgtttacaggcaaaatgaagacattcaactccagcgcatctgccccagcctcttccaactggctggcaaacgaaatccattcaccaccactaaaacagttcacgctggcaatcacgggtatcgtcaaacgactcttggcattacgaaccaattccacgtacttctgtatcgtgttggaacgaatgtacgttttgatataatcctcggcctccgggtaagcatcactcatcccgtaaccggccttgaacacaccggaagtctcctcgttaatctgttcctcgaaaatagatttcaacaccacggctcccactcccgctttctccatctcgaccatcttctccacgtcggacgttaaaccgcaacttcccgcgataatcggactccgtaactccagtcccatgtatttcgtcttcaaatctgccataatgatttatttaaatagttaataatgaatctttcaaattatatattcgcgtaatttctcgccccgaagatggaactccccacgcgtaccatcgtacttccttcctccacggctatccggtaatcaccggacatccccatggataattccttgaattcagggttctccgcaaaataagttgccttcaactcgtcaaaaatctctttcaggtgatgaaattcccgtctgacctgcacctcatcatccgtgttcgtcgccatccccatcacgcccacgatcttcacgttcttcatctgcttgtaatcgttactctccaagagagctttcgcctcttccatatccaacccgaacttagtttcctcactggctatataaaattgcaacaggcaagggatcacccgatcatgttttttcccctccttgtcaatggtctccaacaatttcaagctctccacaccatgaatcaaagaaacgaaagcggccatatacttcactttattcgtttgtaaatgaccgatcatgtgccattctatatctttgggaagtacctcgtacttctccgctagttcctgtacccggttttccccgaatactctctgcccagcctcgtatgcctccactatcgcctccacgggctttgttttcgatacggcaactaattttactccttccggcaaactaccggcaatctctttcaaattttctacaatactgttcattccttttcaacatttaacatgcccttgaaatactacggacttacaaatataacgtaaaatcagaatataatgtcagtatacaagcgttaaaaattaacgtttatacccttccgttacaggttctcgggtcacaagtcgcaagttaattgaaatttacccgtgcatggcattcccgcagcccgaagaacagacaaagtaaaaaacgtttcatgttcttctactctcacggaattttgttaattttgaatcttgaaaaagtggaaacatgcacaggtattttattgaattagcatataacggaagtggatataacggttggcagatacaacccaatgccccctctgtccaagaagaaatcaacaaggctctctccctcttgttgaaacaagaaatcaacgtgaccggggccggacgaacagacacgggagtacacgcatcgtttttcgtggcccactttgagagtgatgtcgccatttctcacacgaaagccttggcagacaaactcaatcgtttcttgggaaaaaacatcgcgatcaaagatatatacgccgtgttgcctgatatgcatgctcgattttcggcaatatcgcgtacgtacaaatattatatcaataaaagcaagaatccgtttacttacccgtttgcctaccgaccgcaccccctaccggacatccggttaatgaacaacgcttgtgaacttctcctgcgttacgaggatttcaccagtttctccaaactgcacacggatgtaaaaacgaacatctgccatttgatggaggccaactgggaagaaacggatgaacaacttgtattcacgatcaaagccgatcgtttcctgcgtaacatggtacgtgccatcgtgggaacattgttggatgtagggcaaggacgtatcacgctggaacaattccaacagattattgaaagcaaggatcgatgcaaagcaggaacttccgttcccggtaatgccttgtttctttgtgatattgaatatcccccgtgtaaactataatattgaaacacatgaaaacaaaactattcatcatatcctttttcctgattttactcacagcgagtacgtcagcctccgtcaagttgtccaaagacgccacgatcagtattctgacgtgttccccgggtaacgaactctactcgctgttcggacacacgggcatccgggtggttgacaaggcaaacaacatggatattgttttcaattacggaacgtttgattttgcaacccaaggattctatttcaaatttgcacgtggactacttccctaccaattatcgtgttccgaatttcgtcgttttttatcttcctacattcatgacgaacgtagcgtgtattcccagatcttaaacctagattccattcaaaagcaatacttgatggacttgctcgttgaaaatcatgaacctgcaaaccgggaatacctctacaactttctatatgacaattgttcaacccgggttcgggacatcatagagaaaagtacaggtaatcaaatcacatggattgcccagccttccacgaaaagcttttggaatcttctggatgaatacctaggtcgttccccttggattcaatggggtattcacacgatcctcggctctcccgcaacctccacggctaccatccatgaacaaatgtttcttcccgattacctcatgtatcgtttagattccgcggcatataatgggactccactcgtgcaaccgatagagacagtatacgaggccccggaacaagacctttcaacaccttggtatttctccccgttctttgtttttgccatttgtacgcttgcactcattttatttttacaaaaggtaaaaagccgccgtttgctaaaagctatcgctattcccttctttattgcgacaggcgttgtcgggtgcctcatcgtctttttgtgtttcttcacgaaacatcccacgatgttccccaacttcaatgctttctgggcaaatccgttaaacctcatcgccgctttcttcctcggtaaacgcactctaccgtggatcatcaataaatacttgttcatctacctctatctcttgatcatcggctttttgctatggttcctgttcgttccggcagttccctatgcttccatggtcatcatgatatggatgatatacctctgcatccgtcttcgacaaagcgggaaataatatttttcgagattctttgcctcagctcttgcagattgaaataaaacctctatatttgcactcgcaattcagcgatggtaccatagctcagttggtagagcaaaggactgaaaatccttgtgtccccggttcgattcctggtggtaccactgaaaatgagagagttacgaaagtaactctcttttcttttatctcaaaaaatgtcattttcagcccaatgtttaaaccaagaattaaaccgaaaaccagaatcagcaagaaatcccatacattttgtcaaccagaaggtcaaccaaatgaccatagagtaaaaatctaatcaaataaattgttcgaattatactggaaaaaattctttcttattctacttttgtggtcgctaaaaaagtaacacgtagtaaaagtcggacagacatggaggcgaccaaggcctcccgttgatctaccagaaatatttcttatttttgcaaccgaacaagaatcgttatgaaagcgctattcatcaaaatcatcccttacgtaaccgtgctactcgccatgatagcctggggaatcggatatgccatttacggggaaacactaattgattggtgggaacctctctcgatggctcttatactcgctatcgctactctgttcttgtataaaaactggcaatggttaactcgttccaatagtaaaatattgaatggtatatgccatctatttcatgtaagcgctctctgttatttcttaatattaggcgggaatcttatattggctgatccgtcttctactcgggaagaaaaagtaaccgtactctcaaaacatatcgaaacacacaagcaaacccgtagagtcggaaaccaccgttatgttccagccggggaaagaaaagaatattacctgcaagtaattttcgaaaacgggacacgaaaaaaactcccggtttcactctccacctataacaagacacgtacgaacgcaactaggacactaaccctagaaaaaggattcttcggctataccattatcaaaaaaggaatctaaaactattcctgtcgatacaaatcatttgcctgttgaaatttggatgccatctgttgcaccaacacaggtggtgatagcacccgaatcccttcggcaaatccacaaatctcccgtcttagctcttgatttataaccacctcaatctcgaacacgattgccccgtctttttgtctttccaccacccgttgcgacttatgcaggggtttggtttccacgtatggagcgttgagtcgatctacccaaaaacgaaccacctcagcccttgatccagtgtttttagttaccccgacaagatcgtcaaaaaacgtgaccggatcaaacaccgtgttttccctgtaagattcctctttagcaatctcaagactatgaatacggtcaagggccaagtttacaagcacggatattccctgttttaccccgaacacgaaccaacgattccggtactcttttagtaaataaggatagaacaaaaacgaggatgcggatcgggccttgaaagaccggtatttcatccgcagcacttgtttgctcaccaccgcgtgataaatcatatccagataatcaatccccttcagactctcgttcttctcgaaatcaatcaccgggattgttttctgacgggctgaagtcacatgatcctccaaacgactgataatatcccccatattcgagaagtaagagaaccctttaaactggcgcaacacctccacggcctccgacatcactttcaaatcctgctccgacaagggagtgttcgtgatactatactcctcgtcttcgtatctatagtatttattatcatataccacgatcggggcattataacccaatttctcgctacgcatcatctgtatatccatctgaatcgtgcgccgactaattcctttcgtgatcccctcgtactcgtacaaggcatcggaacacgcgtcaatcaaatcttcaagcgtccatcttctatatttgttacgcaggcagttatctattgttttataacggattagggcattacggttcgctggcataaaaacagaataaaaattattttttcaaaaatatgaaaataatttcagttacgcaaaaagcttgcgcacccacctatgcatctttgtggtgtaaaacgaaaaaagatacaattatgaaattcaattttacaaacaaaggaaaagacactaccgtgaattacatgggagccaaggcttacaaaatgacaccggaaatggaactctattcaaccgtagtcacctgcatggtcgatgattcatactacgaatcaaacacggacagggtttgcaggatcaaaaacctgatcgcgaaatgcagtcccgagtttgtagccagactcgctgtatatgctcgcacggaaatgaacttgcgttcggtaccgatgatactggctgttgaattggcaagattgtattccggtaacgagatcgtgaaacgtgccgtcacgggtgtggtgaaacgagctgacgagatcaccgagattctcgcctactaccaaatcgccaacaaacgggaagggaccaaaaaattgaaccggttgtcaaaacaaatacaaaaaggattgatcgaatcgttcaacaggtttgacgagtaccaattcgccaaatacaataccgactcggctgtaagcttgcgagacgctttgtttctggttcacccgaaagcaaaggatgaagcacaacaggctatatttgacaaaatcgtatcgggtaacctagctatcccctacacgtgggaaaccgaattatccgaactgggtaaacaagcgttcgaaaacgagaaagcgaaagcccaagccgtttccgaaaaatgggaggaactcgtgtcaagcggtcaagtgggttacatggctctattacgaaacttgcggaatatcgtcacgaaaagcactgataaagcattggacatgaccttgaatatcctgacaaacgaataccggatcagaaaagcaaaacaaatgcctttccgttacctgtcagcattcctggaaatagacaaactggccaaagaaacctctatattcgaaggagaaaaagcgaaaataaagaaagccttggcagctttggaaaaagcgctggtaatcagttgtgacaatatcccgacccgcgagggaaaaaccgtgatactatccgataactccggaagtatgtacggggaccggggtggaaaatccctagtgtcagccatgagcgaacggaaaacttcggatattgccaacttgtttgccgtgttgtattggaacaaatgcaaagacacttacgtcggattgtttggtgatcggttaattgacgcgaacttgagtcgctcggtaaacgtgttcgagaatttcaacatcattaaccaagctgccaagaaatgcggcccggcaacggaaagaggaatattcgactacatggaatatttaataaaatcaaaaacgattatagacagaattgtcatattctctgactgtcaggtcggtgacggatgcaactggtacgatcacaaaggaaatcggggagaaaacttcaaccgccttttccagaaatacctgaagatcaacccggacgtgagggtctatacggttgacttgagaggttacgggaacagcatgacaaaagataacggcaacgtgatcctcgtcagcgggtggagtgaaaaaatattcgatatgatatattatatcgaacaaggttcctcggttgtcaacgaaataatgaaaatagaaatataaaagcgttctttgaaacaaaaatataaagcaagtgccgtagataagagttacttcgcatgtaacgcccgggtcgcgggttcgaatcccgccacttccacgatctgtaaactacgaacaagggagtgtagctcagtgggtagagcaggaaacagtctcttatcgcttgtagccttgcttttaaattactaaaacaggatgtcgtagagaagggttacttcgactcaatttaggggaggaatagtgaggtcgtaaaatcgacgagactatccggttcgactccggcaagtcatgccccgtttcctttctcgcttgttactcctgttttttacaaatgaaactcacgcggatgccgtaaaacagggttacttcgttaaagtggtcaccacgggttcgaatcccgtacgatccttgtttgcccgttgctccgcgtatattaaaaacaaaaatgatgatagaattaaaaggaacatataatcaagattgcaaaatcttcatcgacgaagtggaaaccgaggccatcgagttggtccggaacattctgaatcaggaaatctctgccggagtacaagtacgaatcatgccggatacccacgtgggtaagggaatcgtgattggattcaccatgcccgtgacacgaatggtcaacccgaactatattggtgtggacatcggttgttccgtcaccacgttcaaattaaaccagcgaatcgaagaagaacaattcccgacactggaccatgccatccggcgttccattcccatgggaatgcatatccgaaaggagaagaacttggatgactggtggattaccccctattttgaaaccgtgaataataaccttcatgcctttcaacaaaaatggttccagcgattcggggaaaccaaagattccattctagtcgataaagaatatatctcccgcttgtgtaagaaaatcggtatcaaagaaagtaccttctattgttccgtgggtacactaggtggtggaaatcatttcattgaactaggagaatctgccaaagatggttcacattacctgaccattcactccggttctcgtcatttcgggttgaaggtgtgtaattatcatgccaagaaaatgcataaaacgaccgttcttccggaagagtaccatgaagaattcaagtctatcacgcgtaacactctaccgacaagtgatattccccagaaactggaagagttaaacaaacgttaccacgtcggaaaaagggaatatatgcttgaaggagaagacatgtatgaatatcttgtcgatatggttattgctcaaacttacgcgcaattcaaccacaaggctatggcaaaagccatattcaaagacttgggtgaaaattatcaagccgtggacacggtttactccatgcataatttcatcgacacgacggactggatcatccgaaaaggagccattcgggcttatcaaggtgaaaaaatggttattccattcaacatgcgtgacggtttgttgatttgtgaaggaaaaagtaacccggactggaactgttccgcccctcatggagccggaagggtacttgcccggaacaaagcactgaaaacactggatatggaggaattcacaaaagaaatggaaggcatttattccacctccgtctgccgacaaacccttgatgaatccccgatggcgtataaagataaagatttgatcatgctagcgatacaagacacggcaacgatcatcgacacgatcaaaccaatcatgaacatcaaagctttgtaaaacaataaaattctgaaaaaatggaaataaacgaatgaaaaatatgtttacttttgtcttcgttaagcaacccaaacacatctatgaaggttcaaatagaagaaagttggcaacaacgcttacaggatgaatttgacaagccctatttcgagaaattagtggcgtttgtcaagagtgaatacaagaaagctcatgtacttcctccgggacaccagatatttcatgtattcaacgcctgcccctttgaaaaagtaaaaattgtcatcttgggacaagatccctatcctaatccgggccaatattacggggtatgtttttccgtaccggatggggtagctattcccggctctctggcaaatatttttaaagaaatacacatggacctagggacacccatcccgacctccgggaatctggaccattgggtagcccaaggggtattccccataaactcggtactcacggttcgggcgcacgaaacgggatctcacagagacaaaggttgggaaatttttaccgatgccgtgatcaaaaaattaagtgatgaacgggagaacttggttttcatgttatggggaagttatgccaaacaaaagatgtcacttattgatactcgcaaacatcttgtgttaaccaccgtacacccctctccccgttctgccgagtatggtttcttcggttgtaaacatttcagtaaagccaatgcttttctacgaagtaagggtattcaagaaatcaactggtaaacatgaaattaaaaaagcagcatccttacggatactgcttttttaattaattctctttcatgatactgtaataatagaaatctatcacctttccatttttcacggccgccttgtgcaacaccgcctccaattggtaccctgctttctccaatacgcacatggatcccggattgtaatcaaaaaccaaggcgtaaagtttttggtaaccgaacgtttcaaatgcgtatcgcgtgacggcagccacgactttaggcataattccccgtccccagtaaggttctcccagccaataaccgatttcggcagttacccgttcaatgtcaccttctgaaccaaacccgatacttcctactgctttcccatccacctcgatcgcaaatcgcatcgggggtacaggcatggcatgaaccatactgatataatcaaaagcatcttgtttcgtgtatggatgcggaaagtgatccataacattattccaaatcttctcattattggcattttcggctaaagaatcacaatccgaaaaacgccattcacgcaccacgaatccctcaccttcaatcctaacactgtgctttttttcccgtaacattaagaactcatttccctgattcatcgatcggggcaaatcgcttacacctgttttcataattgctagattccttggaatctctcctttatcattttttgtttttgtatattaaaactacgcaaacatacgtagtttaataatatcttgttcagtccccctcaaataaatttttcaaccgtcaatctcacaaaatagccaagcccgcatgaagataaatcccgtattccaacaaagaaaacaacaaaagtcgggccgcatattatgctaacccgactttcaaatctaacaaatcgaaattaaaaacacactatttcacgataatcgtgaaacaattatccacgtctttagaatacccctcgttcgaaaacgtaagtgaaatcacataacgtcccacgggaatatcatgatgacaagagacatttaacattccatcccctttcacggtcaacacggctttcaatttcccggcatctccatcattactcgtcacgcttttaatcgaaacataaatcggagccgttccgtccaccccttcaatcggggtactcgtccacgggatgttatatttatcccgtgtataatcctcgcctcctcctatttcaagcgtgggataaattcccatttcaatgcaactttcaggatcaaatcccatatcaatatattcctcgtattccgggttagggataatttccggaacagcattatccaaaacaacctttacctccaatgaatcaatttcataaccggccttttcaatatttaagaaaccaatggtcacatcctgacaagaagtcaagaccgccacaaacaatatccatattatatttctcataaccatccaattaaatatgtcctaatcgatacgagtaattcaacgcatgtaccacgccattcgtcggttgaatatccggagaagacatgggaatctttccccacgaaggcgaccagcatctcaaatttacctctccggcatccggcaccccggcgtaatcgctaccctcccggtaagcgataaaacgattccccgccaaacaggtaatccaagttcccccgtcctgccccgattcattgatctcgaactctttatttttataagcaatgtcctcctttaaaatctttccttttgtaacgtgcttcaacaggaattccctacaaagcgacttcggaatatccgaaaccttcgtgtacaccttcgtcaaatcttcattctcgtgtgaatcaaaaataaaacgttgtatggaataagaaggtattccccaaaatgtgatcactggcatcgtgtccacttttccctcgaacaaatccgtcaacccggcgtgttcaatcatttgtactgttaattcccaattataggtatctccacgcatataatccatcatgttacaatcatggtaaggtgacgatactcccgaattaatcacatcctgttgcgtgcaagcactcaaaactcccatacaacacaatatcaatattataac

SEQ ID NO: 86 - DNA, 12077 bp, Butyricimonas faecihominis
gtactacttaacccatcgcttggagataaagccttaaaacgagattttatatatttaaacatttgccgatttttcagaaagaaaacatccgtatttattcatggtttcaatttcgagtatgctaaaaatgcagattggaaatggataagtgccaatttgaataaggccttgtgtatttttgtgttatcccaagatttcaagaatgaattgataaggagggggataaaatctgatatacatctaacttcgacaaaagtacccgattattttatttcaggttttgacctttcgatgagacaaggaaaagccgaaaacattatgtatagcgggcgaatagaaaaggccaagggtgtatatgaaacagtcgatacattttcaatacttaagtcacaatacaaggatctgacattgacctttgtcggtgatggctcagaacttcctatgttgaaacaatatgttgagaataagaaaataaaggatgtccgttttactggagagttacgtggggaagattttaaaaaggaatacattaacgccgatatgtatttgtttctaagttatacggaaggtatgccaactgtggttttggaagcaatgattttcggactccctatttttaccagaaaagtgggtggcctaatagatttctttgaaaatggaaagatgggatatatatcaagttcgttagatccggcagtttttgcagaagcaatgaaaccatatatcgagaatcctgctaaaatgaggagtgtatcaatatataattccgaatatgcgaaaacccattttgttgcatccgttgttgtccgaaaatttgaaaatacactaaagaaatatattgagctatgaatattctgagaatcaagaagctaatatttttacacctccaacatctacccatgaaatcaagggcatggagaccattagtttgcaaatggggtggagtgcagataatcagccccaaaagaacgtttatcggtgagggcgtcatatttgacacaaattatccacaagatatttttatcgaagaaggtgttcgtttgacatcgggggtgaaaatagtaacacatttcatgaatcctaatactggaagttacgacagggggaaggttcatatctgcaaaggcgcctatctcggaatgaatactttggtggtaaaacctgtaacaattggagagcgagctataattggagcaggttctgttgtgaccaaagatataccagccaatgaagtttgggcaggaaatcccgcaaaatttataagaaaacggtaggattaattcatatggacattatatcattctatagggtagaacgttggctatttgaacgccatattccggttttgcccaaaatcgtacaactattgatttttctcattttcaattcaaaaataaccgctgattcaaaaataggaaaagggtcatactgtgtgtgcaaagggattagcactgtcttaataccgggaacagaaatcggagaaaattgcgtattaggattgcgattttctactgtacggcagtttccatataaagaagttccttgtctaaagaataatgtttgggtgggacctaatgttattattgctggccctgttgtaatagaagatgatgtggtaatcgctggaaattcatttgtcaaccgaagtgttcccaaaggtgctattgtagcaggatgtccggcaaagattattggctggagaaagaatcttgattatgcgattgagacaaacccaaagtataaagatggccgtatgccattcttgacaaaatgaataacaccaatgaatgatattgcagatgctttttataagctaaaaatttattgtgagactgaacatttcaagggttgggatccgtatgatggtctcaactctaaaatttttcaggcaattccgctgctgaaaaagtctgtattgtgcagattgatggtcatacaaggtttcaagcgttgccctttcaatatgagacggatggctttcgttccgaaagagtataacgcaaaaggtatcgggctgttcttgtccggatattgcaatctgtataaagttgtggaaaatcatccgcaattatccgaaaaaatgggaacgttggagatgataaaggctcggattgaagaattggcagagttgcttatatccttacaatctaaaggctacagcggtgcttgctgggggtataacttcgattggcaggcacgccgtctgtttctttttcccaaattcacgcccacagtagttgctacaaatttctgtgccacggcactgatgcaggcatatgaaataactaggaacaaacactatttggagattgcattaagtgcagcggattttgtaataaaagatttgcatcgcacgccgtataatggtggctttctcttttcttatagtccgttagagggtaatgacactgtgttcaatgcttcgctgctcggttctcgattgttgagttattgtttttattatacacaacaggaggaatacaaaagactagcggagctatccattaaagcctgttgttccgggcaacgggaagacggggcttgggtatatggaatgctccccgtacagaattgggtagacagctttcatacaggatataatttagatgcgctgatcgcttatcaagagttgacagaggatcatgctttcaatggttacatcgaaaaaggtttcgactactatgtcaatcattttttcgaagcggacggaactcctaaatattatgataaccgaatgtatcctattgacatccattgtccagggcagctattgataacattgacccgcctacataagatgaaaaaatatgaggaacttgccaaaaaagtattgcaatggacaatccgaaatatgcaagataaaaaggggtatttctactaccaattaaaacctggcatcagttctaaaatctcgtatatgcgatggagtaatgcatttatgtttaatgcaatgtcgcattatttactcgcaatataaaatttccaacataaatgaataaagtttctttaaacggagtcgaaatatatccgttcgattccgaacagtctttgttgtcttttgtaaacgataataagggcatattagtagccataaatgctgagaaaattttacatgctacagatcagacacgaggaattatcaatcggaacatagggtattgcgatggagccggcgcacaaatggctctcaaacaaaaaggttttgaaaatgcgtgtaaaattcccggttgtgagttgtggctcaaaattgtagctcaattttatagagaaaagactttttatttgataggtggtaaacctcaaatcatagaagaaactgtgtctaaactgcgtaaagaatatgcagggattcacattatcggttatcgggatggatatatcaaggcaaacgaggaacgggaaagacttataaaagacataaccgaaaaaagacctgatgtggtatttgtggctatggggtctcctaaacaggaattactgatggaagaaatacagcatagacacaaagccatctttcaaggattaggcggcagcttcgatgtatatactggccatgtggaaagggctcctaaatggtgggtgaaccacaatcttgaatttgcctatcggttgctcaaagaaccgaaaagaataaaacggcaaattcacttgataaagtatgcctggtggctgataactaaaaaattatagaacaatgaagaaggtaatgctggtcttcgggactcgtccggaggccattaagatggctccgttggtgaaggagttccaaaaaaaatcagcagactttgaaacaatcgtctgcgtgacggggcagcatcgtgaaatgctcgatcaggtgttgcagatattcgatatcaagccgaattatgacttgaacatcatgaagcaggggcaagatctgtatgatgtaaccgcccgtgtgctgaccgggatgcgtgatgtgttgaacaaggcgaaacctgatgtggtattggtgcacggtgacacaaccacttctactgccgccgcactcgcagctttctatcagcagatccctgtaggtcatgtagaagcgggcctgcgtacccacaacatatacagcccttggccggaggagatgaacagacaaataacagggcgcattgccacctatcacttttctccgaccgctttaagcaagaaaaatctgttgacggaaggtgtgcaggaggacaagataaccgtaacagggaatacggtcatcgatgcccttcatatcgttgttgataaaataaagactgacggagctctacaacaagaacttgccggggtgctggaaaaagcgggttacgatacctcacggcttgctgatggcaagaaactcgttttgataaccggacaccgacgtgaaaatttcggagacggattcatcagcatgtgcacagccattaaggatctgacggcaaaatatccatatgtggactttgtctatccgatgcacttgaaccccaatgtccgcaaacctatccatgaagtattcggggagaatttgaatagtttgggaaatatgttctttatcgaaccattggaatatctgagtttcgtgttcctgatggaaaaagtgacccttgtccttaccgacagcggtggtattcaggaagaggctccggggttaggcaaaccggtactggtgatgcgtgacaccaccgaacgtccggaggcgttggatgcaggaacggtaaaattggtaggaaccgattataacaaaattgtctccgaggtatcgattttattggatgatgcatctgcttatgagcaaatgagtaaagccattaatccttacggtgacggaaaagcgtgtatgcgtataacgcaaacacttaatgttcggttgtaacttttgtattttcttgacacattcaccagaagaaatatgttagtaccgaaggtgaatgtcgtattgcaggcggacaaagacatcggcagcataacagaggcagacatttggctcaattgtatggacggcaacggtaacttcttgtctgtggctgcggaagaccataccggcgacggacattacattgccaccttgccgttagactacagcccggtagagcctttcatccaagttcacttgaatgaaatggtctatgattacctgtccattccgaatttcaaagcgggacaggaatgtcaaatctcgcttatactcggtacggacgggcttcgcacaccgggaataggagctgaaatcgacgactgggaagttgtggaaggagatgtcacattcgtaaaatgacaaaatataataaatgacgcctgctggttttgttatcattggcaggcgtttcactttttatccctcattcaggaatcccggcatttaccgagtgttccgcttgttctgcacgtctttttcccatttcgatgtgaaggatttaccacaaagggcttggagaagaagaaacacatagcagaactgaaaatccgacctagctaaaaagaaaaacagatttcttatttatgccttcagactccggacaaattaactctatagttttttgagcattccttcgttcgtattgggatttatggttatttttgtaattcaatcaataatatgacgataatggcaaagacataccaaaggactaaattacaagaagtcacgatcagaggatataaatccatagcctatgacagacctgtgaccttgaagctgggtgatgtcagcatcttgttgggtgccaacggtgcaggcaagagcaatatcatcagttttttccggatgctgagctacatgatgagcaagtcattcgggagatatgtggaaatatcgggcacgtctcatgccttgctgcattacggcattaaacggacaccggtcatgtccggagaactgaagtttgccgacagcaattccatggatgtttatggcttttcattggccaatgccactcccgacaggctgattatcacggaagagcggattacatggcatcgcaagggggagaaaaagccctatgagatagcactggaaccgaatttcaaggagtccgctctcgcagagtgtgaggatccggttgccaaaactattttccagatgctttcttactgcaaggtatatcagtttcacgattcatcgacagaggggccgctacgtcaggcttgtcccgtcgagacggccaattacctccagtcgcacggaaacaatctgccttctttcctgctgttcctgcgggagaactacaaggatgcctacaaccggattgttgactatgtccgtgacgtagttccccagttccaggacttctatctggagcccgtgggtggtatcatttctctccggtggatagataattctgccacggactatcgtttcaatgcctaccagttctccgacggatctatccgtttcattgccctggccgccttgcttctgcagcctgcccagacaatgcccaacgtcatcattttggatgaaccggaacttggcttgcatccctatgccatcagccagctggcagaaatgattaaggatgcgtccatacacgcacaggtcattattgccacgcagagcaaggatttggtcgatcatttcgacatcggcgatatctctgtggtggaaatgaacaaggaaacgcaggcaacctctgtcactcaccttgacgccaaagaatatcatctttggcttcagaactatacggtgagcgaactttgggacaaaaacatcataggaggacgtcccgtatgaaagcgaagattattcatgtcctttgtgagggacagacggaacagggatttgtggaggaagtgttgcgtccctacctgcaagcgcaaggtgtggcaggtgtaaaaagcatcctgattaccactaacaagaaaaagaatgcccgtggtggaatgctgagctatgctcaggcggtgacagacctagaactgttgcggaaaatgaagatggacggcgaatacgaacgtcatgttttcacaacgatgttcgacctctacgcattgccggatgattttcccggttatgaagcagccaaagcaatcggtgagccttacgcccgtgtcgcagcattggaaacggcgtttgctgaagcaatcaacgatagtcgtttcattccctatattcagctgcatgaatttgaagctctgctcttttgcggtattgactatctggcaaagcgttaccccggttgtgagaaacgctgcgaacagctgaaaaaagacctggagaaaaccagcaaccccgagctgataaacaatagtccggaaacggctccgagcaaacgtattatcaaggcgatagaaggagacaaaaaacagcattacaactacaataagccggctaccggcaaagatgttaccaaaagtgtcggcatggatgaacttcgtgcccggtgcagtcacttcaatgaatggatagaaaagttgatagactgctgattctgtaatcagataatatcaaggttctgacagacaggttcgagtgtttatctcaaaaatggaagagatggggattatacagaaagagggtgtaggaagaaatactcgctatataaagactgcgagtttcccatcttttaattgagaagacaatttttgctctgtccaaaaaacaagtttttggtcaaaaaacagcacaaataactgattatcaattattctttcaatgcccgaaaatctgtttttttgtacgaaagagttctttcacttttctatccctcattccggaattccggcatttaccagatattactaattaaaaaatttagataagtaacgagatgctagatttgattagttgctcgtaaggtataaggcatcgacattcttctgttatttagtcagttgaaaaaatgtaacaattatttctctgatacctaatactttttctatttacaccatccacggattcttatacggatcataatccgtctggaaagtagccagttgccagtcggtgacaggtttcttcgagtcatcgactttgcggggaatctgcggattaagccgtagtttggcggcatcattgagccatttcatgctatcctcgtaatcgcgcatgcggacaacactgacattattcggagcaatgagtttcgtgagttcgtagatggccagccggaccatgtgcttcttgagattgtagttgcgggggtcatgcaacgagaggttctgcccgacttgcggtgtgtccgcgttcacatccgtttccgggtaaaatacccgtccgtcataaacgacatattcgtgttccgacaactcataggcattgtatgatgaatcgtaatcggctatggctccccagcagtcggaaaccatcgggtcaagattgtaatcgaaaccttcaagcgtcatcaaagtatagaatgctccttcatactcgacgactgcccacagaggatactcgacaggctgccataacgaggcttccgcctcgatccaaccgccgaccaacgggatacggacatcatcgaacttgtacccgttttcattaagacaagtataaacaatgccgttataattcactttatctcccggataataggtgttgaactgggaataatttacaacttgtcccgcatcgacacggatatcagaactctcttcccaatagacaaccgttgccggcttgcgatagccgctgacggagcgtatcacctcatggatttgtccctcgaaatagacatgcacacccacgggataggtaatccgacggtcgtattcggcgatatattttccttttgcaagttccttttcaatctcgtagttctccgacaaatattccacgatactcatctccgtcgattcttccgcctggatgaatcgtgcatcattgccccgcgtgagttgtgccagggcttccggagtaattatcccaagatagtcgtcattattgagaaaccgtctgtacatatccttgttccgttattagtatgaaaatccttcctgaattaccgatgtggataccacatacccgttcccgtcgcctccgctcttgaacttgtaccagctgtcacgcaggtagtaacagagcaggtagtcaaggcagtcggacaagtgcccgtaccgttcatatttgacaccggttttcgggtcggtggtcttctgtttgctcttggtaccgtcctcgttacgaagctggtaaatcagatcctgggtaagtttgcgacatttgatatcgatttgtatctcccagccttcatagcccccgaatacctcgttgacgaactcgcaccgtgtagcctgcggaggctgcttgcgtaatagctttaccttcggtcgcaggattcctctgccgaaagtgtccgtgatgatggtatagttgttgatgccgtcctcgttggtggtggagcgttgtaacccggaagggtcaccggtcacatccactccgccaatatgcttgtcccggtaaagttttaagcgtactttccgtgccaacgcaggtgtgttgttctccttttcctccggcttgccgagtatctcttccagtatatagaccttcctgttttcatagtctatttgtgcggagagtaccgacatttggggggcaacattgaagtcccacaccgtgatgagcggcttgatcggatcgtacgctttttctttcagtccggtaacgagatgccgggagccgtcgaaactgttataaatcgccatatcgttggcttccacgaaatcccagttgccatagagcaggcgttcttttgtcgcctggtcccggatcttgttcagggccgcctcgtacacctgacggaaagcgatattcgggttgtcaaacacggagaaaggtatatacgcttcaccctcgcggcagatgaccttgtctccgttttcgtcctgcacgaagcgggaacgcacccagttaattgtcggattggtggtgagcagcattctcggggtcttgaatgtctcatgggttctccagcggagacgggagaacagcacttcgacggcccgttccgagatttccgacacctcgtccaccatggcgatggtatattccgaagagccgaaacgctcgaagttggggtcgctggggatatccgccatctccttcatgatgatgaccgagtcattccagaatgtgagcgtgccttcgaggttgtttatcttgtagtttgtatcctctttcagtccccagtccttcagaatcgacttgatggtgttccatgtcgattcctttaacgacttgagtgtcttacgggccaccaccgcacggatattctcgaaccgaatacatgaagacaccagccaaacgctgccgatatacgattttccgccgccggccgctccgcctcccagtatcagctgcggcaggttctgcgacttgcaatgcctgcattgaggcctgtactgagggttgccttgctggtcataaccgataaggatttgctcgatctccccgccacaatggggacaatagttcggttgcaacagtttccagagttcatactgccgtggggacggtttgaactcgatgcgcaggtttctgggtggtttgagcctgttgaccgccattcgatttatataatctgaatggttatgtccctttcggactcgagcatggcatacagtttttggaatgtagtacgggattccaaaacttttcccttgaccgtattctttcccacgatgatacagccggcggaatctccctcggtgttgcctgaatggattaggatgccaaggaaatgcggtacatcgtgcagatatggcatttttttcttgtacttggggctgtactgaagggtaactttataagtcccggcaggaatggcggtcttggaatagaccttctccctgcatgtgcaggaacggccgcgaggagtatccggacaggttgccggaagtttcctcacggcatcttcgatggtgttacagaaaaatttgccgttgatggacaggtcgcctatggtataggtctgacctttgaatttgcggttgagtgtcagcttcatacttcgatactatttgtatcgaaagagtagagacggacgccggctaatgtttattatatgtgtttgtaaaaggaggatatttcaggaaatgatgtatctttgtgaccggattgacagtatttaatcaagagttaatatgacaaaagcggatatcgtcagggaaatagcaacgcagaccggtctggagaagcaggtcgtgttacaagttgtcgaaggattcatggatagcgtaaagtcttccatgataaacggcgaggaggtttatcttcgcggcttcggttcttttatcatcaaacaccgtgcggaaaagacagcacgcaacataagcaggaataccacgataatagtgcctgcccacaatatcccggcattcaaaccgtcaaaagcctttgcaggaaggatgaaatcagacaaataaggtgattatatgcaacaggagcgttattcagatgctcctgttactttatacagggcaacgaggttggcattgtccgattggaacaggaaacggccgttgcttaaaaggcattcgtggatggtgttgtcattaggatccgactccaataaagcccccgccttgttttcatcgataagaagcatttctatgccttgtacggtagcggcagttgcatcggccggaattttcaaaagttcatccatcagattcatgtcgttcataatatctccgtatttggcttgagtcccgtcaagcattcaatgtaccaagaccaaaaagcgtgggacataacccgtagcaccgaggttctggtaaacctatccgcaaacaagttaagcccacgcaaaagcataggcgaaaactgtttgtcctgcggataagtgaaatttaccagatttcggtgcatgacaaaagctaacgctttccgtattttattatgttgttctgccaatatggtttttatgccgcatctgcagaagaaccggcattatgtgataacgaccggacgtgtaaaggctatttcttggattcttccaaggaaaccttacgaaactctttcatcagtttttccaattccaacgaagtcttgcgggcacgggtacctgcggccttgttgcctttttcaatctgaagtgccgcatccgtggagaatgtagcatatacttcctgtatctttgaaaccaactctttcatat

SEQ ID NO: 87 - DNA, 12048 bp, Butyricimonas faecihominis
ggggtatagagattaacatttttaatttccaattttcaattaaacattgtttttatgggaaagattaaaaaaataggagttttaacttcaggaggcgatgctccgggaatgaatgccgcgattcgggcggttgtgagggccgctatttttaatggctgcgaggcttatggtatttacgatggatatgagggattgattgagggaaatattgtgcgtatgcattcccatgacgtgagtaatattattcaacgcggaggaactattctgaaaacagcccgtagcgaggaattccgtacgccggagggacgtacgaaagcttacgagaagatgcaggaattgggaattgatgcattggtcgtgattggtggggatggaactttttccggagcccggttgttctgtcaagagcataacgtgcatattgtcgggattcccggtacgatagataatgatctttacgggacggattacacgattggatatgacacggcggtaaacactgtggtggatgccgtggataagatccgggatacggcaagcgctcataatcgtttgttctttatcgaggttatgggacgggatgccggatttattgcgttacggtcggccgtggccacgggggccgaggctgttctggttccggaaattgagacggatttgaatgacttggatcgttacctggaacatgattataaacctcataagtcaagtggtatcgtgatcgtggcagaaggtgataaatcaggtggagcgtatacgattgccgatcagatcgctaagaaacatcccgaatatgatgtgcgagtaactgttctaggtcatatccaaagaggaggatctccttccgcttttgaccgcgtgacggctagtacgttgggagtggcggcagtggatgctttgttggatgaccagaccagtatcatggttgggattatgaataaggatattgttcatgttccttttaacaaggctattaagaattcaaaaccgttaaatcataatttgttagatattacggaagtcttgtctatttaaaatctaaaattaattcgtttgttgtacgcggatgtcattatccctctgggagtggaaagtttttttacttattcggtaccggaagaatatgaacattcggtaacggtaggtgcgctcgtggtcgtttcatttgttaagaataaacgttacacgggtgttgtctatgcgttgcatacgaatccgcctgtcggatttgaaacaaaaccgatagaacgagttatcgaggaaggatttgctctttctggttctcatttgaaatttctattgtggctcagcgagtattacatgacaccaccgggagaggttatgcgtgcagcattacctgtttcgatgcgcttggagagttacacgagtttgagcttggtgaacggctgggaagaacggttggtagatgaaagtgaattaagccgggaagagaaggagatcatgggagtatttcgagaaagaggtgagatatgtatggccgaagtcgaaaaactcttgaagagaaaggatgtctatgttgcagttcgagccttattggaaaaagaaattatcggaatcaaggagtcggtagatgatctgttcaagcctaaaattgaacgtttggtgagatggaaacgaaagttcacaagtgaggaactggacgagattcttgatagcttaaaacgggcgagggctcaatacaaaatgctgtgtgattgggtgtattatagcgacgagcatcgaatcgagggggtgcctagaacggagtttattcagaaaatcggtagttcagcctcagccttgaaaggattgtgtgaacggggcgtgttggaaattgttgtgcaggaagtcagccgtttagaggtatctaaagaggaagtggaaaatgtacacgctttgtcgggggcgcaagaaaaggtttttggcgacattcaagggtattacaaggagaaggattgtgtcttgttgcagggcgtaacttcttcgggtaagactgaaatatatattcatctgatacaagagacgctaaggcaaggaaaacaggtgttgtacttgttgccggaaattgcgttaacggtacagatcgtgaaacgcctgcgacgggtcttcggggatcaagtcggcgtttatcattcgggcatggcagatagtacccgggcggagatgtggcgtaaacaaaatggtacgaatccttatcccgtggtgttgggtgtgcggtcatccgtgttcttgccttataaacaattgggtttggttattgttgacgaggagcatgaaagttcttacaagcaaaaagaaccggcaccccgctataacggtcgtgatgccgctataatgcttggaaagatgagtggggcaaaaatattgttaggttctgcaacaccttcttttgaaagttatcagaatgccctaagtgggaaatatggtttcgtgcaactgacaacccgttacggggaagtaatgatgccggaactgttgttcgtggatatgaaggagtatcgtcgtaaaaagatgatgaaagggagttttactccggttttgtacgagggaatgaaacgggtgttggagagcgggatgcaggtgattttattccagaatagacggggatattcgacttatttacaatgtgatcgttgtggttccatcctgaaatgtaaacattgcgatgtgagtatgacttattatcgctaccggaacacgttgaattgtcattattgcgggagcctgcgggctgttccggccgtgtgtcaggagtgtgggcagggacattacgtgaatcgtactccgggaacggaacggatcgaggaagacgtgaaacagtattttccggaggcccggattgcccgaatggacttggatgtgataagtaataaggcaaagttcagggctttaatcgatgattttgaaagtggaaatttggatgtgctgatcggcacacagatggtttcgaaagggttggattttgaacgggtgaaacttgtcggggtgatggatgccgatagtctgatgggatttcccgatttccgggcagaggagcgagcttatgatatgttgatgcaagtgagtggacgcagtggacgaaaaggtgagcgcggaaaggtggtaattcaggtaacagatatgcaaagtcgagtgtatcagttggtgaggaaggaaaactatagagagttttacactcagttatcccaagaacgggaaatgtttaactatccccccttttcccggttgattcaggtagagttgaggcatgtggatgaggtggttttgagaaatgccgcgaacgagttagctaggttgctgcgggaacggttggaacgtagggtatgcggcccggcagaaccggatgtgtcccgggttagaaaaatgtatcggatacaaattctgataaaggcggaacaaggtctttccctgtcaaaattgaaagctttcttaaagcagaaaagtgatgaattggtgaaaactcctattggtaggggagtgcgtatttatttcgatgtagacccgttataattggggtgtattttgtcgctagtatcggacgttgagcatgatttatttcttatctttgtttggaacgaaggccgttccgactgtttcgtcgaaaaatagtataggttattgttaagtcgtaaaaccttgatttttgcttactttttgagagtggtctgttaacaagtgtgtcatgagaaaaggtgaaatgttaaaaaatagaccatatattagtaatgttctgcattttaagaggagattagaaattatttgggaaaaccttaaaatttgttttaacattatttagtgtctttgattttaacatttggcggaataatctctatttttggaaaaacagaaaacggtgaagatatagattctctttttgaggagattgaaaccgaagtggaatatttacgttagacaaagtagtaatataaatcaatataaaaatcgatgatatgaatacggttgatatcaaagcattgaatgagcgcatacagcaagagagttcttttgtggatatgattagtatggagatgaacaaagtgatcgtcggacagaaacatctggtagaaggactgatgatcggtatgctttctaatggacatattttgttggagggagttcccggtttggcgaagaccttggcgataaatacgctggcacacattattaatgctaaattcagtcgaatccagtttaccccggatttgttaccggctgacgttgtcggtacgatgatttattctcagaaaagagaagagttcgtggtgaagaaaggaccgattttcgctaactttattctggcggatgagattaaccgggccccggcgaaagtgcaatcggctttgttggaggcgatgcaggagcgtcaggtgactatcggggatatgacttacaagttggaagaaccattcttggtaatggcaacccagaatccgatcgagcaggaaggtacttatcctcttcccgaagctcaggttgaccgtttcatgttgaaagtggttattgattacccgaaaaaagacgaagaaaaattgatcgttcgtcagaatttggagaaaatttatccccagtctaacacgatcctacaaccggaagatattctgcgggctcgtgaggtagtgaaggaggtttacttggacgagaagatcgagaaatatattgttgacatcgtgtttgcaacacgttacccgcaagagcatggcttggaaaaattcgtttccatgattgcttacggggcatctcctcgtgctagtatcagtttggccaaagcagcacaagcgtacgctttcattaaacgtcgcggatatgtaatcccggaagatgttcgtgctgtttgtcatgacgttctgcgtcatcgtatcggtttgagctacgaggctgaagcgaataacttgaccagcgaggatattatcagtgaaattttgaacacggtagaggtaccttagtgattgaagaccgattaatttacgatttgtgaaaaccgatttacgattaaaaaagcattgatttgcggttggagatcataaatctaaaatcataaattaagggggctggaatttaaaatctaaaattcttaaatctaaaattaactaaggtggagacttcagatttattaaaacgtgtcaggcagatagagataaagactcgggggttatcgagtaatatcttcgccggggagtatcacacggcttttaaaggtcggggaatgacgtttagcgaggtgcgggcctatcaatacggggatgacatccgaagtattgactggaacgtgaccgctcgttataaccatccttacgtgaagatattcgaggaggaacgtgagttgaccgtgatgttgttgattgatgtgagtgcctcgcgtaatttcggtacagtgtcgaaactgaaaaagaatcagattactgagattgcggccgtgttggctttctctgccattcagaacaacgataagattggcgtgatcttcttttctgaccggatcgagaaatttattccgccgaagaaaggacggacgcatattttgcatatcatccgggaactagtggatttttatccggaacacaaggaaacgaatatctctgtggcgttgcaatatctgacaaacgctatcaagaaacggtgtacttgtttcctgatttccgatttcatggatgatcacgatttcgaacacccgttgattattgccaataagaaacatgacgtggtggctttgcaattgtacgatcgtagagagaaaatattgcctcctgtcgggttgatgtacttgacggatgcggagacgggggaaagtgtttgggtggatacatccgacaagaaagtccgggacgagttcgaagcgtatggcatcgaacgagacaaggaactggatcggatattcaaacatgccggtgtcgacatggcttctatcagcgctgatgaagattacgtgaggtcattgatcacgttattcaagagaagaggggctggatattaattgaacattgaaaatggagaattaaaatgaaaaatagaattattctattcgtaattatcctactaggttgtgtcagtgctttgaaagcacaaaatcgggaatatagtgccgagattgacacaaactatatcatgatcggggatcagattcatttccggatgaaagtgaaggctgaaccgggtgtgaaagtggcattccctcaattgaaggacacgatagcacaaggaatcgagattatatccggaccagttcgtgattctatcgtggaaaaggacgggcgggtactcgtgcaggaaagttacgtgataacttcttttgattcgggcgtgttcgtgatcccaccaatgcccatcgagattcaacaggaaagttataataacacgctcaggaccgatccgttgcacttgatcgtgaatacttttgtggtcgatcagcagaaaggaaattacgatattgtgatgcctttggctgccccgtggacatttgccgagatattaccttacttgttatggacattgttgggaatcgtggtgattcttctggttgtctggattatcaaagttcggaaatcccgtaagagtcttttccatcacgaaaaaccggcaattcctccgtacgtgttggccatgaaggctctggaggagatcaagaaggagaagttatggcagagtggaaagaccaaagagtattacacgcaattaactgacacgatccggaattatttggatggagaattgggtatctcagcgatggaacagacttcttttgagactttgaaggctttggagaaatgtgagcaggtagatgcaaaacaacgggataagttggctgatatgtttgaaacggctgatttcgtgaagtttgctaaagcggagccgttgcaggatgagaacgtacgaaatttggatattgcctatgattttgtacaggaaactaatgatacaattcgagccgagcatgagaaagaacgtctggagcaggagttgaaagagcaacaggagagggaggcgagagagaaggcggaaaaggaagggaaggaaaacggagaggagaaagataacgaaaattaatttatgatttatgatttatgatttatgattcgtttgcaatcaaaaccttaaatcaagaaataaaataggatctaaaatagaagatatgtttggatatgaatttgcaaatcccgagtacttttggttgttgttggtgctgataccaatgattatctggtacatattcaaggagaaacgctcgcatgctgatttgaagttttcttcaatccgggtgttcaagcaaatgaaacggggtagccggatctggttacgtcatttgctgtttgcagctcgggttttggccattctatttttggttctggcattggctagaccgcaatccagcacgagttggcagacctataacagcgagggtattgatattatgctggcattggatatttccggtagtatgttggcacgagattttactcctgatcgactggaggcagccaaggaggttgcaacgaagtttatattggaacgtcctcaggatcgtatcggactggttgtttttagcggggaaagtttcacgcaaagtcctttgacaacggatcaagccgtgttagtcaacgtgatgaaggatattcatagcgggatgattgaagatggaacagctattggcctcgggttggcaaatgcggtaaatcgtttgaaggacagcaaggcgaaatccaaggtgatcatccttttgacggatggagtcaacaaccggggagcgattgcaccgataacggcagcagaattggcaaaaacttttggaatccgggtatacacgatcggtgtcgggactttgggcgaggctccttatcccgtgcagacgccctttgggatgcaattacagcgaatgccggttgagatagatgaagatatattgacccagattgctgacatgacaggcggtaaatatttccgggcaacagataacaaaaaactggagcaaatttatcaggagattgatcaattggagaagagtaaggtagaagtcaaacatttcagtcgtaagaacgagcagtatttctattttgctttgatcggagctttgttattaattgtggaggcgttagggcgatacacgttgttgaggaaaattccataattgtaagttttaaatcttagattgtgaattgatgcaatccggaatttaaaatctagaatcattaaatttaaaattgaaagggttatgtttagatttgcacatcctgaattattatacttgctgattatcataccattgttgattgttttttacgtggtagcaaggattcggaagaaaaaagcgattgctgaattcgggagtcccgaattattgtcaacactgatgcctttgcaatcttataagcgggagacattaaaatttatacttgttctgatagcgttgtttttcgtcattcttggggttgcaggtcctcagttcgggtcaaaattgcaacaggtaaaaaaagagggtgtggagttgattatcgcattggatgtgtcaaattccatgatggcgcaggatataaagcccagtcggttggatgcggcgaagcaagccatttcccggatggtggaaaaattaagtgatgataaagtgggattgatcgtgtttgcaggagatgcttacgtgcaattgccgatcacgacggattattcttcggctaaattattcctatcgggaatcaataccgatattgtcccgatacagggtacggcgataggaacggcaatagatttggccgcgaagtcgtttaccccggacacggaggcatcaaaagcgattatcgtgatcacggatggtgaaaaccatcaggacgatgcgattgccgcggctaaagctgcccgggaaaaaggtatctacgtacacacgatcgggatgggattggcacaaggaggaccgatcccggagaagggaaatcccggacaatacatgagagacgggagtggtaacccgattatatccaagttggacgaggagacattgaaagagattgccaaggccggagagggaatattcgtgcgggcaagtaattcgaacgtgggattaaacaccttgttggacgagattgatcgtatggacaagacattgttggaagaacgggtattcagtgattatgctgaaaaataccagtatttcctgatcatggcattgatattcgtgttgctggatttcattgtattgggacgtaaaaacaagaatttcttgaagatcaatatatttggaagtgagacgaaaagtgttgaaacgaatcggtaaattttaaacgagacattatggtgaagatattgataacgatgatagcagctgtagttataagtttaccatcggctgcgcaacaggaacgaaagtttatccggggtgggaatgatctgtttaataaacaggattttgagaaggctgaagtggagtatcgtaaggctttggatacggaagtgaaatcatacgagggtgcgtttaatctgggagatgcgctttataaacagaaaaagtttgacgaggcattacaacaattccaatcgttggcacagaatgagaaagacaaggaaaagttaggagagttgtatcacaacatcggaaatactcttttggccatgaacaagttggatgagagtatcgaggcttacaaacagtcgttgagaaaccgtccgaattcccaagagacaaagtataatctagaatttgcccgcaagcagaaacaggatcaacaaaatcaagatcaaaatcaagatcaaaataaggaccagaataaggaccagaataaggaccagcaggatcaaaataaagatcaacagaatcaagatcagaataaggacgagaataaagatcaaaacaaggaccagcaagatcagaataaggatcaacaagataaagataaacaggatcaagatcagaaagatcaacaaaataaagaccagcaaaacaaggatcagcagaataaggatcaacaacagcaggaccaacaggcccagcctaaaatctctaaagaggatgccaaacgcttgttagaggctttggaggcagatgaaaagaaaacacaggaaaaggtacagaaagataaagttcaagctcaaaagacaaagaagatgaagattgagaaaaactggtaactttgtacgtttttccatagagataataaagaattaaaagataaacaaatgaagtcattcattatcatattgctattatgcgttattggtgggtctaagttatttgcccaaaagacagaatttatcgcgtccgcaccttccgttgtggaagtcggggagcaattccgtctttccttcgtgttgaacaacaagggggagaacttacaggttcccacgataaaagggtttgatttactggcaggaccgtcattgagtacgtcttctaacatcacgattatcaatggtgatatgaaacaaaatcaagagtacacgtacacttatattttggaaggacaggaagaaggagagtttacgatcgagccggccacgatcaccgtggatggtaaagagtataagtcccagcccttgaagataaaagtgattaaaggttccgggaaacctcgaaataatgcccaaagttccggggatgtttctgagaaccggggaagtacttcgattacggatgatgatttgttcctgcgaatggacgtgagccgcaacacgctttacgtgggtgagagtttgactgccacgttgaaagtatatgcccgggtaaatctggttgatgtgcaggggaaaaagatcccgccttttgacgggttcctgacagaagacgtgaagattccccagattcatttggaacgtgaggaatataacgggaaaatatatgatcgggtaggcgtgttacaaaaaacgattcttttcccgcaacatgccggaacgttgacgatcgagccttacgagttgtattgtcttgtccgccaacgggtggggagtcgtggtggaagtatctttgatgactttttcgggaattcccgtgatgtccgggtactctgcaagagcaaacccgtgaaaattaccgtgaaacctttaccagaggccggaaagcctttaggatttagcggtatggtgggaactcttgccatgacaacctctatgtcaacagataccttgaaagcgaatgacgcgttgacgtacaaggtggtgttacgcgggaatggaaacatgaaattgttagaggctccgaaaatcactttcccgcatgattttgacgtgtacgatccgaaagtgactagagatataagcggaacgtccggaactgttacttttgaatatctcgtgattcctcgttacgcgggggattacaagattccagccgtgcaatactcctattttgacccgcaagccggggcttataagatgttgaagggaaaggagtattctgttcgggttgaaaagggaaatgaatccagtcaaggatccggggaggcagccttacagtcgttcaagaaagaagatgtcaggatgttgggacaggatattcgttatatcaaaactcacaagaacgatctccgtccgaaaggcgtgttgtatttcgccacgatggaatactggttgagtttcttgattccttttgtacttttcgtggtcggaatgattcttaatcgtcgccggattaaggcgaatgccgatttggtacgggtgaagagtaaaacggcgaacaaaatggctcagaaacgtttacgggcagcctctgtcgcaatgaaagccggaaactctgagctattctatcaagagacattgaacgctttgtggggatatgttagttataaattaaacatagccgcatcagaattgaatcgggataatatcagtgatcacctgactcgtcggggggcagatgcgacgttaattcagagctttatcgaggtgctcgatcattgcgagtacgctcgttatgccccgggtgctaatcaaggcgaagagatggatagcgtgtacaaggatagtatatccattatcacgaaattggataaagcgatatgaaagctaaaagttagaagctaaaaactaaggttaaaaactaaaagttgaaaagaatgaaaaggatatatataatat

SEQ ID NO: 88 - DNA, 11922 bp, Butyricimonas faecihominis
gatattatattagcgggtgtaggtggacagggaatcctttctatcgcagcagcattggggtctgccgccctcaacaataacctgtacatgaaacaagccgagactcacggaatgagtcaacgcgggggggatgtacagtctttcatgagaatctccgacaaaccgattttctctgacctgatcgccaaaggaacagccgatattatcctttcagttgaaccgatggaagcattacgttaccttccctacttgaaacaaggaggttacgtggtaaccaacgccactccgttcattaatattccgaactatccggaagtagaaaccttgatggacacgttgaaagcccttcctcatcaagtaatcattgacgctgacagcatcgctaaagaggctgcaggcaacgtacgtgccagcaacttcgtgatgatgggtgccggttctcctttcatcgaaattccttttgaatacttagaaaaaggcatcatggctattttcgaacgtaaaggtgccgatgtggtagaaatgaacttgaaggcattacgtgccggacgtgaattcgcacaaaattacattaaataatcggatctgggggagtctcctttattaaggagttcccctatttttcttctcatactttcctcgcaatattaattctcggatattttatccaaaataatccataaaatgcaaacaaaaaagaagctttaagcgtttaatttataattaaacttttaaaattaaggctatgaccgaggattatgaattaaaagatgacgtacatcggcaacaatacgaatttcgtatcgggaactatacaccgaaaatcgaatatataaaatcaatcaacggagagatataccttacccacacagaagttccacgagaactggaagggaaagggataggcagtcaactagttgaaaaaacactacaagacatcgaacgtcaaggacttcgactcgttccgctttgtcctttcgtggcagcttatatcaagaaacaccccgaatggagacgcatcgtgatgaaaggcattaatataaaataaccacacatggataagaaaattgaatatacaaacggagagctaaccattatctggcaaccgggtttatgccaacacgccggagtatgcgtgaaaatgttacccaaggtatacaatcctaaagaaagaccttgggtcaaaatcgagaacgccacaacggcagaattaatcgaacaaattaacaaatgtccctctagagcattgagttacagaatgaataagtagtgaaagtcgccgaattcggcgacttttattttttccttttccacaaatagcaaacaataaatatcaacaagaaacaaagcacgatagttgcccccgaaggtaatttcagtgctgccgaagtaaacaagccgataaccgaaccggcacaactgataatcgttgcccacacgagctgtttcgtgaaattcttatgaaacatcccggcaatagcctgtggcatggtgaggtacgaaatcacgagaatgattcccgctagtttcatacacaacacgatacacaaagcgatcaatgccgtaattccgatttccagaccattcaacgcgacgaaatgtgtccggctgtattctttatcaaaagcgatataaaataaaggacgataaaatttagcaaagaacacgatgatcaccaaacacaacaaaagcgagagaataacctgttcccccgtcaccgtgaggatattaccaaacaggtaagataacaaattaggagcataccccggtgtcagataaataaacaacaccccgatggccatacccgcagaccagaatatcccgatcagggaatcttccttaaatcgcttgttatccgaaagatatagaatacaaaaagcggcagccaaagcaaatacagccgccccgaaaagaggcgatagtcctaggaaataggctaatcccaatcccccgaaagaagcgtgtgtaattcccccactaataaagaccatccgtttcgccacgatataagtcccaatcaatccacaactcacacctatcagaatcgtacacaacagtgcattctggaaaaaagtatattctaataattcaaacaccttattaattttagatttaatgattttagattgaaaaaacaatcaatctagtgcttcactttcaattttcaattctccattttcaattgtacgatcgtgtttcaacaacacccgatgaggcaccgtaccgtgagagatcaattcaatcggacaattatacaatttcaattgttccggcgtgatcagatttgattcatggtaatgcaagccaccattcacgcaggctatcgtcttcacataagagcaaatcgttcccaaatcatgagaaaccatcacgatactcatcgtcttattcaactcgcccagcacggaataaaactcattctcgaaattcgcatccacgtaagtcgaaggttcatccaaaatcagaatcttcggggaagaaataatagcccgacacaagaacacccgttgcatctgtcccccggaaagctctcctatcggacgattcccgaatcctcccatcccgtatgtttctaaaagctcatccaccttttcccgatcagccttcgtgtagtccttaaaaatccccttctccgacatcaaaccggacaagacgacctcttttacactaatcggaaatctcgcatcaaaacgactgttctgaggcaaataaccaaacaaagattgtttggaaacatgataaacaatttcaccagagaaaggtttcagcaatcccaaaatcaccttcaataaagttgttttccctcccccgttcggtccgatgatcccgataaaatcatgttcccgaatggaaagattcacatcccgcaacacgaccgtatgctcgtatccggccgtaatcccttttaactccagaagttcattcatccttctatttcattttctgttcaatgatcttcaataaagaacacatttcggctttccaatccgaactcagcgggtctatggcaatcacctcaccatctatctccttggcaatagccttagcattagccacgtcaaattgattctgaatgaaaacaatctttattcctctagcccgacaagtatcaatcaccgctttcaaatgagaaggattcggttcctttccctcatcttcaatagagatttgttccatcccgtaatccttggcaaaataagtcagcgccggatgataaatcaaaaaagttttattctctttttccgggataatccgacgggcagcctgatcaatactgtctatctctacacgaaactggcgatagttcttttcaaacgtctcccgctgatcggggaacttagccgccaacacatccaatatcgtgcgagccatcatctctgcataccggggagacatccacacgtgaggatcaaaattcccttcatgcgaaccatgatcgtgctgatgcccatgtccatggtcatgattacaagctccttgttccaaatccatcccgacagattgcttcacgagcaacatatttttctgcgtttccagaaaaggatacagattactcaactcgaaaggcagatatcccaccgcaaaataaatggaactattgtgcaaagccttcaattgctccgtactcaaatcactcaccgcgggattcgcccccggtgggatcatcacgttcaccttcacgtaatcccccgcaattctctccacgaaataacgctgtggcaaaatactcacgctaatcgttctctccttgtctttattctccccacaagccgttaacaaggccatcaaaacaactataattcctattttcattatattggatatatcaaattcttctcctcgatcacgtctaacacttcggaaagatattttgcagcctcgtattttgccatgggtaaattgtgcaacaaataattaccgcaatctttagcggcaacaccggggacttctccctcgaaatcccggataaaacggaaggtttcccgcattagctccacgatgtcacgggactccaagtcgcctttcatcaaaaagtaatttcccgtacagcatcccattggtccccaaaacacgatcttgtcaccccactccttatgattgcgcaaataagtcgctgccagatgctctatcgtatgtaactccccctgtcccaacacgggttcccggttcggttccttcatgcgtatatcaaacgtcgtgaccacctgatcacctaaatagtctttacgggaaacataaattcccctcaacaaacgcaggtgatcaatcgtaaaactcggtattttttccatgctttaaattttattcttctgataaggctttgatcaacactttaatcatttcaaaagaacgtttaggtgcctcttcccaaaaattcaaatattgtttgtaatgatcttttaccccgggagtatcactgataatacgatagctcaagaatggaaccccgcacatatagcaaacctgtgcaatggcacacgattccatgtctaccgccattccttccggaaaacgttttttgatctccgtcaactcctctttatcggtaataaacttatccccgctacatatcatacctccgtaaacattaccatcatgagcaacagataatgccaatttacacagctccttatccgaaacgaaacgagccggcagaccttgcacctgaccatattcatttccatccccacaccacacgtcatgataaaccatattctcgcccacgacaatatccatcacttgggtcaaaggatctatccctcccgcaactccggtattgacaataatatccggtgcataacgctgtatcatttccatcgtaccgacggctgcacacacctttccaatgccgcacttagccaaaacaacttccacgtctccgatgtgtccttccgtgaaaagaagcccgcgaacaggttcttcttttgtctgttccaataatgatttcaccagtccatattcggatgtcatggccacaattattccgatccttctcatataactctattgaaaaaatggattcattcttttttcttccccgatcgtcgagaatcctccatgtccgggaataacacgaacatcatcgggtaatacaaacaatttttcccggataccattcaacaactgattcatatccccgcccggcaaatcagcccggccgatactcccctgaaacaaaacatccccggcaatcagtaatctatccttttcactataaaagcaaagccctcccggagagtgtcccggtacatgtatcaccttcaattccgaatgaccgaacttcacgacatccccatctttcaggtattcccccaaagccggtggcggggtaattcctttcacacctaacatagccgcatacctttcggcatcctctacccaaaacgaatccgcctcatgcgcccgggctgatagcccaaactcatccagcatgaaattattcccgaaaatatgatcgatatgcaaatgtgtatttaacaatgctaccggtgtcaactgattctccgctaaaaaactcttcaaacgttgtccttcttctttcgaaaaacaaccgcaatcaatcaccacggcttcccctgtctcgtcatacaacacgatcgtgttctcctgccatggattatttgtaaatactttaattttcatctgatatgaattttaaccccacaaatatactaaaaaaagaagtggatcaaaaaggcttttgatccacttcttttttataaagtttgtaaacaaatcgtcagattttcagcgtatcgaatccccgaccataaacccccataacagtgttcatcgtcaagaacgcatccggatctgccatcttcgttacacgcataatattttgcatctcgctcttacgggcaaccacgatcaacatcttacgcgcctctcccgtataccatccctgacaatccaccacggtaacaccgcgtcgtaaatcccgggtaatggaattcgccacatcctcgtatttttgagaaaatataaggaattgtaccgattgcatctgtccagtaaataccaaatcaatcgtgtaggagttaacccccatcaccacgtaaccatagataatagtggctatttttgccgtgggatctatcgccgtatcctccccgataaaataactacacccgatgataaacacatcgatgtacatgataattttacccggactgatattacggtacttattgataatcatggcaacaatgtccgtaccggccgtacttcccccgtttaccagagaaataccgatacccgcaccacacatgataccggaaatcacagcacacatgaatttatcttccagcagaggttcgtgtatcaggttctgaaacacactcaacaggaaagaactcatgaaaatagcataaatcgtcttaaacccgaaacgaggtcccagaatcttgatagcaattgccaccaacaaaaagttgatcacgaaataactatacccgatcgggatcacctctccggaaaggaaataaataattgttgaaataccggtcactccaccaccgaccatacgatgcggagccaaaaatgccgtcacggcaaacgtgtatatcaacaaaccgaacgtgatcaacagatacgcccggatttcactcatcaacttctcctttgtaactttcatcacattaattattttgttttgcccacgtatccttcaaaccaacagtccggttaaacaccagcgctcccggcttggaatctttatccacgcagaaatatcccagacgttggaactggaaacggtcaccttctttcgcctccttcaaactcggctccaacttacatcccgtcaaaactttcaatgagttttcattcaaaaattccttgaaatcaatatctttatgtccggcaggatccggatctttaaacaatcgatcatacaaacgcacttccgcctcgatagcatccggagctgacacccaatgcaaagtacctttcaccttccggttacttgccgatccggtaccgctacgggtatccgcatcatacgtacaatgaattgtcgtgatatttccctccgcatccttctccacgctctcacacttcacgatataagcccctttcaagcgcacttcgttacccaaagtcatccggaagaatttcttcggagcatcctccatgaaatcatcccgttcgatatatagttcacgagagaaaggaaccattctcgttccggccgtttcgtcttccggattgttctcgatctccacggtctccgtttgtccttccgggtaattatcaatcaccacccgaaccgggtccaacacggccatcacgcggggagcgatcttattcaaatgctcccgaacacagaattccaataaagccatatccaccacgatctcccgacgggcaacacccaccttttctgcgaaattacggatagattcaggagtatatccggcacgtctcaacccggtaatcgtcggcatacggggatcatcccaaccggccacgattcctttttgcacgagctccagcaaacgacgtttactcatcaccgtgtaactcaaattacgacgggcaaattcaatctgacggggacgatactccgtgtcaatcaactgatccaagaaccagttgtacaaaggacggtgaacttcaaattccaacgtacagatagaatgcgtaataccttccagataatcgctctgaccatgcgtgaaatcatacatcgggtaaatacaccatttatccccggttctgtgatgagccacgtgcataatacggtacatgatcgggtcacgcatcaacatattagaagatgccatatctatttttgcccgcagaactttctctccggcttggaactcaccgcttttcatccggcggaataaatccaagttctcttccggcgtccgatcccggtaagggctattcactccgggttccgtgggagtcatacgttgagcgctgatcacctctgccggctgatcgtccacgtaagccttcccctccagaatcaatttttcagcccaatcatataactgttgaaaataatcagatgcgaaatgcggttctccttcccattggaaacctaaccactgaatatcttgttgtatggaatcaatatattcgacatcctctttcgagggattagtgtcatcaaaacgcaggttacattttccatggtattcggttgccaatccgaagttcaagcatatagaagttgcatgcccgatatgcaggtacccgttcggttccggcggaaagcgagtatgtacccgaccgccattctttccctcggccaactcctcttcaataatctgttcgatgaagtttaatgatttaccttcaccttcttcttccacgagatgatttttatccatactaaaattattataacatattcgacgcgaaggtaattaatttatgagagttttaaaagtttctgtatatttgcaggccatgaaaaatatattttataccataatatgctgtctgatttcactcacgtcattagcccagagtgattttggctacgggaatccggatggaatggatccccaagacgaaggaatgcaacgcgattccacgaaagaacaacgttacgttccgcattatcggctaacttggaaatgggtacatgacggggtatatcagaaattttaccagcttgacacacttcaagacggtttacaaaacacgaacttgatattcaagcacagtgtttccaatacatatttgggaaacttcccggctccttatgtatcagacatctatatcctgcgtccgcaaggagaagacttcctgccgcaagaccggctaagagattatttcttcaaaccggaagatgcattggaatataacaccacgacccctttcacccaattaagctatttcaacggtggcggccggggaaaaacggaagactggctggatgtatggcacgtccagaatatccgcccctattggaatgccggattccggtataacctcatttcatcggacggagcctattcttaccagaaatcaaaaacatacaatttctcattcttcagttcgtacgaaaaagaccgcatggccgtatccatgtttatcaaccagaatatggcacatatcaccgaaaatggtggtatcgaaaacctagcggatattcgggacacctcgcttgaccccaaagttgtcggtacacgccttgccatggagccaaaaaacaacctcatgaatttcaatttcaaaactctggcacaatacaacatcggtaatcccaaagagatcatcacgcaaaaagactcggtgacactcgataccacgatcacctatcccatgaaattcgctttagcctttaaagttgaagataaccgttattcgttcaaagaggaaagcgttgagcaaggatttttctctgacacgacctatatcagcacccaatcaaactccgacttgatcaaaaatcggaaatacgaggtggatgccaaatttattttgaacgaacaccccaaatataaatacctgccgggagtatatgccgggctaaaattcaagtacctgagttacgatcaacgtgtttcgctggacacggttaacaacatgggaactagcaaatataccgggacttacttgacagccgggaccttcaatatggatagtaccaccatgtttaatttcgacatttggggaagtttctgtctcgccggcgagtactctgccgactattcgctagagggggagattatccaatatttgaacaaagggaggaactcttctgtcaccgtccatgccttattggaaacccaaaccccgaatcgctactacctccagtaccaaggaaatcacaaccaatgggagaatagttttgacaagatacacgcctataatttacgaggccattatacgaacaaacgtcttcggacagaaatcggggtagccctcaacaacacgaaaaactacatctattttgacaccaccgccatgccccgtcaatacaatagtaatattatggtattcacggcatgggcaaaacagatattccggttagggcatttctatttcgaccaaaaagtatattaccaagtgaccaacaaggaggaaatattaccattaccccaagtggcactttactcgcacaattactatcagaaccgctttttcaaaaaagctttaggtttccagatcggtatagatttgttctacaacacctcgttctacgctaatgcgtacgacccggcaatcatgcaattctataaccaagagatcgagaaaaccggtaactacccgaaaatggatgtattcgtcacgttgaatattaaacgagccgacctgttcgttaaatatgaacacttcaacgagttcttcggaagtcgagattatttctcggcatatacctatcccatcaacccggcaaaggtgaaattcggtatccgatggaacttctttgactagcgtggaaaaacggacaaatccttttgtcaataacacccgtagaatccataaactttatggaccttatggactttataaacttcactaatttggtagtttacaacattttccgtatttttgcggtatgtatataataaaaactattacgtacacgctgttgttcttatcctgtttcgcctcgtgcaaaacaaagcaagaagaactaccactagtcataccagaacccggaacgctggaaaaaatagagcaacgcggggtattaaatgtatgtagctattacaacacgacagactactacgtgtataaaggtattcccaaaggatttcactacgaattggtaaaagatttcgctgattatctgggagtgaagctaaatatcgaaataaacacgaatattgacgaaagcattcaaaaactgaatgaaggccaatatgacttgatcgccatgagcctctctgtcacggattcccgaaaagaagacgtgcaattcagccttcccctgtttacgaccagtcaagtactcgttcaacacacgtcggacacgcttctccaatcggtagatgacctcaagggtaaagaaatatttttacaggaaggcacctctttcacccgattcctgcaacatttaaacgattccttacaattaaatctgaaaatcaccgaactggaagatgtcacgttcgaagacattctactaaaaatagaaaacggggaaattccttacacggtcatcgataaaaatattgcccagattgcctcccagtacatgaagcatattgattactctcttcagctatcctccgagaaccccgtggcttgggccgtcacgaagaaggctactctattggatgaagaaatcaatgcttggctgggcgccattaaaaagagcgggaaactaaatgtcctgtataaccgttattacaaaaacagttacatcacgtcactgcacaactccaaatactacaaactgaaaaatggagttatctccagttttgacccgatcattaaaaaagaggctcgggcaatcggttgggactggcgcctgttggcagccgttatctaccaagaatccggtttcgacccggaagccacttcccaccttggggctgtcggcctgatgcaagttatgccggagacctccctgcaactcggattcgaggaatacgaagaacccaaagacaacattcacgtcggggcgtactatctaaaatatctagaaaacaaattcaacaagttcgacctcgacacgctggaacaaatcaagttcactctggctgcttataatgcaggtctgggacacgtactcgatgccatccggttagccgaatcatacgggaaaaacccaaaagtatgggacaacaacgtggattatttcatcctccacaaatcccaaccggagatataccgggattctgtcgtccgcttcggctattgtgacgggaaacaaacattcaacttcgtcaacaatattatggaaaactatactcattataaaaacacaatcaaaaaataatcttaaat

SEQ ID NO: 89 - DNA, 11890 bp, Butyricimonas faecihominis
gatatatacttctcatattcattaaaaattaagtgttaaacctaaagtccatttccgaggtaaagggtattctccaccttggtccaatcccgtgtatacgttaattacttccggattttcgccagagtaattagaccagtaaaacaaattctcgcctgtagcaaagaatctcacacctttaaaaccaatcttagctgcaattacctttggcaaatcatatcccaacgtgatttgtttcaaactcatagaatttaccttctcaatattcgaatcaaataaataatccacgcttgttcctatccttggcaaattggcatcacacccgggtgctgtccaaaaacgatatttccgataatcaaacattttaggtcccggagaatttaatgacatgattcggccatttaaaattttccttcccaaagtataaacaaacaatagatttaactcaaaacctttccattttaactcatgcacccaaccaccatgagctaacggcaatgcagagcccgcaaaatatttatcatctgtccatatttggttatctccgttcaaatccttcaagttataataacccacgtatccacttattcctctatccgtagcaactcctcccataaaaacctcggctccgtttgccgtatagtatcttgggatttcatcctcagactcataaaagccatcagaagcgtacacgtaaattccattcaccggacgcccaatgatatggtcggccaaatctttattattattcgttttttccaaacgattccagttacgtgcgatattaaatttcgtacgccaactcaccttactctcgcgcaaaatatcacctgtcaattccaattcaataccttcattggaaatttccatacaattttcagtacgacgcgggaacgggtacatttgtccagcagaaggcaaaccaatattataaatcaagccacttgtgtatttatagtaataatctaatttgaaattcagacggtaattaaacatatccatatccaaaccaatatcgtattgttctgtcttctcccaagtcaaattaggagaaatcggggtattggttgaaaccgctgcattcccgttaaacccgttcttggaaacctgcatcaaaccatgagcaagataagcatctgtaaatatctgcccggaagtaccgtaacttgcccggagttttccccagttcaaccaattggcccatttcataaaaggttcttccgaaaaagcccatcccacggcaacagatgggaaatttgcccaacggtttccttctccgaaagtggagcttccatccctacggaatgtggtctcgaacaaataacgttgtttgaaattataccccaaacgtccgaaataactaaccatgatcttttcactaaaatctgaactgtaagtagtagtcgaaacccactgttcgttaccatttttcccatgatccacaatagaaggtgccttacccggatcataatagtacacgttatcactagccccattcttcccgtaacctcctatataaaaatattgatctttcgtaatattcaaacccaataaaacattaaacttatgcttctcctttatagtcaggtcatattccaataattcatctgtcgaaagagctattgtacgactaattgctccctcggatttattttcatgatatttctcgtccatcgtacttggtgtgaataaattcttatttccctgtgaaaaatcaataccggcagaagcagaaaaagacaaccccttcaatatttcatatcttccaaaaacactaaccatggcacgatagtcatccgtccgatctcgtaaatcatgtacacgttgtaacatttcctcttccaactcttttgttccggcgatatacgtcggttgacttttaggatcaacagacattttttcgtaccgactcttatccatcacatttttcacggctttattcatcgttctgtctacatacgacaaataaattcgagtatctaacttaatctttttagttaactgggccgttaaatttgaaatcaaattagcacgagaatacccgctgttaaccataatccccttctcgtcataataacctatacccaccatatattggaacttatccgatcctccagatgcttgaatatttgcattcaatactttaccagttcgaaaagcatatttataccaatttgtttcactattataataaggatccaaactatcttgaagtttataattcaaataaacatcactttccctacctgatccccaaaatgaatcataagctccattcgtattccacacatcttcataagatgtcgggtaatgttgtttatacacgtcaaaatcagaatagtcacttatattacctctataatttcgagccatcaagagatccaaccaacgttccatccgtcctcccgtttgcacgggatactccatcagttgggccaaggtataagaaacattagccgaaaaaaccgccttaccttctttccccttttttgtcgtgaccagaatcacaccattaccagcccgcgaaccataaatagaagctgctgccgcatctttcaatacttcaacagactcaatcatgcttggatctaaatccgccaacgtgttcgttcccgttaccggggacacgaatgaatgcatcggaaccccatccacaacccaaagtggctgaccatcacttgccccatccactaacaaagaattaaatccacggacagcgatcacggatgcacttcccggagccccagactgttgaatgatattcactcctgccaaacgtccttgcaacatactggcaatacttgccgctggaagctctttcatatcctcggctttcacggaagaaatcgcactaatcatttcccgcttattctgagttccgtaagcacgaacaacgacctcatccaaatccgcaatatcctcttccaacacgacgttcaaagtatcctgctcaccaagcttaatcacctgtgttttcatcccaacaaaagaaaatatcaatgaaatatccttctgttccttaggcaacgtcaacctgtattttccgctcacgtcagtaactacccccaacgttgttcccttcactaacacggtaactccgggaataggcccctttttcgtgtctgtcacgacaccctttatcacacgcccttttagctccttgtcagattgtactctttcacccgcctgacggataataatcgtattctccaacaactcataacgcaatccggaacctttcagacaaatatccagcacctcagccacacactggtctttaaactcagccgaaattttccccaccttactcacttgttcgtgattatacacgaacacgtaattcgtctgttgttcaatcaattgaaacacatcctctatcaaggtttccttcacttgaatagaaacccgggcatcttgagaatacaaagatgcggacacctgcataaaactgacaaacaacaaaatgaatgttaatttcataatgttcactactttttttaaaatacgattcctcaaaaatcgtatttgtcgattttttcccataaatttgttcttactaaaagattaaacacactgttgtttactcaagctgttgaaaaggtccaagttttcaacagctttttatttgaaaacgattaaagtctttccttctaaattaaacttcaccatatccgtcttttccagaaacgtcaacacatcgacaatctcgctatgtcgttgaattgtccccgtgaaatgcaaatcctgcaaatctacattttggtaaaacacgtccacatcataccaccgggacaaaatatccattacctcctgcaaacgtcgttttttaaacacgaacaaaccatctttccaagccgtgaactccttcacatccaccctgtccaccgacaccttctccccttccacttgtatctgcatcgaaggatcaagcacgtaatcttgatgcttcgtatttacttggacttttccagttactaacgtcgtcacaaatttattggcataatcactcacgttaaaacttgttcccaacacccgtatctccttatcctgaacctctacgataaaaggcatatctacatttttggtaatctcgaaatatgcctccccccttaacttcacccgacgttcgtttcccgtaaaacgagaaggaaattccaactcggattgtgaatttacccatacctcactaccatctgccaacacaatcttgtattccccaccccggggtaccaccatccggttatattccactttttcaatcaacgaatctctatcttgttcgttcacgacaacggttccttcatttcccgttctaatcacaactccttcaacttgggtttctaatttactcacgctatccaacaccaagcgttccccatttgtcaactctaaaaacgccttgcatccacctttcaccggaatagattctcctcgcaccaactcgattctctctcgatccttaccataccaaatttcataaatcatcatccctcccaacacgacaacaaccaacatggctgcataacgcatcaagcgcacaaataacaccggacgcttccgtatcttcttctgaatactatcccatcctttctccagatcatttctctcccggaaacgaattttttccaacaacacacgttcatctcgtacacgctccaataaagccttattcttcggagatgaatctatccaatacaaaaattccgcttcctcttccggggataacatcccgtccaaataagccttcattcgctgaattttttcctctatagacctttctatctctttttccatgttcaaataattataggtttctcacccactaactattattaatacaaagatctcgaccaagaggatgacacgaagcatcacttttttcaaaaaaatacacaaagattataatcccaagacgaacgtcatcacgaaaagatccttcaacttagtttttaattgctgacgggcacgggctttatgcgtcttcaccgtgttcacagaaactttcaggatctcagcaatttcaatattattctttccctccaaatgccacatgatcacccgacgttgttccggtggcaattgctcaatttcctccatcaccaaccgatgtatctcctcctccacgactgcatccccgaatccctcttccgattcgagcaatgcgtattcatgacaatacgtctcttccagtttcttcacccgcatataattcagacaacgatgtcgcatggattggtacaaatacattctcatgtgaaccaacgattctatcgtctccctcgccttccacagattcacgaaaacatcctgcacaatatccagcacgtcatcttcctccttcaccatccggattccgaacaggcacaaagcaggataatacatctcgtaataataacgaaatgcactctcatcacctcttttaaagttttccaatattttcggggaaaacatttccatactcctacacaaattaacacatcaataataatccaatccacccatttatacaaagacaaaaatacacaaataaatagcaaactcaaatctctatttataaaacgctcaaatctttccctaaaaaataggaagtcctgatacaacaagacttcccaatctcaaccttccctgcacgctctttctcctacttcacctcacaatttgctttcttaaaccgttcgaccaaaggcaccatcaaatcaaacttcttaattatatccttataatcacgatacgactcgtagaacctctccttttctccccaataagcgtaaatagccgcaacataatcccgaatatcttgttccttagtaggagtcttaacccaattacgggatgaaacctccacttccagccatttaataaatccaagctcttcaggacaatctgccggggcaaacatactcgcttcatcataattagaatccccggatattttataaaaatccagtaactcatccacacaaaactcttgaatccagtccgcacatttcacagccaaaatctcccctcctaaccatttcagttcatcctcactcatctttttgatcgcgttcaatttcccaatcaccattcctcttatcccccggctataaatatccgtttcgtaagtaacataggaaaaaccgatttgttgcgtcaagaaaacagaatctgccaacaaaaaagaatgtggccggtaagctcccgactccggcagatgcggaatcactcgatcttctatcatattaatggcaacaatcatggccgcactgtcagcggataacgtcattcgcccatccgtgtaagtcccgtacacgtaataccccatatcaaacaattccgtgtgaacgataggttccccgtaggcatccacacctcgttcttcctgtccaagagtatcattaataaaaatagtcacgtcataatacttgtacattttataaagcaaatgattcacctcgcccggtttatcctcaaccttataccaatcgcgcatattttcgactgcctttacatcattgtcttccttgtcacaactcacacaaaagcaaaacaccattcccagtacaacaaaaatatttcttagcatactcgcaatttttaatgttaattttcattcttctcccgaggttcccgcttatcgttgtccaccatagcccctcgatcaaaaataatctcgtaatccggtatcggtaacacccaggcattatcctgaccatacggtttcaacgtgtaactcccgtcatacacgcccggtttcaagctcgccatcgcggactggtaaaccccatgcgtgatttctttcaattccggatatttaggtgacacggcataacgtctcagatcaaaccaccgatgcccctcgcaagtcaattcccgacgccgttcttccctgataaaatcaaccaaaccctttcccttcaaaccgtctattgcgggcaacacgccatctttataacgtttctccatcaaaaccttgaccgtacttatcgcatccggctgatccagcatcgcctgagcctcagccttattcaaataaacctcggcagaacgaatcagacaagcatcataaacttttaccgatcctttacgattattactataatcaggagtcttcctgataaagaaatatcccggacaataacttgaggaaggctctaaaaatacactttcccgcaaatcaaccacgccatcgttcttgtatttcttatacaaggccagaagttcatccgaaacacgataacgtccaccacccgtaattccgtatcgtgacagattattgttcatcaaccctccaatagcgtaactaccttgggtaaacaatatttccggagagttcaccgtattcaaccatttttcgtccaaaccattcatgtctcgcaacttacatcccaaggccaacaccttgtcacactcgtcaatagccaactgccattcccccatgtacaaataaacccgacttagcaagatgcgggccgccgcttcatttactctgtaaaaagttggctgaacgataccagccaagttatccgccgcattcttcaaatccaaaacaatttgttcgtacaccttctccaccggatcccggctaaaatacttatcctcgataaactccgtgatgttcaaaggtacgcccaaatcctttcctgccgtctcctttgaataaggtttagcgtaaagattcaccaacatataataataccacccgcgtaaaaacagagcctctcccgcaatccgatggcgaatttcttccggatcgctctcgaactccttcacgtaagatataatcacgttaacatacccgatatgctcgtataatcttttccagtcagaatcaaccaattccaccccggtcatatcagaaaaaggacgttctccccacgtgtagaaatttcggtatcggacggcaggattcgcatttgttaacatttttaccgccccggaaagaaactcttccacgtcgtcatccatcacgtgtaaatacgggtaatacagttcattttccctgtaataggcatattcctgattcgcatttcttttcatatacccgttaccaataataatctcatccaaatcctcgcaagagctggcgtacacgagatccttggagtactcttccaaaaaatccccacacgagctaaacaagaaacatcctactacaacaacaaataatattcttttcataactctgtttacttaaaacgttacatttaattgaagtgaatatgtcggacgcacggaaatattaatcaaatcggtagaaccggattgagacgggtcttgcccttttagcttccggctacacaaggtaaataaatttgtcccgctcaaattcaggtaaagagacttcacccgcaatttctcgcaaaaactttccggcacgatataccgcaacgaaatacttgacaatttcaaataattaccggatgccacccgaagattggaaaagtcatacatatcccacaacgtcctagaaaaatcgtatgtctctccatcccaccaaggaaaaacagcatccagatgatctcttcccgacaagataccgggaacattcgtgtttaactcatctcccggacgacgccaacgatttaccagttcccgacgaagattctgttccggtccattcacaactccttgattcgggtacaacctgaacaaacgaattttcgaaccgatactatatgacaagttaaaagaaagtccccaattcttccatccgaggtaattacttatacttccctgtaaaaacggctcccgacacccggaatgttccatcacggtcatccacacatcctcacgatccatcgcctcgtaaatctcgctcgtatctttttcttccccatccacgatagtcgtcgcctctgtcccgtaaaacatcggagccccgttcttcgagttcaaccccttgtatctgtaggaataaaacgtgttcaccggacgtccggatatttgtacccgaccattcaaataatcttcgaacgtcacttcatcctgcaacacttgatccttatgttttatcttatcaatcaactggttaaacaccgaaccaaaattcgggtcaaaacgccagactaacccacgacgtttcccgttaaccgttgtcatcgtgttaattggtacgaaattcaacgtcaactcgtaaccttgatttttcaaattcccactattcaccgtgtaagtatcaatgccattcaccacggatacttttttcgagaggaaagcatctgtcgtgtaacggtaataatagccgaccgtaccgttaattttattattgaataacgaaaaatccacgtccacgttgtaagttgaagtcttctcccatttcaagttgggattcgggtatctatcaattgtcgaggaatattccttgaaatcgttatccgtacctccctttttaataatcaaacggggagaatcctgtgccgacatatttccctgatacccgaacgacattttcagcgccagcatatcaatccagcttatatttcgcaacacattctcgtgcatattccaacgcccggaaacagaccatatcggcaacaaccgatcattactggcatccccaaatttattcgaaaaatcaattctcgcgttcacgttaaaaatataagcattccggtatgaataagtcgctgtaccgatcaatcccaccaaattcgtcagattatctttcaattgtcctctagccgcatcagtcaacaaccattcattatatttcgtgtaaagattgccgtctgtcatcgactcaatcttgtcaaaaatcaaccctcgctccggtagatacccgcgtttcgtgatcttgaaaccactatatctcgaagaactcaattccccgatcacggcagcagaaacgacatgctcctgtcccttgtcgatacttttattaaaagtaagagatccccggaaactatagttctcgttttttgtattatccagccgcaattctcccccggaaggacacaatgtctttccgaaatctatttctcccgtttccgcattctttttccttaactcggcaatataccacgttttctccccaaaatatatttcttcgcttgaattagagacattataggaacagaatacttcagctttcaattccggaaacaagtaataccccaaggaaacattcaaaccgatttgctccgttttaatcttatcgtaagtattatttcgctcgtttataatattaaatagctgatcataagcactagcatctgcttttctcttttgataaaaccaaagatctccgttatcatcatacgcctgaatactacgggaagtattgtaagcgtaatcggtcaccccgactttctccggtgtatattcctttttaatcgtactaccattcaacccgaattgcatcgtgaaatttttatagttcagatttaaacgggtcaaagcggaatagcgatcatttttctctccccggatattaccattctcgttactatatcccaaagacgcataatagcgaatgttatccgtaccaccggaaacactcaccgtatgattatgtgaataagaatctttcattagaatccccaaccaatccgtgttcacggtttccattttatgaacggcatttaagaactcctcgtgattgattttaccgctttggtaatcataataggcggattcataacccacccaactctccaaatccgggatctccagtttattttcaacaatatcccgagaataatctatcctctcctgagaattcatcacgttcaccgcccggtccgtgtatcggggccgctgacggaatgttcctgtcaaagaataggaaaccgacggggtccccactttccccttctttgtcgtgatcacgatcactccgttcgatgccctcggaccgtatatagccgtggccgaagcatccttcaacacgtcgatcttgtcaatatcgtccgggttaataccggaaatcgcattccccaacaaattcacaaaatccaaatcattgatgctcgtcgggtcaatattcaccggatcagacaaaatcacaccatccaacacccacaacggagcttgagaccccaaaaccgtcgtcgttccccggatcttaatctttggagccgcacccacctgtcccgaattctgcatgaaaatcatccccggcacacgcccttccagcatttgatccaccgaacttacccccggcatcataatatcgcccatcttcaaagaagtcaccgaactcgtcatgtgtcgtttatccacgttatagtacccgtaggaaacaacctcatccaactccgtggcatcctcctccaattccacacgtaacggtttatcatccttcacggcgacctcctgccgcttcatcccgataaaggaaaacaccaacacgacattattctctctcggaatcatgaacttgaaattcccgtccatatccgtggcagtacccaccatagaccctttcaacaaaacggcaacaccgggtaaaggatcgccatttttatccgtcaccagaccggataacaccatcttctcgttcccaactctctccgttttctttttaatcacgatcgattgcatctcgaacttatactcgaaaggggaaccctcgaacagctttgccaaagcggcatccaccgagacattccgaacgttcaaagtcacgcttttcatcgctttcaactggtccgcattgtacacgaaattcaggttcgtctgttccttgatttgcttgaacacgatctgcacgtcaacctccttcacgttgatcgtcactttctgtttctgagccaaagtaatgcaaggcaatcccaacaatatcaccaccattaccccccatttgcccattagtagtttcatctttatcgaacataaaaagtccgaaaaatcaaacgactttctgatttttttcatagatttgttgattaatattaaacattatgga

SEQ ID NO: 90 - DNA, 11835 bp, Butyricimonas faecihominis
gtatatttgtcatatattcaaataaaatacttatctgccatggcacgagaaaattatgtacgattcgactgggcaaccaaacgattgttaagacaaaaatcaaacttcgtgattctcgagggattcctctccacgttactgggagaacgtatcaaaattgatcgtatgctggaaagcgagggcaaccagcaacatgctgaagataaattcaacagggtcgacatgctggctgaaaacagtaaaggtgaactcgttattatcgaagtacagaacaaccgggagctggactattttcatcgtatgttgtatggagtatcaaaggctattaccgaatacatcacaaaaggagaaccctactcgcaagtaaaaaaagtatactccataaacatcgtgtactttgacctaggacaaggggaagactacgtatatcacgggaacacttctttcgaaggaattcataaacatgataccctcaaactatctttacgacaacgagaacaattcatccgtgagaatgccggagatctttttcctgaatactacgtgctacgtgtcaacgagtttgataaactggctaaaactccccttgacgaatggatagctttcttgaaaacaggtgaaattgccgacaacacaaagactagcggattatccgaagcccgagaattactacgtcttgacaatcttagtcccaaagaacgtgccagctatgaagcacatttgagcgccctacaatatcaacgcagcgtgatccaatccggctggattgaagggaaggctgaaggattagctgaaggattagctgaagggaaggttgaggggaaagccgaaggattgattgaagggaaggcagagggattagctgaaggagaaaaaaagaaggctttgacgatagcgaaacaagcaaaagaaatgggtatgtccatcgaaaatattcttttactaacaggattaaaaaaagaagaactcccattttaaaccagaaatttcactctcatttcaaagaacaacaaccaaaaaacacgaataaccagcatattaaaaggggctgtcccaaaagtcattttatcctcaaaaacacctccgtcacttcgtgccacctcctctataaacagaggagaaactggtgatttttgccgaagacagggagtatttcagctctccctctgtttatagagggagtaccccgaaggggggaaggagtttgaaaaatgacttttgggacagccctataaaatcaacccgcaagatatggttcgtctcgtccggattactattcccccggatgaatgtttcgtgtaaacaaaccgatccggtttccctcggtatctaaaaagtaagcaaaataatcttttgatccctcacaagtttcacaaggttccgtggcaatctttcccccggccttcctcaccaagactaaagattcatccatattttccgtgtaaaatgaaatcgtaatactgttagaggttggctggtatccttttaaattaaaaatacagccgatcggttgctgattaccggaagaaataaaagccatcttctcttccccgtattcgacaacctccagtttttctccgaaaaccgtcccgtaaaactgaactgccctctccatgttgacagcaggaatctcaaaaaaagctacgaatgttttcatgttgtatttattttattgattaacacaacaaaagtaccccctcatcacccctcaattattggaaaaaagagacattctcagttccgataaaacttttatttccttctatgcacctagaaaccattcaatactctctgcatcctcggaaaaacacatcaattgaaaaagagttgacgaagtatgaccggttaaagccttaatttcattcgccagatgagccgcatcgtaatatccggtatggaatgccaatgttgccaaatcaacctccggcattcgatttcgaaattccacggcatacaaaaaacgaatcacccgtaagtattgtttcggcattaatcccacgtaagccgcaaacacacgctcaaattgctttctactcaaacaagcataactggccagttgctccacattgaacattccccgacactgtaataaacgagtcatgaccatccgcatccggttattctcaaattcatttcttcgctgcaagcgacctaacaaaaatgactccaaaccctccacccgttcgtcaaaaccggaaagattcatcatttgctcttccatatctttcccttctcttcccaacacctcttccagagagacgtatcggtttgtcagctcattcagaggcaaatgcaaaatgtcccgtacccccacaggggtaaacacaaccgacatcagccccaccctacccgtgggtaaaacatctataaattcggttcgctgcccgtaaagtgtcgcccggggatgagtttcttctccatcggacagaataagcttgtacgaatcccgataataaaaaacaatttccatgaatccctgcggtgtaagacgatgcggctcacacgatggacatacatcctcaagatctagcatccagtaatactggacatacccggataattcccggcaaggcggtctgtattggtatttactcattcgaagaggaataacacatgaaccagcgcgtcactttctcactgtaagtctttgaaatcggaatatcgggaactttctcaaccccgaattccaaatagactccatctttctcccgacgaatcactttaacatgctcgaaattcaccatataggaacgatggcacctcaatacattcgtcccttcaaatgtctcttccatcgccttcaaagtattacgcaacatgaattttgtcaccacgcctttattcaaataccaaatctgcacgtaattatccgcggactcgatataaagcaagttcgaatgtttgattgacaaacgcaattcacctttctcatcccgaaaagaaataacactcgtccccccggtatctcccttcatctcttcaagcatctgcaatttctgttccttatcccgccaagaaaaataaagcatcaagatcgcataaggcaataaaagaattaatgacgtgttttctgaggcctcccaaaaagtttctatcacgtccctctccggccgtaaaaaacaagaataaaccgtgtagaacgtcgatagaaagaaaatttccaacacgatccagatgccatactcgatataattaagggtatgcttcttcgtgtaaaaatacatgatcacacgactgatcgccacggcaagtactccggtaagaatgaccagactcgaaaaaatgaaaaacttaaattccgataccggataccacgtcagagaactgaaaggtttgtagatattgataaaaatcagatcaaaaaaagcagtgaataataccaagcgtattaaatttgatttatcgtaatagtaagctggtatttttcgggtcaacacgttcatctctctctaatttttataaatttcaaacaaagatacatttttcccgtaaaaaatttcacccctaaagagcaaatttcatccctaaatatgagattttgtccctttaagtctaggtacacaccattaattttgaaaacaaagaattgtggcgtttgtttgtattaaaattaatcgcaagagctatggaaatctcaactagaacaaaacaattaaaggctattttttcttatgacaagaaagttatcctagaagatcaaccactggaaattcgtccttatcattttatccagaacatgggagtaaatgaaatagagcaatttcagcaattgatcccgacaagtgaattttgttctatcccggacaataatattcaggagaacaagagtttttcgtataccatattcacgcctaaaggatcacgaaaaacggaccaggcaatcctgttattacacgggctgaacgaacgtaactgggacaaatacctcacttgggcagaatatttatccttagccacgggtaaagcggttattttgtttccgatagctttccacatgaaccgtactcccggtaactggtataatccgagagcccttatgccttgggtggctcgtcgtaagcaagaagtggaacatctggataattccacgtttgtcaacgtggcattaagttatcgcctctcggacacccctttgcgtttttacatatccggaaaagagtccatgttcaatttatggcagttattccgggaaataaaaaccggacaacaccccctatttgaaaaagattcatccataaacattttcgcctattccatcggagcgttcctgtcacagattctgatgcttgccaacccggatcatctattggatgacagtaaactattcctcttctgtggaggctccatattcagccaaatggacggaagtgcccgggatattatggaccgagaggcgtatcgaagagttaagaattattttctgaatgattttctgacaaaaaatgatgaacagcgaatgctccccgttttgtatgaagaggatttcatggaaaaagcatttaaagcgatgatacgtcccgaggtaatgaagaattaccgggaatcatttttcgagcgaattcaagaccgtctacggattgtcacgctcaaaaaagatacggtaatgccaacacaaggagttattgaggcactcggtcccaaatgtgttgatactatattggaagaattagattttccgtacgagtattcccatcaaaatccatttcccactaacacgggagccacacctgaaatgctttatcaatcttttaccgggatatttaatagagtggccaatttcctatgatagtaccatcataggaaattccataacatcatgccaaattctaaaacaaataaatcattcaattgacccacccacaatatccatcaactcggccgtaatattctgttgtctcaacttattgtattccaactgcaagtttttcaacaacttaatagcattatcatttgccatttgcatagacaagatgcgagaggcctgttcagaagtctgattttccagtaggtaccgatacattgtggaatggataaccaacggataaatcgtctccaatatctcttcgcaatccggctcgtaaatatatactttatttcgttctttatctgaaagagctttcgtttcctgaggtacccacggaagtaactgctcccgactaatgatctgtgttcccatactcttataatgagcataaataacttcgacccgatccacatccttctccaaaaaacgacgaattaattcatctgccaatgccgttgctccttctgcatattgttttttttcgaaaagatcggggatcggcataacctccacccccctcgtccgttttatatcgttcacgagctttctccccacgggataaacgaaaacaggcgatttaaccttaccatcatactcttgtaatgtctccaataatttcttgtataatagcaggttaaaagcgccacataaaccttcattggcagcaaaaataacaattgcgacccgttgaacctgacgatcctgactcaacggagactgataatcattaatttcacttgcaatatgatccagtatattttgcaactgttccatgtaaggacgggcatgattcaatgcattctcagacttcctcaaccgggcagaagagatcatcttcatggctccggttatcttttgagaagaatgtaccgaatttatccttcctttcaattcacgtgttgatgccataatttttactttatgaactaattaaaagtctgccccacttccgtggccacttcttctaataatttagatacattttcatccagaaccccctcccgcaatggctccaaaatctctttttggtatttggatcgcaatatttccaagaacatcttctcaaactcggctacatgcttcaactccacgttacgcaacaacccttgtgtaccgcaataaatcacggcaatctcttcctccacgggcatcggtgcatgctggggctgaatcaataactgagcattcttacgccctttatcgatcaccatctccgtcacagaatccatgtctcctccaaacttagagaaggcctccaattcccggtactgggcctgatcgatcttcaatgttccggcaatcttcttcatagctttcacttgggcattaccaccgacacgggataccgagattcccacgttaattgcgggacgtaccccttcgttgaacaatccggcctcaaggaaaatctgcccgtccgtgatagaaataacgtttgtcggaatatacgccgacacgtctcctgcctgagtctcgataatcggcaatgcggttaatgaaccacctcctttggcagtgggtttcaacacatccggcaaatcattcattgtctgtgccatctcatcactggatataattcgcgctgcccgttccaacaaacgagaatgtaaatagaatatatctcccggataagcctcacgcccggaaggacgacgcaaaatcaaagaaatctcacgataagcgacagcctgtttggaaaggtcatcatacacgactaatgcgtgacgaccactgtctcgaaaatactctccgatcgtcgctcccgcaaaaggcgcatagtaacgcatagctgccgaatcggatgcgtttgccgcaacaacaacagtgtactgcatcgcacctctctcctgcaacgtgttcaccaacatggctacagatgatgctttctgaccgatagccacgtaaatacaataaatcggatcaccgttatcgaaatttcttttctggttcaagatcgtatccacggcaatagatgtctttccggtctgacggtctccgatgatcagctcccgctgtccccgtccgatcggcaccatggaatcaatcgccttgatccctgtctgtaacggttctttcaccggctgacgatagattacccccggagccttacgttccaacggtaactgtatcaattccccttctataggtccggctccgtcgataggttcacccagcgtgttgacaacccgtccgagcaatccctctcccaccttcacggaggcaatacttcccgtacgtttcaccgtgtaattttccttcacccgatcaccggcattcatcagaatcactcccacattatcttcctccaagttcatggcaaccccacgaaccccgttctcaaattccagcaactcgttagcctgcacattatccagcccgaacacgtgggccaccccgtcaccaacctccatcacggttcccacctcttcgaaagccatcttcgtatcgacctccttgagttgcatttctaaaatatctgatatttcattcgctttcaacataaccctaaataattttagatttaatgattttagattttaaattccgacctcacaaggctaacaccttcttcttgtcatcctcccgaaggattcatttataatctaaaaatccaaactggagactcatctccttcagctctttcatcagcgaggcatctagttgtcgggacccgatctgtaatataaaacctccgataatcgagggatcaaccttatggacaaactctattgtcttatcagtatgacgccgcacgaactctttgatcttatccatcgtctcgtccgacaactccatcgccgtgatgatcttcacccggataatcccgtttgcagcccggtaaatcttctgaaacatcaggcaaattgacctgacatacatttcccggtggtttcttatcaacaaacgaatacccttgatgtacgcctctcccggttcgattccgatagccgtggagagcagcatttccttatcctcgggtgataacaacggatttaacaaagctttctgcaagtcgggatgagcgatataatttttctcgaataatttcatcttctcatacactgcatcagcagcatttaactcctgcgcgtatcgaaacacggcctttgcataccttcgagcaatcaatccttcgtccatactctcctcctttactctttattttcaagctcgttcaacaacttaccgatcagttccatttggttcttatcggtagccaagtctttacgcatcactttctctgcaacctgcaaagacaaggatgccacttgtttacgcaattgtaattctgcttcccgttttgcctgctctatcgacaaattggcagcctccctcacttgttttgcctcattttctgccgcttttcgggcttccgctatcatctcccgtttcagccgttctgtctgctgcaatacctctaattgttgcttacgggcttccgtcagcaaatctttggcatcctcttgtgccttttctcgatctcttttagcctcccgggcatactctacgcctttatcaataaaatcagcccgctcgtccatcatccggacaatagccggccaggcgtattttgccagaatgccgaaaagaatcaaaaagacaaccagcatccaaaacactaatccgaattccggtgtaaataatgacatagcttctttttatacaaacaatgctaataaacaaacgataattgcgaaaagagcaacaccctcgatcaaagccgcaatcacgatcatattggttctgatattgttagtctcttccggctgacgggcaatagcatccatcgccgaagaaccgatcttaccgataccaatacctgcagcaatagctgccaaaccagctccaacacatgcacctatcttagccagacttaacccggctgctgctacttccaataaaatcaaactttccataaccttatttattaattttagatttaatgattttagattttaaattcaaacttttagatttaagtttttagcttttaactctcctcactctcgccaacccgataaagattgttgaaagcaacataaacacgtatgcttgaataaacccgatcaacacgtgaatcaagttcataaacacggcaaacaatactgaaaataccgttgtaacgcccaataccacctgtcccatcacgctaaacagaaagatcaacgaaatcaacaccaacacaatcaagtgtcctcccaacatgttagcgaaaagacgaatcatcaaagccaccggtttcgtgaacactccgaatatctcgataacaggcaataagggtaccggacatttcaatcccataggcacatccggccaaaatatctctttccagtactctttcgtccctgaaacattaatcaccacgaaagtacataatgccaagaccagcgtgattgacatatttcccatcacgttcgcccctcccgggaatacagctatcaaccccatcatattggatacgaatataaaaaagaacaatgtcaacagatagggtgcatatcgcttggattcctttcccagcacactgacaataacctctttatataacatttcgacgatcatttccaaaccacccattcccttacgcggggccttaaactttttccttttataaaatcgaactaacgagaacacgatcaacatcgtgatcagcccgctaatcatcacggaaaaagcgtttttggtgatagaaaaatcataaggacgatattcgtttccggtagcatctacccccacgatcttcccttcataagctccttccccggcaatatgaaatcctttatatgttttcccgtctgctaaacgtgaagaactgaaaaaataccattcccctccattatcccgaacaatcacgggcagaggtatggttacctttccgataatcgtccatccatactcgtcccccaaatgctcgaaaatagtctttttagggtcaaaagccttatcctcccgttcctcctgctgcatcacggaatccacccgtacggcaagctcgtcctcgacctgttgcgattcttccccgctaacacctgttgcggccactctaaccgcacctgcagttagcgttccgaccaacagaacaagtgtcaacaatatatattttaaatcattcttcataggtgtatcaatttatacaaaccaccacattattgtcccgaacttccacaactcccccgcgaatctgtacactcttttcctcttctgaccctttatagacaatttctcccggagtcaatgtcgatactaacggtgcatgattttccaacacggtaaactgacccaccgtaccaggcaatttcaccatttgcacctcacctttataaatcactttttccggagatactattcttaaaatcatgaccttagttattttagattttaaactttagattttagatcctatcgattaagtgatttaatgattttcgattaagtgattttaatcatccaatcatagaatcggcaatctcggaatctttttcattctaaactctaaattttacattctctaatttcttttcttcgcttgttcaatcatctctttccctttcttgatcacatcatcaatggttccggtattcataaatgcctgctccggatattcatccatatccccatcgagaatcatcttgaaacctcgaatcgtttcttccaacggaaccataaccccgggaattccggtgaattgttcagccacgtggaaaggttgcgataagaaacgttgcgcccgacgagcccgtgctaccacgattttatccgaatcagataattcatcaacccccaaaattgcaataatatcctgcaactcgttgtaatgctgcaataattcgaccactctttgtgcggtttgataatgttcttctccaacaattgccggatcaagaatacgcgaagaagattccaatggatctaccgccggataaatacccaattcggtgatcttacgactcaacaccgtcgtggcgtccaagaaactgaacgtcgtggccggtgccgggtctgtcaagtcgtcagccggaacataaatggcctggatagaagtaattgagccattcttcgtggaagtgatacgttcttgtaacttacccatctccgatgccaatgtcggttgataacctactgctgacggcatacgtcccaacagggccgatacctccgacccggcttgcgtgaaacggaaaatattatcaataaagaacaaaatttcttttcctccagcattcgaatccctaaacatttccgcaaccgtcaacccggacaaagccactcgtaaacgagccccgggaggttcattcatctgtccgaaaaccaatgttgcctgcgactggttcaccttctccatgtccacgctctccaaatcccacttcccctttgccatctcctccttaaacttgtcaccatagttgataacccccgattctatcatctcccgcaacaaatcgttcccttcccgggtacgttctccgactccggcaaacacggaatatccattatgtcctttggcaatattattaatcatttccatgattaacactgttttaccaactccggcacccccgaacagaccgatctttccacctttagaataaggttccaacagatcgatcacctttattcccgtaagcagcaattcctccttgatagacaaatcttcaaatttcggtgcctctcgatgtatagaactcgtttctttgtaatccaatggggccagatagtcaatagcatcacctgtcacgttcaacaaacgtcccttaatctggtcccccataggcatcgtcaaggtccgtcctaaatccaaaaccttcataccgcgatataaaccgtcggtggtatccattgctacacaacgcacggtatcttctcccacgtgttgttccacctcgacaatcaacttcgagccattctccctctcaatctccagagcctcgtaaataggaggtaagtcaacccctccaccttcaaaaatgacgtccacaacaggaccaatcacttgtgtcacgtatccgactttctgtgtcataatatatgat

SEQ ID NO: 91 - DNA, 11828 bp, Butyricimonas faecihominis
cagtgttatggcaagtattagaagattgaagaaagatgttgattatttgactttcgcagtaatcgccgattgtatgaattacaattctagcgtggggaagagtgagccggaagttgttaacatcgtgaaaaagatggttgaatatagaaatgaaacgagaagtaaaatttctgctcgtaaatcatttaacgataagaaagaagctagatcttattataaaggaatatctatcgatctattgaaaacagtagacggagaatttacccgtttgagcgagttggtaaaacagaacgcttaaatgatgattgcccccaaatgtttgagctaccacgttctgtggtagctctttttgatgatgaacgacgagattgtattaccgggaatcggcaaggtgaaggtgagacggggaaagaatatccgtttcctctcggtgcgaatggcaccgggtagaggcgtgtgggtaaacgttcccttcggggtaagtggacggcaggtagaggaattcgtgcatacacaacgggactggatagaacagaatttggcgaagatcaaagtctacgagaaagacacgggggtggggttaggcatggattccgaggtgaagacgaagttccacgtgctgaaagtgcttgcctgtgacgaacttcgtccatactataagatcgagggaaaagaaatccacctgtatattccccgtggtacggcatactcgaaaattgctccctacgtggaaaatttcttggtagagatttatcgcatggagagcaagcgttacttgccgggacgggtgagggaactggcaacgcggttcggtttccgttaccgggcattgtcttttcggaataatatatcgaactgggggagttgttcggcggatgataatatcagcttgaatgtgaaattgatgaaattgccggatgagattattgattacgtgattctgcacgagttatgtcatacggttgaaaagaatcattccagtaatttttgggcgttgatggaaaaagtgtgtcccgggtgtatgcaattgcgtcgtaggttacgtcagtataataccagagtttgaacggtattctttcttcacggcttgctagccagaacgtgagaatgaacacgattcccaacatagataatagcatttcgactcttttcatgatgcaagttttaatatacgttttatgctgaaatgtggccaaatgttacgttctcgggcgttttttattgatatatttgtaaatgttgggaaaagaggaatccagcttgagttttattcgttatatttggtagttatttcttaaataagtgaagacaatggaaggacaatattgttatcaataccctcgtccggcagtgaccacggattgcgtgatcttcgggtttgatggggagatattgaaggtgttattggtggaacggggcggagaaccctataaaggttgctgggcatttccgggtgggttcctgaatatggacgagacgacggatgaatgtgccgtgcgggaattggaggaagaaacgggcttgagagatgtgtttgtagagcaattacaggttttttccggcgtggaccgagatccccggggacggacaattacggtggcttattatgctttggtgaatcccgtggggataaaagtggccggatatgacgatgcggcagatgctcgatggttcaccttgtcggatatgccttctctggcttttgatcatgaacacgtgttgctggtggcattacatcgtttggcattgaaagtttatttacaattgaacgggatcgaggaactagatgaacatttcaagggatttgacttgaaacgtttgcaggatctgattcctgataaattataggatacatggatagattggaaatcgttgaggcggatattaccacgttggacgtggatgcaatcgtgaatgcggcgaatacttccttgctgggaggtggaggtgttgacggagcaattcaccgggctgctggcaaagagttgttggcggaatgccggacgttgcacggatgccggaccggggaggcgaaaattacaaaagggtataatctgaaagctcgtcacgtgattcacacggtaggaccggtttattctaacgggcgacagggggaaccggagttgctggcggcatgttatcggaatagtcttgccttggccgtggaaaacggtttgaaaaccatcgcttttcctctgatcagtacgggtgtgtatggttatccgttggaggaggcaaccccgattgctttgcgtgagatcaaggccttcttggagacacatccgaattttgagcgggtgattgttgcttgttttagtcgtaaagcttatgatttgtatatgcaattgacaatggaataatgacaataatttgtaacttttaagcctgttgaccttaacaaaacgaatgtttgttgggaaattaatttataaacagtaattttgtctggaagatttataaaaaacagatattatgcaagagatagtaaaagagatacgtgacgttttgtcggaagtgaaatatcccggcacttcgaagagtatcgttgcgctggatatggtgcagaatataaaggctgaggacggtaaggtggatttccgcttggtattccaaaagtccaatgacccgttcgtgggagcggtgagaaagaaatgtgaatctctgttgaaagagaaattaggatatacaactgtggagattgaaaccgtgttcgtacatgacttggagaaacctttggtcttggagaaggtgaaacatattgttgccgtgtcttcaggtaaagggggagtcggtaaatcaacggtagcttcaaacttggcggtagctttggctaaattggggtataaagtcgggttggtggatgctgatatttatggaccttccatgccgaaaatgttcgggtgtgaggatgccagtctttatatggtagaagtaggaggtaaggagttgatcgagccggtagtgaaatacggggtgaagttgttgtcgatcggtttcttcgtggacccggattctgccactgtatggagaggaccgatggcttccaatgctttaaaacagatggtagaaggcggtttctgggacgaactggactttatgctgatcgaccttcctccgggaacaagtgatattcacttgactttggtacaaactgtcgctttgagtggtgcaatcgtggttagtacaccgcaacaggtggctttggctgatgccgtgaagggaatcaatatgtttgaatccccgggaatacaagttcccgtgttgggattggttgagaatatgtcttggtttactcctgccgagttaccggataataaatactatatcttcggtaaagagggggccaaaaaacttgctgacgagaagggattgcgtctgttgggacaaattccaatcgtgcagagtattatggaaggaggcgagaatggtagcccggtagccttggatgaagatagtgtcactggacaggcatttatagaactggctcgtaatgtagctcacgctgtggatgaaacaggagagaccgcaaaacgggttcgggtaacgaaataatggagaaaggggcttgaaaaagcccctttcaaactcttttatacatcgcatttatacaaatcacggcaaacgtgataaattctgccacggctaccgctagccagatccctttgattcctaaccataatggtaggaggaagaagcaaaccacaggtaatatgagtcctcttaacacagtaaatatcgttgccagtcgtgacttttcgatactcatgtaatacccgatagcggtgatgttgattccgaagaaaacatagcatatcgagaaaaagggaatcccgcatacggcatacttccatgcattgtttgtgtggtccgcaatgaacagggatacgatttgttcccgtagtaaaatcgtgaggactaagaaaaacaagcctgttgcaattgttgctatcaatgccagccggagtgcttgttgcgcacgtccaagtgccgcacatccgtgattgaaactgataatgggttgtgccgattggatgatggcattgaaaaccataaatatgatcgggaaaaagtagcacatgatgctgaatgctgccactccgtccgtaccgaggtaactcacgaacacatagttcccggttagcatcatcacaccgatggctgcctcccctaggaatgccgagaaacccaaacgaatgatatatccgctattacgtagcgtgagttgtatactctttcggctgaattttagtttaccgagacgaacacgaggggaattacgtaataaataggcaaccatgagaatacatcccacgatttcaccgataccggtagccacggcggcacccgtcaatccccatttatacacgaatataaatagatagtcgagtacgatgttgattaccgtggagattgttatacaccacatggcaattttaggtccgtcaatacgggtgaagaaagtaagcacgcagagagccgtctggaacatggcaaaagcggcataagcgatcaggtactctcgtgccaatccgataatatcttcgggagctccgaggattcgagccacagatgtcgggaaagccatgacaaggatagatactaacgtcatgccggtaaaagaaacaagcgttgcttgcgtggcattgatgttagccacacgttcttttccccgggctaggttgatcgatgccatgattgccccgcccataccaaacattaatcccattccggcagcgaacacgaataacggggcggcaatatttaccgcggctaaagcgtcactaccaattccacgaccgacgaaaaccccgtcggtgatcacgaataaagccgagaaaaccatacccagcaaggtcgggaatagttgtttacagaacaactgtccgactttcattgaaccaaaatctatactgtctcgttgcatgtatatataattttttttagctcggcaaaggtaggtctaataaaacggagaaaaattaacctatgataattacggattattttgtgtacttttgtcgtaaaataatgaataaagggagattttagaatgctgaaaagtgcaagcggaatgcaaatgttcggggatatagttcgacgtaaacgctatttttacgccttgttaatgattttgctaatgattggtgtagcagaattgttgatggaaagggaaattatctttccggaaatggcagccttgacaatcggtatgtggatcgtggataaacgggtgtggcaggtgagtcgggcaagtatggtcgctctcatgattttaggtgctgtggcaggtgtgtgtatcgtatgttattctcctttccccttgcttgtgaatctggcgtttgcctttatttttgccgcaatctgcctcacgttatttcgtgcaactttggtaccgcagatttctgcctgtatgttacctgtgttactggggacggaaagttgggtttatccggtagctgtacttgttatgtcggttattgttgttggtggacaatgggggatggagaaagttggattgcgggagagggtgacttatacgcccgtgattgtccattggaaggataacttggtacgttggtcgtttttattggtgacagtgatagcggttgccacattggctatctacacgagaaacttgtacttcattcttcctccgttgatcgtgacttacgtggagtttgccaattcgaaggccgggttccgcaatcgtcccgtacaggttttattggtcttgttcacggcggctgttattggcgtgttctttcagatcgtgggacataaatacttgcatttaccggaagttgtggttgtactcccgatttttctttgtatgttttctttgtttgaatttctaggaaagttctttgccccggcgggagctgttgctttgattccgatgatcattcccgaagaaggtttgttgtggttgcctttgcaggttctcgtgggagctacgttatttattggcttggcaatgatctgtttccagcgttgtctgcgctggcctcgggcgcagttgattgtgtgtctggttccaccttttataagggatttgaggaagagaaataaaagtttgtaaagtttataaagtccaaagtgacgggtgtccttcggaccgtgtttaacggcagcactagctgccgttggtaaagcgccccgctagggatccacggaccttataaactttatgaactttatgaactaaaagggcttttcgccctttatttaatgtcttgctctcgctttgatgatttcgaagaaatctgccgctttcagggatgcaccaccgataagtccaccatccacgtccggattagagaaaatagcgtcggcatttccagcgttacagcttcctccgtaaaggattgaagtttcgtcagctacggcttgtccgtatttctctgctacaacagaacggatgaaagcgtgcatttcttgtgcctgatcgggagtagcggttttaccggtaccgatagcccaaaccggttcgtaagcgattaccacatgagcgaattgttccggggtaagattgaagagcccgtcggtcaactgttgtttcacaacttcgaaatgtttctcggattctctttcttccagtacttcacccacgcagaagatgatttccaacttgctgtctagggcttgtgcaaccttcttcacgagaataggacttgtttcgccatagtagcttcttctttcagagtgtcctaagatcacgcatttagcacccgtggaagctatcatttcagctgagatttcacccgtgtaggctccggctttttccgttgcgcaattttgggcagcaaccatgatggaagattctgtgatgttatgagccacttttgccaagtggataaagggagtaccgagaacaacaagaacgccttctccgccttctttatatctcacgtaatcattcacttctctagccaattcaactccttcagcgaaggttttgttcattttccagttacctgctacaatcttttttctcatatctttatgttttgaattgtttgtgcttaattgtttcttttcccttttctacgtggaatcagtaaatatgctacaaagaaaagaaggataatggagtaaaccaaataaattcgttgcatttgttcccttgaatacacgcaataagctgtcaagtcggtatcctgtaattctttcacgtcgggaacatcttttccggcccatttgtcgagaattgtgccttcccggagaatgatcacaccggggttagaacgaatcatggtttttaactgaatctcgtcagccgtacaaaattcgtaggggacgtgattccgctttttatatgcttcaatatcccgttccgtggatgaggttaacccgtagaatcgaattccttttttgcgagcgtactccgccagtcggttgatggcgggttgatattgtgtatcactctggttaaggttgtatgctacggcgaggatcgtgtgattatcgtcttccaaaatttcttctgtgatgttaccaagcgtggggtgttcgattacaaggtcatgaatcggtgtgatatatcctttctttaccagtcgctccgagctactctcgtattcccaattcagcgtgtcttgccatgggtagttttcttccgtgaaagaccggatctctccggtttgcttgtttttatactttagtgtgacttcgtattgatccggtttggctccttcgggaagtctcatgccttccgtgatgttcttgccgacagcgtaaggacggaaatcgagtacgggcaggtgacgatagcaatagatggaaagacatagcattccggctcctgctagggtgagaaacgaaaattgtcccatcaaggaaagcgatgatttgtattccttgcggtacacgaagatcatgatggccaacaagaacaaaatgatattcttccaaaaagtttgccagttcgtcaggatcatggcatccccgaaacaaccgcagtcactcactggattcgttagtgccagtacgagggtcaacggggtgaaaaaagccatgaatagcagagacccccatgccatgcgggatacccataaattaaacaacagggcagttccgatcagaaattctgccagtgagagggcgaaagagaaaaacaacgtggttgcgttcatccagcccatgccgaaagcgttgaaatagtcagtgaatttgtaatcagatcctaacgggtcaattcctttcacgaatccggaatagatgaatactatcccgacaataatcctgcacaggtttttgacgagtctcatgtttgtttattttccggttagaccttactcttgctccacgacaaggcgaatcaacccgaaaacggcgtaatttaccatgtcgaagtaatttgcatcgataccttccgatatgatcgtggtaccttggtgatcttctatctgtttcgtacggttaatcttcatcagaatcaggtctgtgtacgagctgacccgcatctctcgccaggcttcatcgtaatcgtgattcttggcaagcatcagttccttcgctttaagaaaataattctgatacaggcgaaggacttcatcttggggggtgtcgttacccggtccgagttggagttggatcagtcccataatggaatagttgatgatcccgataaattcgggaacaatgccttccccgactttcgtaatccccttttcttcaatactgcgtatacggtttgctttgatatagatctggtcggtgatggaggtcgggcggagtattctccaagctgtcccgtagtcctgcattttctttacgaaaatatcctgacatatatctatcactttatcatattcttgtgctgtatttggcatactctatttatttttgataatgaaatctgaaaaataaattgttaatttgtcctgtaaaagtactcaaataattgaatattggaaatcgaaagttgaaaattatgacacatataacgatcggagcggaaaaggttagcttggagaaacccgtggtgatgggtatattgaacgtgacaccggattctttttatgacgggggaaagtacacgagcgagttgaagatcatggaacgggtggatgagatcgtggaacaaggagccgggattattgatgttggggcgtattcaacccgtccgggagcagcgttcgtggatactcaggaggagttatcccggttgagttttgccctggaattgattcgtaagtaccacccgcatctaccggtatcgattgacacgttccgggccgacgtggcgaaagagatcagtcattgtctcggatcggtaatcattaatgatatttccggggggacgatggatgacaagatgttcgagacggtggcggaattaggacttccttatatcatgatgcacattcagggaacacctcaggatatgcaggttaatcctcattacgatgacgtcgtgcgtgaggttcgggagtttttcacggaacggattactcgtttaaatgctttgggatttaataatataatattggatcaaggattcggttttggaaagactgtagcccataattacgagttgatggataaaatggagtccttcctggatttgggttatcctttattggtgggaatctcccgaaaatcaatgatttggcgtttactggagattacaccccaagaggcattaaatggaacaaccgtactgaacacgatctctttgttgaaaggggcacatattcttcgggttcatgatgtgcgagaagctgtggaagccgtgaaaatcgtagaggcgatgaaaaggagtgtataaactttacgacctatttcagttgtttataaaatagcggatggatgacctgccatagcacgattccggcggtgacggatatgttgaatgaatgtttggtcccgaattgtgggatctcgatacagtcatccgaaagatcaaccacttcctgctgtactccttttacctcgttgccgaagatgaaagcatattttcgtccgctttcgatggtaaattgttctagggaaatactgttttccacttgttccacggataaaatggtgtatccctcattttttaatgcatgaaccgcatcggtggtttcctcgaaatactcccaatccacgctttcttcagctccgagggctgttttatgtatttcccggtggggtggtgttgccgtgataccacaaagatatatcttggaaagccggaaagcatcggacgtgcgaaacacggaaccaatgttattcaagctgcgcacgttatccagtacgaccacgagcgggagtttttcagcgtctttatactcttccgtggtgagtctgttcagttcttcattgaggagtttacgagacatgttaattgaaaattgaaaattgaaaattgagtattttcgattttcaattagggttattgatttattgcttcaccgataagggttgcaggggtacattccgtgacacgaacctgaacgagttctccgactttagccccgttatcagggaagacgatcaccttattctggctgctgcgaccgaaaagttcatccgatttcttcttggaaaccccttccacaagtacctcgaatactttgcccacgtctttcaagttgctttggtgagaaatttccacttgcatatcaatgagttcctgcaaacgacgtccttttacatcctcgtccacgttatccggcaagttgcgggaggccatggtacccggacgttccgagtatttgaacatgaaagcagagtcgaacatcacctctttcatcaaggcgagggtctgttggtaatcttcctcgctttcattgtggaacccgacgaacacgtccgtggaaattccacaatcaggaacgatctcccggatggcatgaatccggtcaagataccattcacgggaatattttcggttcatgtctttcagtacggaattactcccggattggaagggtagatggatgtgtttgcaaatattggaatgggtagctattgcacgtagaatatcattattcatatcttttgggtgtgacgtggcgaaacggatacgcatgttgggtaccgtttgggcaaccatggcgagtaatgccgggaaattcacttcctgattatctccccgccagaggtaggaatttacattctgaccgagtagtgtcacttccttgtaacctttggattgaaggtctagaacttcattgacaatacttctgggacttcggctacgctcgcggccccgggtgtatggaacgatacaataggtacagaaattattacatccccgcatgatggaaacaaatccggatatggctgtttcgtcaattcgggaagggcagatgtccttgtaggtttctgtggtagagagttcaatattgatggctttctcgcctttttcggctttctcaattaaagaggggagatccatgtacgcatcgggaccaaccacgatgttcacgttcttctcctgttcaaaaagagcctcccccaaacgttctgccatacatcccatgatggcgaccagcacgtgtggattctttttctttacctcggaaaatccttgtacccgtccgcgaacccgttgttccgcattttcacgcacggaacaggtgttcaccagaatcacgtctgcttcacttttttcttgcgtccgttggtatcctttgtcttccaagatggctgcaaccacttcactgtctgccacgttcatctggcaaccgtaagtttcgatataaaatttctttaccttcattcctgattttatttgcaggaggcaaaggtaatgaattttagtctacgggctttctattttcttttaaaaatacaaaaccatactttcgtttgtcttggaaatacatatagtgtatatg

SEQ ID NO: 92 - DNA, 11803 bp, Butyricimonas faecihominis
gttttataattatcacttttttatcctcttttcgaacaaaacttacattcgccgattgttccaatatctcaaacaaattcgttatactctcgtacctaggtataaacccggaaaatttataatccttgatctcctcatcatcaaacacgaactccacgtcataccagcgggaaatcttttttaacaaatcttccagacgttcctcgctgaaactgaactggtctctcgtccaggagatataggactccacgttcacttcccgggtcgtcactttcgaatcggccacggcagccatcagtccgggagtcaacgcaacaaccgtattcccgcactcaatattcacccgtccctcgactaacgtcgtcatcgaaacctcatcgttccggtaagcggaaatattaaacgtagtacctaacacacgcacggcatacctctcacaatgcacgataaagggtttcgcggcatcctttgccacttggaaaaatccttctccttccaaatacacctcccgggtatcacccgaaaaagattgcgggaactttaaccgggaatcggaattcagcattaccttcgtaccatccgacaactgcaaggaataagccccgccacgaggtattttcagcgtattatacaccaaagaatccgccgtccggggagtatgataaatcaaggtttcaccattattactcacgaaaggtaattgctcgtcaagcgtgtctaccacccccggtgcaatcagcaaagtatcccctcccggcagaatcagcgaggcacgcttcccaaaagaaaaatggttgcccgactccacccgggccacgggcagtacttcctccccgcccgtcgaaaacatcagataagaagatacactcaataacacgatggcagccgcagcaactccacgatacaagcgtcgaatggaatgtctcttccgaatgtctttcatgacagacggccacgaccgacgagcattaaaatgctcgtataaaggatattccgtgtgttccttgtattcattttccaatcgttcatacaactcctcgttggccttggaacgtgatttccaagccgcgaagaaagtttcctcttcgagagacaaacctccttgaagtcttttcacgatcaactggataatatactctgtttcctttttcatttcgtgttattttaccttataacacttcacgaagaaaaaggtaccgacaaatttgaatcttttttattcgatttcttttattcgctccacttgcctgtttagaaaataatcagcataaagagaataatcttcggtttcataaaaagctatcaaccctttcctgtaattcaatatatcagcatctttcgaggaatagactgggataatatcggcattcatcaaggcaatgctttccaccattcgggcggtacgtttatttccatctatgaaaggctgtaatttagctatgttacaatgaagataaatagcccgttccaatggatttgtgaattgttcctgttgataaagtatttcattcaacttagcccgaatatcgtgcaagtcctttggagggatatatcccgtaccgctgatacggacagctcttgttcttaaatagccggattcttcattggaaaccaaacccgtggatatagcctgatgtactcggaataaagtgcgttcatcaattatttcctgattcctccctttattaatatactccacttctgatatgaaagtattatataggtttttcagcatcttggcgtcttcatacttcttttcagaagtaatgccatctttgagcaatgcctctgtttccacgtaagtataggtattcccttcaatcttacccgaatagtaacaccacaccacggctaaatcttttatttcgttagaacgcaaatccgatagtttcgctaaaggatgattcaaaatgaatcgcgcagttccttgctgttccttattaaatatctgttccataatcataaaacattgtcgcctagggttagattttatagttccctatataacaggaatattgtgtttatcccccaaaaacatgaattccatcggttatattttttctatatttacaaccgcaaaagtaataaataatatttagttctaacgatataaacaaaaatcctaattagactaccgatcaacatcaaattaggatacttcttataaaatacgttcctaacactcaacagtgactcgcacctatgtctcactaatacctcattcatttttcaagaaaaaagtaacgaaaaattgactgcccgtatcggcaacttatcgaagacttatcggtaacttatcgaatacttaccagtgaaacaccgacgggacaagggaaagagtgtaatgcaattatactaaattaacatttaggacttcctcgttatccccagttccaaggtcgaaacatattgaattttcccttcatccaacaatttccggacttgcccgatcacgacttcttcgtcctcacccaattgacgcaccaactcccggatattcgtattctgtttggcaagcacctgcaaaatctgttcctccagacttttccgctcttcccgatgcaaccgtttcttcttcccgatacagacatcacatatcccgcaaggcttctcttccttctgcccgaaatactccataagcaaaagctggcgacacgtttcgtcatcccggatataacgggccatggccccgatcttcgtgacaaacaactccttccggttctcgtaagcctccctcccgagcgtgatataggacaatggcaaccggggttggtaatacacgatgtaaggtttcacgtcccccggcacgtagcgaataatcttacgttttgccaaagaaataaaagcatcatacaacaccttgcgtgtcacgtcgagctgatcagccaagaaaccttcgtccacgtaagcatcctgcacgaaaattccggcataatttctcatcaggagaaccataagtctttccaacaagggatcacccgtctcgaactcgtacaaccgatcccgtaacacggtgaacatcacccgggaacgggaatttatatccgtcgtgtaccccaagaaccccgcaacctccagaatactgatggcagacatcaccctcgcctcgttgagtttaaaattacgggcaaacagtttcaaattgaactcgaacgcccgtccctgtccctcgccctcacctaactgataatagttcgccaaggcctcgtacaccctcaatatataatctttcgggggaaaagcatcatcaatccgtttttgtaaaccacccaaagctgcccggctggaaagtaacacagcgtatgccctttttccatcccgtccggcacgtcccgcctcttggaaataggcctccggactgtccggcacgtcataatgcaccaccacccgcacatccgccttatcaatccccatcccgaaagcgttcgtcgccaccaccacgggaaccatcccgcttttccacgcctcctgccgacgtgcccgctgcgcggaagataacccggcatgataaaagtcagacttgatccccgacttgttcaggaaagcggcaatcgaagaagccttcaaccgggtacgcacgtacacgatcgcccccccctgcaccttagacaaaatattgaataattccaacggcttggcctccgtgtcccggatcacgtaggaaatattttcccgccggaaacttttagagagaacgttcggggtcgaaaagtgcagctgtttctgaatatcctccacgacctccggggtagccgtggccgtgagtgcaagggtagccaccccgggaaagaattcgcgtacctccgctattcgcaggtacgggggacgaaaatcatacccccattgcgagatacaatgagcttcatccacggtaatcagacacacgttcatcaacctcaatttttcccggaaccgttccgagtacaatcgctcgggcgacacgtacaagaacttaaccgtatcatatatacatttattaatgatcgactccacccggtcacgcctcatccccgtgtagatcgcctcggccggaatctgcctgttctttaaatcctccacttgatccttcatcaaagcaatcaacggggtcaccaccagacagacgccctccatcgctaacccggacacttggtacgtgagcgactttccccctcccgtgggcataagggcaagcgtgtccttcccgtccagcacggaacggatagtctcttcctgcaaggatcggaaatcatcatatccccagtaagtctttaatatctcttttatatcacgggtcattcttcgaattctattcgcaaaaatacaaaatagacgaaaaaactctcacaaactcgtatatttaaatcgctttttattattttcgcccgaatattaattgcgtaaaatcatgaaactacaacatatactgatttttatccccttcctgtgggcttgtaacgataagttcgcgaaaaacgagcaacccgtggcaaaggttttcgacaaatacttgctgaaatcggaagtttccggctttattccccagggaaccccctcgaaggatagtctcatcatggcacaaagctacgtgcggaactggattaccaaagaattactgttgcacaaagcgacccagaacctgagcgacgaggaaaaaaacattcggaaacaagtggaagactattcctcttctatcttgatccataaatacaaggagaaactgatttcccagaaactcagccgggaagtaagcgaacgtgaaatctcgcaatactacgacgcgaacaaattcaacttcgtgctgaacaccccggtcgtgagagccttgttcgtggtgattcccaaatccgccccgaacattgaaaatgctcgtaaatggttccgttccaaggaagccaaagaccaggaagcgttggaagagtattgcatcacgtcagccaagaaattcgataacttcaacgaccaatggatcgaactgcgtaacctgctgaacctcctgcccatcacgtcggcagaatgggaaagcaaatataaaaacaaggagtccatcgaaatcgaggacgacgagaatcactattttctcaagatcaacgagctacgacaagcccatgaaacagcacctctcggttacgtgaaaaaagagattgagatattgttgctgaacaaacgtaaaatctccttcgaagagaatctggaaaaagacatcaacacggaaggtctccgaaaagattacgtcaaaatatattaacaggattagaaaaatgaaaataaaaatgcgaaaacgaacggattattcgcggatttgaagaaaaagtattagtttagagcgtttttattgagtataaccttattcataaattatgagatatttatcactgcttgtactgttatttttagctagttacgcctcggcacaaaaaaacgtgatcgacaagattatcgctgtcgtgggtgaagaaatcgtgttgaaatcggatatcgagaaccaatttttacatgaacaatcccaaggattagtaaattcttccaccgactctcgtaccagaatattagaaaatttattggttcagaaactattagtggctcaagctaagatagatagtatcgaggtaaccgacacggaagtggaaaacgcgttgaattcacaattggagcaatacgtgcaacatatcggttcccgggaacgtctggaaacctacttcggaaaatcatacgaggacatcaagaacgaaatgcgtaacccgcttcgggagcagatgatcacgcaaaggatgcagtctaaaatcgtggaaaacgttcgggtgaccccctcggaagtcaggtatttctaccggaaattcaacaaggacagtcttccggaagtacccgataaatacgagattcaacagatcgttatcaaaccaagaatcagcgacaccgagaaggaacgtatccgtaaccggttgagagatttccgtgaagagattcttgccggtaaacaaacgttcaacacgttagctgtattgtactcggaagaccccggatctgccgccaaaggtggtgaattaggttaccaaaccaagagcgcactggccccggcatttgccgaagctgccttcagcttgaaacccggcagggtatctaaaatcgtggaaacggaatttggtttccatattcttcaatacatcgaccgccaaggagacaaagtaaacgtacgccatatcctgctccgtccccggatttccgatgaagaacggcaagaagcaatccagcatttggacaccgtgttgacttacatccacgacgggaaagccacgtttgaagaagccgcggcttatttctccatggacaaaaagaccagaaacaacggcggattgattttcaacgaggaagacgctgattccaaactccccagagaaaccatcgaaggagaaatggcccgtcaggtaaacaaactgaaagtgggtgaaatttcctctcctttcttggatcagacccgtacaggcgaggaatacaaggtgatcaaaatcaaggcttactatccttcccacacggctaacctggacgatgactggatcagctttgaaaacgggttgaaaagcaagaaacaacaggaagtacttgataaatggatcaaggaaaaacaagcaaacacctatatccatatcgacgaagattacaagaactccaaattccattatgacgggtggttcaagtaattgacaagctaagatttacaattaaagattgatgatttttccgcgatgagagcaggtttatgggttgggatattatgtattgtatggggactactccccttgcagacagttgtagcacagggaaataaaaaagctaaagtcaagatcgttaatgccgatagtttactggtgggaacgctaggcaaaccgtctaggtttatcgggaacgtacacatgacgcatgaaaacacactcatgtggtgcgatagtctctaccagtatgaactaccagactccaactatcttgaagcattcggccacgtgcgggtgatcaaaaacgatagcatccgtatgtccggtgactacatgtactatgatgccaacaaaaaactgattcaagtccgccggaacgtcacgctggaagatccccaaatgatcctgaccaccgattttctggattatgacggactattcgacatcgggtattacttcaactggggacaactgaaagatagccagaacacgttggatagtaaaaaaggaaactattttacccaaacaaagatagctctcttcaaagacagcgtgaaagtgaattctcccgaatacctgatcttctcggacaccttgaaatataacacggaaaccaagctggtttccattctgggacccacgaacatatacgggaaggaggacgaaaataacaccctctactccgaggatggatggtatgactccaacttgggacacgcagaactgtacaagaacaaccgggtcacgcaccagagttacgagggggtggccgataccatggtcatcgatagtataaccggaatggcttatctctactggaacgtcacgcttgtggacaccgtgaacaacgtgattgtgaaaggtgaatatgcgcaaatggaccgggaacaaaacaaggcattcgtcaccgacagcgccctgttaatcatggtcggaaaacaagattctcttttcgtacacggggataccctgttcatggatcaggactctgccaagaaccagatcttacgggcttactataaagtcaagttctttagtcaggacttgcaaggattgtgtgattcgatggtctacctttctgtcgactccaccatcacactctataatgagccagtggcatgggccagtggcaaccaaatgaccgccgaaaagatttccttgctcacgggaaatggaacgattaaggaattctacctgaataccaaggccttcatggtctctcgaagggaggaaaccgaaatgtacgaccagatcaaagggcgaaatatgaccggttatttccgggataacgaactctacatggtgtacgtgaacggtaacggggaaaccatctacttccccgatgataaaggtaacatcattggtgttaacaccgccaatagctccaacatccgtatcatgatcgacaaacggaaagtcacggacatcgtcttcatcaacaagcccgacggggaactcaatcccttgttcttggccgatcccgaagaagcccgtctgaaagacttccgctggttgaaatatatgcaaccattgaacaaattcgacatcttcaaagaaaccaaagaacccgaccctgtcgagaaagaagaggaagaaaaagaataatgtaatcaaatcaaacaaaggatgcattatgatgacaaacaaatcaagatcatataattccaaagccaagaaacaatcatcacagcataagcaccttcaatctatcaacacaaagcacaagaagagcatcaatctttatacccagcaagcaatgattgatgcaaaagaaggtaacacgatcaaatgtgataactttgaagattatttaaagcacttaaaattctcataatcttatcagaattccctaacgctgttcatagtatattttttacatttgtgaaaaataaaacgatatgcagctccggaaaaaccttaacctctacttatcgggcatcgtagtcttcacgctgactatactcttgttgtccacagcctttgccctcgacgagagtttagggaaccggatagctaagattttttggttctacaaagttattatcgtggcaggaattgcctgcataccactcgcatggatgcgtcctttccgcttttcgataactgacctgctggttctcctttacgcgggctataccctctgtaacgactacttcgcggggacaatcgcacccacccgaacgagcctcttcatcttgatcatcgtcacgtatttcatattccgacggctgacaacatttgccccgctcggtttcacgcatgcggcactcttgctcaccggggcaatagaagccatctggggactcgcccaactatacggttttaccccctcccaacacagccgtttcgaactgaccggatcattcttcaaccccggtccctattccggatttctagttgccatactaccgttagctttatactacacgcttaccgcctgccggatagcccgcatcttgtcgggagtgattctcgtacttctcctgctcgtcctgcccgccacgttaagccgcggggcttggttagccgccatcgcgggatgcggaattgtactaggttactactttcacctctataaccgattgaagtttttatttcaaaaacatcggctcgcctccttcatcgcaacgatctgtatattcctcctcgtcaccgggactctcatcgggatataccagttaaaaaaagaatctgccgatggacgccgactcatctggaaagtctcgtccacccttgtagcctcccatccggcaacaggcgtcgggttcgggcattttgccggggcctacggggaagcccaagccgcctatttctctgccacggagcgtcccgcgggagaagaactcgtagccgatgcccccgagacagccttcaacgaattcgtgcaaatcacgacagaaaccggaatcatcggtttattacttttcctgacaatcattttttgggccttcaaaaccgcccggcatcctgacaataaagtcgcggcaggcgtgaccggttcgttagccgcgttcctcgtttttgcctgcttttcctacccgttcagcgtgttgccccttctcatcctcttcacgctgctcttggcacaatgtaccccgatacaacggggttcccgttggctctccggcatcttctacctgttcctgcttctcccggtctatttcctcgccaccgggcaacaggaacgggaacaagcctacaaacgctggaaatccgaacaaatctatttcaacatgcagatattcgaacgcaccgtggataattacaagaaactctaccctctcctgaaggatcaacccgcttttctctttgaatacgggcaatgcctctcccgcacgggacaacccgaagccagtaacctcatccttgaagaggctgcccgcctgtctgccgatcccatgatccgtaacatcatgggcaaaaactaccaaaccatgaaacaatatccccaagctgaatccgctttcttgaaagcctcccacatggtccccaaccgcctctacccgctctacctgctcgccaagatgtaccacgaaagcggccaaaccgacaaggccatcgccaccgcccgcctgctactcgaaaaagcccccaaagtcccctcttccgccgccgaggagatgaaacgggatatgcagaaactaattatagatactcaatagagtcccattttatttattacaaattagtaatgcccacgtcgatcacacttattgccggaatgacggtcggaaccttcgtcagtttattcatcattcccttgttttattactatttagaacgtatttttatctcaagaaaaaaatgaagaaagtaattaaatccatattccagtacgtgggagccgtcctgctggccatcgtgattgccgccctgttgcgcttttttatcgtggacttttacagcatcccttccgattcgatgtacccgacgatcgaaccgggagattttatcgtggtgaacaaaatgtacatgggagcccgcttttacaaaaacttcgactttctggatggcgcgcacccggaaaccgtgcgggtaccggggttctcttccctgaaacgcaatgacgtgatcgttttcaactttcccacgcacacgaacggtcgctgggatatggatttaggaacattttacgtgaaacgctgtatcgccctgcccggagacacgttatcaatcatcgccgggatcaatcatatcaacggccaaaccggctacggaaacatggaggaacaacaacgcctgcaccattactgtggggagtatgccccgggaatttacaacgctttccccttcgattactggcatcgctggaacatccaagacttcggtcccctgtaccttcccgccgcgggaaccactatcaccattgacacgttaaacttttcgctataccgccacctgatcgcttacgaaacccaagcacccgtacactcgcaagatcgccaactctacatccgtgactccttgatccgtgaatacacgttccaaaaaaactggtacttcgtggccggagaccaagtcttcaactcccgggattcccgatatatcggtcccatccccgaagactttatcgtgggcaaagcctcgttcgtcctcacgtcaaaagacccacacacgaaaaaatacgtgtggcaacgctttttcaagaaaataaaataaggggtccgcataacacggacccctcatgccaccacgatcactctttgtttacttcacgacaaaagtgtaaatatcttttacgacatggctatatccctcgtttgtaattcgaatcgaaaccacatacttaccagctggagctttatgttctaaaggataatagaaacttccgtttcctataatcctcaattcctgtttaaataccattgcatctccaccttctgtcgcagttacttcttcgatagaataaatcatcggatcagttccttctataccctgaataggttgtgttacccaaggtgcgttattctttatacgtagggcatccacaacttcgtctagatcctcgatttgaggtatttccatgttatcaggtatatactcggcattttcagtctctaaatatcctaccgtaacatcattacatgcaacaagaaacacgacacatattaaat

SEQ ID NO: 93 - DNA, 11776 bp, Butyricimonas faecihominis
gtaaacacctgcacggctataaagttatttaaaatacacttaccatgaaaaactatttaattctactctgtctgatactcacgatgataagttgcgggaaaaaatcatccatcccggagttgatgggcatcccggatgattcacaaaatccctacaccataagttctacccatgttggctccattaccagaggtacaaatattcatcaactgtactccatattccctgcgaaacaaatcaagctcatcaaaaacaaaggtggattcttcaatcaagaatttgatgattacaatgtatatgacaataacggcaaactcctttttatagccaccccggaagttgccggagacactagttcttttattaatcgcatcatcattcgggacacctcattcaaaaccccggaaggaattgggctgaattccaatttaggacaaatacgggatgcctatcacaacataaactatctcccttcctcgggagagatcgtcgtttccgttccgaaagtcagcaccagtttcttaatcaacaaagcaactctggatgattcttggtgggataacaatacaaaccagatcatcgaaaaaaacattcctgacagcgcccaaatagatgggattgtcgtgttctggaacacgaaagaagcccaacatattccggccgtctttacagcggcattctggaatgaaatgcttacaaaactaattacatggtgtgtcatccagctcccgtcaatcgctattctcgtcattttattcgtttcattactccgagccttacgattcacaacccgaaaaatgaaaaagctcgccatcaataaagcccataagactgaaaacattgacaacaacgaggcggaaaaacgaattaacacgctcacggggatcatatacggtatcggaagaatctttctttgggtgatcttcctactgatcttactcggaaaattcaatatcaacatcgcccccatcctcgccagtgccggaattgtcggattagcagtcggtttcggggctcaagaattagtacgggatttcatatccggtttctttattctcttggaagatcagctacgcaccggagactgggcggtaattaacggaacagaaggactagttgaaaaaattgaattaagaaccgttactctacgggatagttcaggcaccgtacacattttccaaaacgggaaaatagacacgctctccaacatgaccaaagaatggtctgccattgttctgcaaatcgggatcggttacaaggaagacacggataatgccgtcatgctcatgcaacaagtcggagacgaaatgttcaatgaccctgtttacaaagaaatgatgctcgaacccgtggccatcagcggggtaaacgactttgccgatagtgccgtggtcattcgccttgttatcaagacaaaacccatgcaacaatgggccgttggccgggaatatcgccgtcgtctgaaaaaagtatttgatgccaagaacgtggaattccccttcccgtatcgcacgctaacttggggagatagttctaaccccataaaactgaaaatagaaccggcagactcagactcgaaataacttttatcttttagtttttaactttcaattcgcacgcacatggcccgttttcttaaagaccgaacgaaatcaaaaggagccgcacccggctccttgatcttcatcggcaaacaaaaaatgacaaaaaactccattcaggttattcaatacacttcagaaggcctgaaagagttctttcccgaaacgatggaaaacattgttgacatcgtgtccaacgaccacatgacttggatcaacatatccggcctgcaaaataccaaactgattgccgatatgggcaagaccttcgatgtatcttctctatttttggaagacattctaaacacggaccaacgtccgcggttcagcgaagaatccgaccatttatatatcattgccaagtccttctatttcggcaaggacgacgggatcgtacacatggaacaaatctcttttattgtcggatctcactacctgattaccattcaagaaacagatgccgattattttaaagacgtgaagaaacgcctatacgacggcaaaacccgcatccgctctttcgggacggattacctctgttacgccctactggacaccctcgttgacaactatatcattaacctagaaatattaggagccgccatcgaagaacgcggtaaaaccattttagaggcagatgccaaagtgatcgaggacctttatcattacaagacagaactttcatacatccgaaaaaacgtacgcccgttcaaagaggtcaccacccgcttcaccaattgcgactcccccctcattaatcaaaacacctacacgtatttacacgacttggatgatctggttgtacaggctcaagaagccatcgagatatattattccatgatatccgaccaaatcaatctttaccaaaccaacatcgggaatcgacaaaacgatgtcatgaaagtactaaccatcttctccacgatcttcatccctctcacctttatcgccggaatctacggaatgaacttcgaatatatccccgaattaaaacaccactacgcctacttcatcctctggggcatcatggtcatcatcaccatcaccatgctcctttacttcaaaagaaaaaagtggctctaataatttcagatttcaaattttagattttagatttttatcacacaatctaaaatctaaaatcatcaaatctaaaattatcaagcttgtccctgcggttccaaatccatcgggaacatgggtgcaatagggccgccttccggtaaattaatcttcccgtaatcaatctcaaatctccgaacattatcctgtaatgccagtaacaagcgttttgcgtgttccggggtcaaaataatacggcttttcacttcagccttaggcatccccggcataatacggataaaatcaataataaactcggaggaagaatgagaaataattgacagattcgaataagttccctgtgcaacatcccgatctaattcaatatcacattgttgttttttctcttccataatagtccttggttaatagtttatacaaacaataaaggcgccttgcggcgcctctatctatttttatttttccatcctttcgagatccgccttagaacctacaatcagacttctaaattctttcatacctgtacccaccggtatcaagtgaccgcaaatcacgttttctttcaatccttccaatggatcgactttaccgtaaattgcagcttcattcaatactttcgtggtttcttggaatgatgcggcagaaataaagcttgccgtctgcaatgcagcacgggtaataccctgtaatacctgagctgaagttgcgggcacagcatctctagcctctaccaccttcaagtctctacgtttcaattgtgagttaatatctctcaacatacgtacagagataatctgtcccggtttcacccgatccgaatccccggcttccagtaccactttctttccgtagattgcatcgttttcttccatgaactcactcttatccaccacctgattctctaagaatctcgtatctccggcatcttggatcaataccttacgcatcatctggtgtacaatgatctcgaaatgcttatcattgatcttcacaccctgcatccggtatacatcctgtacctcgttcacgatatactcctgaaccttgatcggtccctcgatattcaaaatatcagtcggggtaattgcaccgtcagataacggggtacctgcacgtacataatcgttctcctgcaccaaaatttgtttagacaaagaaaccagatatttctttacctctccggcttttgatgtcacgataatttcacgattaccgcgtttgatcttaccgtaagttacctcaccgtcaatttccgatacaacggccggattcgacgggttacgagcctcgaacaactcggtaacacgcggaagacctcccgtgatatcgcctgctttaccaacagctctcggaatcttggcaatggtactaccggcaacaacctcagctccttccttcacgacaatgtgggcgcctaccggcaagttgtaactcttcaccgtgtttccttctgcatcattgatacacaaagcaggcgctttcatcttgtcacggaactcaataatgatcatctccctaaatccggtggtttcatcggattcttccttataggtttcaccctcgatcaagttttccaacccaaccgtaccggagaattcggtaatgatcaaagcattgaacgggtcccattcacaaagcaattcacccttgctgatctcctgtccatccttcacgaacaacttagcaccgtaagggatagcgtgagaaatcaatataatattcgtgttcttatccaatatacgcaactccgtcaaacgtcctacaaccacgtcacaggtcgttccgttatcttgcgtgtactcaacagaacgtaattcttcatactcaacgtaaccatcatacttcgccttcaaagagttttcgctggaaatatttcccgcagtacctcccacgtggaaggttctcaatgtcaactgagtacccggctcaccgatagactgtgcagcgataaccccgacagcctcacctttctcaaccatacggctggtagccaagttacgtccgtaacatttagcacaaacgcccttcttcgcctcgcaagtcaatacagaacgaacttcaacacgctcgatcggggagttctcgataatatcggcaactacctccgtgatctcatctccagaggccacgatcaattcacccgtattcggatgataaatatcatgcacggaaacacgtcctaaaattctctctgacaaagaagacacgatctcttcgttattcttgatagccgaaatggtaatacctctcaacgtaccgcaatcttcctcggtaatcgtgatatcgttagccacgtcaaccaaacgacgagtcaaatatccggcatctgcagtcttcaacgcggtatcggccaaacccttacgggcaccgtgggttgaaataaagtactccaacaccgaaagtccctctttaaagtttgccaagatcgggttctcgataatctgtcccccggtagcacctgatttctgcggttttgccatcaatccacgcatacctcccaactgacgaatctgctcacgagatccacgggctccggaatccaacatcatgtagatagaattgaatccttggtcatccgctgccaattgtttcatcaacgtggcggtcaagttcgcgttcacgtgtgtccaaatatcaataatctggttatatctttcattattggtaatgaatcccatgttatagttcgccattacctcttcaacctggtcatatccttcttgtaacaaatcttgtttgttctccggaacgataacgtctcccaagttgaaagacaaacctccctcaaatgccttacgataacccaaatccttaatatcatccaagaatttagccgtcacgtccacaccgcaacgtttgaacacgtcaccgataatgtcacgcaacgcttttttcgtaatcaacgtattgatataaggatagtttttcggggtgaactggttcaaaatcacacgaccaaccgttgttttgatcatatgcctaatcggttgaccgtccttgtccacgttatcaatcttcacctcgatttcagcatgcaagtctacggctctctcgttgaaagcgataatcacttcctccggagaatagaacttcaagccttcacccctcacacccttcctcggtttcgtgatatagtacaaaccgagcaccatatcctgagaaggcaccgtgataggcgcaccgttagccgggttcaaaatgttatgagaacacaacattaaaatctgagcttccaatacagcttcgttacctaatggcaagtgtacagccatctggtcaccgtcgaagtcagcgttgaatccggtacaagctaacgggtgcaaacggattgctttaccctcgatcaatttcggctggaatgcctgaatacccaaacggtgcagggtcggggctcggtttaacaataccggatgacctttcaacacgttttcaagaatatcccaaacgatcggatcacgacgatccacgatcttcttggcactcttcaccgtcttcacgataccgcgctcgatcagtttacggataataaacggcatatacaattcagccgccatgtctttcggaagaccacactcgtgcatcttcaagtccggacctacaacgattaccgaacgtgcagagtagtcaacacgcttacccaacaagttctgacggaaacgtccttgtttacctttcaaactgtcggaaagagactttaatggtctgttattttcaatcttaaccgcattggatttacgagagttatcgaacaacgaatctacggcctcctgtaacatacgtttttcattacgcaagattacatccggagccttgatctcgatcaatctcttcaaacgattattacggataatcacccgtctgtacaaatcattcaaatcggaagtagcaaaacgacctccgtccaacggaaccaacggacgcaattcaggcggtatcacagacaacaccttcacgatcatccattccggcttattaatttctttactttcacggaaagcctctacgacctgaagacgtttcaacgcctcgttctttctctgttgagaagtctccgtatttgctttatttcttaaatcgtatgaaagatcatccaagttcagacgttccaacaacatggaaatagcttccgcacccatctttgcaatgaacttgtttggatcatcatcatccaaatattgattatctgttggaagtttatccagaatatccaaatactcttcttccgtcaggaaatccattgttttgataccggaatcccccatgatacccgggtttacaaccacgtatctctcgtagtaaataacggtatccagtttcttggaaggtaaccctaacaagtaaccgattttatttggcaacgacttgaaataccagatatgagccaccggaaccaccaactggatatgtcccatacgctcacgtctaaccttcttctccgtaacctcaacaccacaacggtcacaaacgatacccttgtatcgaatacgtttatatttaccgcaatgacattcgtaatccttcaccggaccgaagatacgttcgcagaacaaaccgtcgcgttcgggtttgtaagtacgatagttaatcgtctccggttttaatacagcaccactggaccgttccagaatttcttccggggaagccaatccaatagcgatcttagtaaaattttttactttattgtcttttctgaaggccatattttatctgttaattgaaaattgaaaattgagaattgaaaattaattcttccggttctccattttcaattttccattttcaattttccattatataagattaacgctcaatcccaacccgcgaagttcatgcaacaatacgttgaatgattccggaattccgggtgtcggaagaggttcacctttcacgatatgctcgtaagttttggttctacccatcacgtcgtcagacttcacggtcaagatttcctgcaagatgtgtgatgctccgaaagcctcaagagcccaaacctccatctctccgaaacgctgacctccgaactgagccttacctccaagaggttgctgcgtgatcaacgagtaaggtccgatagaacgagcgtgcatcttgtcatcaaccatgtgtcccagtttcagcatatagatcacgcccacggttgccggctggtcgaaacgttctcccgttcccccgtcatacagataggtggttccgaatctaggcacacctgcctcgtccgtgtatttgttgatatcgtccaaagaggctccatcgaaaataggagttgcaaacttcaatcccaaattctttccggcccaacccaacacggtttcgaatacctgtcccaagttcatacgggaaggtacacccagcgggttcaaacaaatatcaaccggagttccgtcggacaagaacggcatatcctctacccttactacgcgggatacaatacccttgttaccgtgacgtcctgccatcttatcaccgatttgcaatttacgtttcttagccacgtaaaccttagccatcttgataattccagaaggaagctcgtcaccgacggtagcgttatacttcttacgtttaatctgaccttcgatctccttgtacttgatgatataattatgcaacaagtcacgaatcatatcgtttctctgcttatcggtcgtccatttgttcgggttgatttgcaagaagtccatgttctgcaacatcttgtaagagaacttcactcccttcggaacaatatcctcgttcaagtaattcttcacgccttgcgaagtcttaccatttaccaactcgaataatttgtcgatcaataaagtagtcaaatctccgactttacgttggaattgttcatccagttcggccaaaatgttcttaccggcagctttcgttttccgatcacttaccgtacgttggaacaacttcttatcaataataacacctttcaatgaaggagaagctttcaatgaagcatctttcacatcaccggctttatcaccgaagattgctctcaacaatttttcctccggactaggatcggactctcctttcggggtaatcttaccaatcaggatatctcccggttgaacacgagcccccacgcgaatgattccgttttcatccaaatccttcgtggcctcctcacttacgttcggaatatcagccgtcaactcttccaatccacgtttcgtttcacgaacttccagagaatactcgtccacgtgaacagatgtaaagacatcattccgcacgatattctcggagatcacgatagcatcctcgtagttgtatcctttccacggcatgaatgccactttcaagttccgtccgagtgccaattctcccttttctgaagagtatccttccgtcaatatctgaccttcttccacacgttgaccttttctcacaatcggtttcaacgtgatcgtcgtactctggtttgtacgttggtatttcggcaggtaatattctttcgtatcaggttcaaagcttacaaaagcctcttcctccgtacggtcatatttaacaacaatcttgcgtccgtcaacaaaagagatcactcccggtccctctgcgacaacctgcgttctggaatccttaatcagattagcctccaaaccggttcccacgatcggggattgcggggaaataatcggaactgcctgacgcatcatgttcgatcccatcaacgctcggttggcatcatcatgctccaagaacgggatcaaagacgccgcgatagatgcaatctgattcggggcaacatcgatcaaatcgacatcctctccggctgccaacgggaagtccgcatcttttctggcttttacccatttattcgtaaacttgccatcttcatcgatagcagaacttgcctgagcaattaccaactcctcctcttcctctgccgaatagtagcgtaccccttcctcggaaagatccacgataccattattcaccttacggtaaggagtttcgataaatcctagatcgttgatcttagcgtacacgcaaagagaagaaatcaaaccgatattcggtccctccggcgtctcgatcggacacaaacgaccatagtgagtatagtgtacgtcacgcacctcgaatccggcacgatctctggaaagacctccgggacccaaggccgacatacgtctcttgtgagtgatctcggccaatggattcgtctgatccatgaactgagataacgcattcgttccgaagaacgagttgatcacggaagacaaaatcttcgagttgatcaaatcaaccggggtgaatacctcgttgtcacgcacgttcattctttcacgaatcgtacgggccatacgggccaatcccacgccgaattgattatataattgttcgccgacagtacgtacacgacgattactcaagtggtcaatatcgtccacgtcggtcttagcgttcaataaacgaatcaaatatttgatgatctcgataatatcctctttcgtcaaaacacggatatccggatctgttgcaagtcccaatttcttgtttaacttgtaacgtcccacgtcacccaaatcgtaacgtttatcagagaagaacaacttgtcgatcacatcgcgggcagtagcctcgtcaggcggctccgaactacgcaactgcctgtaaatatgtaatacggcctctttctccgagttacaggggtctttttgtaacgtgttatatataatggcataatctgccagattttgcatctccttgtgaagaaggatcgtcttcgcacctgactcgacaatcgcatcaatatgctcaggctccagcactgtttcacggtcaacgataatctcgttacgctcgatagaaacaacttcaccggtatcttcatcaacgaaatcttcaatccaagatttcaaaacacgagcagccaaccgtctgccaacgactttcttcaaccccgtacgggaaacattcacttcatcagccagaccaaatatttcaagaatatccttatccgtttcaaaaccgatagctcgtaaaagagtggttaccggcaattttttcttccggtcgatatacgcgtacatcacgttattgatgtccgtggcaaactcgatccaggaacccttgaacggaataattctagcggaataaagcttcgtaccattcgcatgaatactctgcccgaagaaaacaccgggagacctgtgtaactgagaaacgaccactcgctctgctccattgatcacgaaagtacctttcggggtcatgtaaggaacatttcctaaatatacatcctcgataacggtatcaaaatcttcatgttccggatctgtacagtacaacttcaatttcgccttcaagggtgcgccataagtcaatccctgacccagacactcctcgatcgtgtagcgaggcggatctataaaatagtccaaaaattccaaaacaaagttgttccgagtatcagtaataggaaaattctccttgaaaaccgtgtaaaggccttcattctttctgttctcaggcgtggtacctaattgaaaaaagtccttgaaagactttaattgcacttcaagaaaatcagggtattccaactgattctttatcgatgcaaagcttattctattgtttgaattatatgaagacatctattattttttttgaacctaaacaatcataacaacaaaatggtttagagtccacatgagactctaaacctggaaaaaccaaccggttttattttatttaagttcaacttcagctcctgcctcttctaattgagtcttcagcgtgttagcctcttctttagaaactttttctttcaatggagccggagccttgtcaactatttctttagcctctttcaatccaagaccggtcaattctttcactaacttaacaacagctaatttagcagcaccagctgacttaagaattacatcgaattctgtttgctctgcttcagcggcagcagcaccaccagctgcaggagcagcaacagctacagcagctgctgcaggttcgattccgtactcttcttttaaaatatcagctaattcttttacgtcttttacggtaaggtttactagctcttctgcaagttttttcaaatctgccatttctatactatttaaaat

SEQ ID NO: 94 - DNA, 11674 bp, Butyricimonas faecihominis
attttattaataacaatctattcaattcgtaaatgtacaacaaaacaattgaaaacggaaaatggaaaatggagaataaattaattatctttttctggcaaagaaattttttaccaattctccacattcatcctctaaaactccggtaaccacgtttgtcttcgggtgtaacacggacggggaaagccgggcatacccccgatgcgggtcggcagccccgtacaccaattctcccaattgagcccaggcaagcgcaccaccacacatgacgcacggttctaacgtgacatacaaggtacaatcatttaaatattttcctcccaataaagaagtcgcggacgtgatggcaagcatctccgcgtgtgccgtcacatcattcaaacgctcggtttgattatgggcccgggcgattacccgacctttacaaacgactactgccccaaccgggatttccccttcttcttcagccaagcgggcttcttccaacgctttccgcatgaacatttcgtgcttatccataaatactattttttatattctctttcttttctccacgaaacccatgtatatatcaaggccgaaacgatcaatcccacggtcacaagcaatgccagcaccaaccaccagttggcagactcctgtttccggttcatctcttcgatctcccgcaagaatttttgattcttgtattttttcaacacttgacgataacgcccgttatcataaaaggaatcgtacaactccaaaaccgaatcccgtcgatgcaagacgtcacaaaacgcctgccgattctccatatcctcgtgatattcgctcagcaattccaacacccgagcctgagccaattgactctccggggattctgcttttttataactaatactttccagatacgcaacagccttatccttttcccccatctcccacaaacaacgcccataccttaaataattcatgaacatcacaccgggaaccttcaattgattttcacgagcatatatctcgtaggagtctatcgcactttttaacgccatcaaagccgagtcccgaagtccctcatggataaaagattcggctacacgagcaagcaacacgttacgcatcccacctcgtttctcattcgccagtccaacccgcaatatctcccgagccttttcgtgataccccaacccggaataagcctcggccacctgtatcccataacgtccaaacccgcttgaatccggcaactcctttaaaacctcttcataccagagtaatgcctcctcatgccttcccaactttttcaggcttgccgccatctgctcgtaaaaaggctttaccttaccccggaatcttgagcgtcgtaaaaggcgataggcctcctcgtaacaggcatattgttcttcatattcctgcaaaaccccgtataaagttgctttcaagcgataagcctcaatctccccctccgtatccgaaagtccccgatacaacgacaatgcctgatccacggctctaaaagcccggtctatatcgatcgatttaaaaaaacaagctcccaagtaatagaatttagcctcttcctcccgggtaaacaccaccttggaaggtacccggctgataaaacgaatggcctcttccgcacagctatcccgcaaaatcaaagaaccgtaaagccgggttaattccagcgccaccagattcttcacgtcccgcggagcaatccggtaggcctcccgtaagtaaatccgagcctgttgcatctgctccaccctagtggaataacagcttcccgctgccaacaatactttcgaacgaaaaaaattaggtaactctgcggacacctttaccaaagaatcaaacgcaggcgacaacatcacagagttctccaactccctgcacaattctgctgttttcgctttctcatttttccgacaagaagacaacaaaaacaaaattgttatccccaagcacattatgattccaacttgtctcattcttgctaattttgtcttctctcaccaagctaatagtctattcactaccatgcacatttttattgaaggtaaaaatccaaattttccgtgagtgatacaaattttcacccacattttttcatcctgtacatccactaaattccttcctgcatattttttggtttaaataattttatccttacctttatcttttgattaagtaatttactcattaaaataacaattgctatgcagacaattgataattacaactttaaaaacaagaaggcgcttatccgcgtagacttcaacgtacctttaaatgaaaagttcgagatcacggacgacacccgtatgcgggcagccgttcccacgatcaagaaagtgttggcgggaggaggttccgtaatattgatgtctcatctcggacgcccgaaaaacggaccggaagacaaattttcattaaaacatatccagaaacacttggaagaactgctaggtgtacccgtgaagttcgccgatgactgcatcggggaaagcgcagtaaaaactgcagcagacctgaaaccgggagaagttctcctgttggaaaaccttcgattttacaaagaagaagaaaaaggagacgagaatttcgctcaaaaactggcttctttagccgacgtttggatcaacgatgccttcgggacagcccaccgggctcacgcatccactgcagtcatagctaaattcttcccgaacgacaaactattcggctacgtcatgcaaggagaattggaaagcgtggataaagtaatgcacaaccccacccgcccgttctcggccatcatgggaggctccaaagtttcatccaaaatcgatattatcatgaacctcatggataaggtggataacctcatcctaggtggtggaatgacttatacgttcaaaaaagcactgggcggtcatgtcggcaattccatctgcgaggaagataaactcgaccttgctcttgaaatcatgaaactagccaaagaaaaaggtgtaaatcttgtattggcaaccgacactgtcgctgccgacgctttcgacaataacgccaacacccagatcgttccttccatggaaattcccgttggatgggaaggattggatgtaggcccggaaagtatcgcctccttcaccaaggtcatcgagcaatccaaaaccatcctttggaatggccccgtgggagtattcgaaatgcctaaatttgccgtgggaaccaaagccatcgctaatgctattgtgaaagccacagcaaacggcgccttctccttaatcgggggtggcgactctgttgccgccatcaaccaattcggcttggccgacaaggttagctacgtatccaccggaggcggtgccctgctcgaatacatcgaggggaaagagttaccgggaatcacggctattagagggaaataacgcccttcataataagtaaatataccctagcgatttaaatcgttagggtatatttattatctaacactaatttccagacaactctttcaataacaactctcctaacaccggatcggaaggtctacgagaagaggcatcccatacttttcctgtcgggtccaagataataaaacgcggaatcccatgaacagccatttgttgcatcaaaggatgtttatatgcccgggaacataacaactgttctccatccatatccttttgctttacaaactttttccaagtatcaacatgtgtatccaacgagatcgaaacccatactaacggtaaatctttcaaccgatcttccaacctcttggcataattaatctcagcaacacacggattacaccccgtggaccaaagatcaacaaacacgtatttccctttgaattcagataaacaaatagtatctccatgaatattcgggaaactatatttactaaaatcaagtcctgacatatcccgatacacactttttttcaattcttgagcgcatacagccaattcgttttttcccgctttggatttcacgatacactttgctttttgaagtcgtccctccaaacccttcacgtttccttgtaacaattctaactttatcgctcgtaacaaataagcctcctttaacacaggatcctcaatcacactcgccatatcatttaagtaagttacacgagaacctatcttaattttttcatttcgtacctgggcgtacaaccactcttgaaacaaagcaaaccaatctccggtaaacgtcaattctctgacccatttcacgttcaacacgggatcactgtaatcaggagccacatcgggaggattaaaaactttcccgaaagccttcgaacgcagtatcatcatatacagattttccagtaaccggaattgcatatatcccttgactatctgttgatctttcattgataaaccagaagtttcaatcactttttcccgctcttgatacccacgatacaacgcctcggcataaggttttgtaaacgtttttatcccgtctgttttcggcttaaactcttccgctaacacacgtcgtaataaattatttaccccagcataagagccttgaaatttctcatcttgagtcaaatcaagattaatcttcgctcccggagccacaaacaaattacccgaaaaaacttgccgaccgatacttatcgataaaaacataggttctttgactggaaaagtaatactatattctccgctgacatcagcctccaccaaccgttgtgtcatcccaacttgccgttcaaccaaaaggtgcatcggttttccagacgctactcgtcctgttatcgtcacaaccgtatcctgtttttgagctatcgcacaaaaggacaaaaccaaaacaagtaatattaaaaatacctttttcatgtctccctcaatttaatttagaacgatatttcgcaaaaaactctttcgtaatattcttcatcttatcattatccaatgcatttatcattctttcttccaaagcgacataacgtgcgatctgttcttcacttcctttttctatgataaaatcaaggaaaggagctttccacaaaaaagcatgcggcaaattctgcacatctttttctaacagacaaagcatatcgtctatattctggctattctgagctttcacaaagtgaagagataaaaggatgccttccttaccgacaaaatcaaccgtctctaactgcttactcaaaaaagcaaacagatcatccacctgaacattggatttcaatcccgtgagtaaaccataataattatcatacaatcttttatccaccaccttcttaccgatttgcttatcgaaatctgctttatgagctagtacataagcaaatcgctcgtcttgaggaccaacttcatcttgatcatacagataccaattctccggtaaacatttttcttgatcggaaagttgtttgaactcttcccctgttaatgccttcacctcatcccggtctccagcatcctccaaacttttacgatacaaagtacgttgttccacatctaattttccctctttatagagcttttccagataataacgggaagtcctttcttcagctccccgtttaacacactccatgaagttttctgttttccgggaacccacgatccggtgttgcacggctccatcgggacgaatcatcaggaatgtcgggtaagatctaacatgaaaacgcccgtttaaatatctcccttccccttgctccatatcatatttcacattcacgaaatgctcgttgaaaaacgcacccacctccggaagaacaaagacattattcaacatatatttacaggggccacaccaactggtgtagcaatccacaaaaacaagtttgttttcagcttttgctttatttagtgcttcctgaaaagttaactcttgaaattggactccctgctcttgagcttcaagccgtgagaggctacatactatcaaacaaaatatcagaatttttttcattataaccctatttcttaaattatttttctaattccgcatccaataatgcctttaacctcggatcagaaggacgaggagaatcaatcgtaaccacctttccttggcgatcaaacaccataaaacgaggaatccccttaattttataatctttgacgatctggctccaaccactggcaaataattgtatgccttccagtccctctttatccaacacatccaaccaagcctgatgatctttcttttcatccacggacacccctataaaaacaacatctttgccccgcatctcttcttccagcttaattaaatacggtatctctttccgacaaggaccacaccaagttgcccaaacatccaccacgaccactttccccttgaaatccgaaagagaaaccaatttcccgttccgatccggataagtaaaatccgctgcttttgctcccttattccccacgtacaatttagcactcagttcatccatcctccgatgatgactttctgttgtcaaatacttagaaaaataagttacgatctcatcatatttctcgtacgttttcgcccacccggcatgccttaacacgatctccgccttcagtagatcacacggaacccattccaattgatcaacaatggtttgcttccggttaagcttttgcaacgcaagattcgtgtagctcatcaaataatctaccccgtaaggctgccgcaacaagctgctgtcgttcaatttatctttcgacactaacgtagaataataatcaggataatcccccggctcgggacgacatcctctcatcacagcccgatccaccttgacagccgataatatcctcaatgcaaaatactccacgtcatactccacggtttgcctcagcaactcttcaaaaaacggattctcagaacgaatctccctcttaaactcctctactttcggcaaaaaatccatgtaatacgggaataactctttatacgtgaaaaagataaaatccttatgatccaccctccgacgcactggttcaaatatgctctcccaccgggctagcaataaattctcgggagtattacgattcgttataactaacgtatcttccaatatattcacctctgcccggtctcctgcctctaaataaactcggattcgttcactcgttttttcacccccaaccgtgtagaatccgggacgagcaggctctatcgcaaacccgtaccacccgttcttccccacccgagttttactaatcaacgtctcggcaccattcaccacttcatacaacccgacctcgtccattttttcccgatgcacctgtccctttacttcggcaaaggcgtccaatgacagtttagccaactcattatcatgttcatgtaacttattcccactaccacaagcggcaaaaagcaacgcaatacaaagaacaaagatctccttgattacaataaaaacattcaatttcatattgttacatttttctcatccatgttcattaaaagcattacttgcctaacgcaccctccaacatctttttcaaagctggattcgaaggacgaggagcatcaaaagaaaccacgttccccttccggtcgatcacgataaaacgcggaatcccgttaatcttgtaatcctttgtaattttactccaaccgctagcaaaaacttgaatacctcctaacttctcctgctctataaaatctaaccatttttgtttatttctagcctcatccacggacactcccaagaaaatgacatccatacccttcatctcctcctccaattttttcaaatgcgggatctctccccggcaaggagcgcaccaagttgcccagacatcaatcaacaccaccttacccttaaaatcagaaagtgacacttgtttaccgttcacatccggataagtaaaatcagcagcgacacctcctgcacgggtcttgtacaacttagttcccactgcttccgctcgggcttttaaagagggagataaccaatatttttcgaacctcttcatcccgtccaaatactcctcgtacgtgcgatactcagaaaaaaaacgacttacaacaaactcccctctcagccgatcacttgggatcgcctccaaacaagtctgctcgtacaaggccttatccgccggatttacatccttctcgttcacagcaaaaatagagtacaatctcagcatcgtaattccattcggaaaatccaacacacgttcatccgcaaatttcttcgaattaataatctgcttgtaatactcaggtcgatcagacaccttcggatgtttcgatcgaggggtttgtaaaaaaacaacagcataataatccgtggcataatcaatccactctctcagcaatgcatcgaactccttgttaccactcttcaaaccagccttcaactccgacaacccggcaacaaacttttcaaaatcaggaaagaaatcctcatacgtgctgaatactctatcaaaaaacacactcttcagccatacatgataagcatattccacccatttatacaattgcacgttctccctcgtgttcttgcctatcaagttagccttgttttcttgtaactcgatatttatttcttccccccctttcacgtacacggggaaattcatccgctcatcctcccctatcacgtaaaacccgggtttctcgggcttaaccagaaaaccgaaactaccatccgcctccacccgacttaccgcacacaccaccggagtcccatccacggtcttaaataatttaacctgtgacaaccattgatccttcacttttcctttgattgccgtgaaatcctgagcacacactgctacaacacagcaaactgccgtgatcaataataatacctttttcataaataaatgatttatctttttattttatatccgctctaatccgttccaaattgaaacctgcccctttaagcacatactccatcaatgtataacgcgcttgtacgtaaggataagcttcatatttcttcataaactcctccttatcgtaatccagaacggcatccagataagcagcaaaatcattttctgctgtcgggacattataataagtttttccatcggatttatatgtagccaatgccaataatccaaaattctccggacaattttgctccacgtaagctttatactcgtcataactatccaactgtttatccatagccgcaatcacattattagcaaggtttacctcgctctcccatttttttcgttctgtttccgttaaatcatctctttccagttgagctaaggcctcttccttttttcccatgtaaagaactttcatatcataataggattgcatattatttactttcaacaaccgatccgcataagaaggcacgaacgtttcataatttaccccccaacattcttttattatagccggtgaagccgatgtattttcgaatgccttagttacaacagattgaaaactggacaaagaatcttgcaaagcaccataacaaatttcatgtaaaaatgcccgttggaagagagaatccggatttgattgctcgtatccattcaaagcgaaacctaaaaccccaaacccgcgataaacatacatgggcttcgttcccttttccatatcctgcacgatcaagattgccgggataaatacgtcaaccccatcaatccaagccagtaacttctcgttcagcaacttcaatagcggcatcattgcagccttactttccgggttagtaacatcaaccttattgaacgtgatcttagtctggatattggcaatttctgtcatatcgtaatccaaacgaagcacttcataataaaacttcggatctccgttttcatctttccatccccgatcctccatcccgatcgtatccttgtaaaaaattgcaagatcatatttctcatataggcgataaatcatatcatccacttcgtccatattttccgtaggagtaataacataccaatttttcacttccatcggagtcaacgtttcctccccggaacatgctataaatactcctattaacaaaatataaattaattttctcatagcgtttcctcctcttctttttcaattacaaaatttgccgtaactccacctctcacagggtttttcatattaccatcgcaaaattcgatgacactttgcgggatagggatcatccatgaaccaaaactattatcattatattcttccaacgttgtctctcccaccttctcggctattacgctcccacccgcatccgttgcaatttgataacatacatgttctatggcccgtttacatggataagtattgttcacagcataacgacgaagatcaaaccaacggtgtccctcgtaacataactctttccgccgttctaatcgtacaaaatcaacaagttcctttcctccggaaggaatcgttggcatctttttataacgatattgcatcaaactccttaacgtgcttacagcttccgattgtcccaaacaagcctgcgcctcggccttattcaaaaggatctcgggatatcgtaaccaccctccagttgacgcaggggttccggtatttgcataaacaaccgtatccatacttaccggatcatactcggaaatagatatttttgacttatactttcggggaaccaaattcttcgcataacgcgtccgactgaagaaacggtttaaacgatagtcattctcatcaaacaatccctcgaattcgggcgaacaagcatacgaccagccgttctgtttcaccgtacgagtcgttatcataacgatctcaccagtggctaataaatgatctatatctattcgactagatatctctaactctgcatcatctccaaaaatccaatacgcctcgtgtggcccgtgggaaaatatcgtctccacggattccaaagttgcaaaagattcggtgacaggcaaagaactcaaactcttcaccccgtatccctctatcttattcgcaacctcaatacaatcttcatatctttccatgtaaagataaacccgactcaacaaagcgtaacaagcatcaatacttccatgctgggcatttttcctaggtgaagacaacaacttaaaaaactcgattgcttttttcaagtctgcctcgatagatgcgtaaacctcacctaccgtatttcgtgaataataaatatcgatcacttcttccgacaattttaaaggaacaccccaagtagcattcggattactcttatcgtatggagccccgtatatatttgtcaacataaaataataccaagctctcaaaaaataagtctctccccccacttgattcaacgtctcctcctcgccgaacttatgctttgaccgttgttccggtatggctgaaatgatcgagttcaaaacagcgatacgtctataaaagtccgcccatatataatcttgcaccgctatccccgtcaaaccgatagcgggatcatccgcccatcggtaatatcctgccacgatttgccacgatcttgttttatattcctttgcaaccggagctggagcttcttttatatcatcatccatcaaatggatacacgtcataaaatctcgattctgtgtcttatttccaaatgtagctattgccgctcccggacaaatcgtcatggcggggtcttggtaaccacttcccaacaacaactcctccaaatccgaagcggtttcaatataagccaagttttgtgaatactcgttcaaaaaatctttacatgaggtagataatccacaaagtaaaactgcaaaccataatatac

SEQ ID NO: 95 - DNA, 11659 bp, Butyricimonas faecihominis
ctttgatatatagtatataatcgttaattttgcatattctcaaacataaatgattatgtgcaaaatagatgattttatagatgtgacaagccggtacatcgctgaattgcttgatttgagggcggacatcaggccggtcgaaaaggatgtcttgcatacattcccagccaatattactgccggttatacattttgtacggctaacttgttggggcatgacgtagttcttctgtatagtgcagacagttctgcatatactccggggcagatgcggaaacaaaaagaactggttgagcgaaaagcccaatgcccggtaatatttgtattgcgtacagtggcggcctataatgtacggcgtcttgtcagacatcgtgtaaatttcatcataccgcaaaagcaaatgttcataccggatttgttgatagatttgaaaccgcataaaaataatatcgggggaggtgaagaaacgcagattcctgcaattgcccaatgcataatcctttatcatcttgaagtaaagtctctcgaagggaaaggaacttatgatattgcagatcttttcaacgtgtcgtatgccaatgtaaaccgggcggtcagatggctgaaagataaagaagttatcgctttatccggcggcaagacaaagagtatgatatttcagttcaaaaagcgtgaattatgggacaggatgttgctgttcctggcgaaccccatcgagcggattgtatataccgatagtctgcctgatgaagtattttgtattagtggagtaaatgccttgtcggaatattcaatgctgaacaaggaaaaaaatgacacttatgccattgcaaaagaagaagctcgacggttgcaaatccggacagacaaggaatatggcgagacccgcatagagatatggcgttacaatccatgttttttctcaaaaaacggcattgtagacaaattgtctttatttctggccatgaaggatatggatgatgaacgcattcaaatagaattggaaactatgataaataatatgatatggtaagaggaattgataaattcagggagtttttcaccggatatgaaggaaactatgtcatcataggtggtactgcctgtgaaatgcatgaagaaatatatgcacaaactccaagggcgaccaaggacatagacattatactgattgtggaggcgctgtcttcggattttgctgcaaaattctgggagtttgtaaaaaccgcagggtacagacaaaggaataagggaaccgggaacggggaatgcaggcatgaatattacaggttcaaggaaccgggaaatccggatttcccgtatcagatagaactcttttcacgaaatatcggggttgtcaaattcccggacgatgcccacattacccccattccggttgatgatgacctgtcaagtctgtcagccattttgatggatgatgactattataattataccattgaacacagcacgttggaggagggcgtacatattgcgaacattgaaagtcttatctgtctgaaatgcagggcctatttagaaatgaccgagcggaaaagcaatggagaacaagtggacagcaaacatatcgtcaagcacaagaaagatgtattccggctggttgccatgcttgctcctgccgacacctacgaagttcctgattcgcttaaacaagatgttgacaggttttgcctggctgtcaaagaagaagtgccaaactctgattttttcaaatcggcaggacttaaaagcatttccggagaacagttattggaacaacttgaagccaatttcataacacaacaatgagaatccaatacgcatccgacctgcatctcgagtttcgggagaacagcagttttttgaagcacaacccgctggctgttgccggagaagtgcttgtccttgccggagatataggatatatcggagatgagaactactccagacatccgttctgggactgggcttccggaaattacagccgggtcatcgtggttcccggaaaccacgagttttacaagatgttcgacatagacaagctgtataacggctggtcgctcaaaatcagggaaaacatcacctgccactataatgccgttatcccattgggtaacgatatagaattgatcgctaccacactgtggtcacatatcctgttgcaggatgcctatgaaactgaggcagccatcacagatttccgcaggatgcgttacggcagcgaaccgctggactggacaaggttcaatgacgaacattcgcgctgtttccgttttctggaacagagcgtaaaacaaagtactgccagacatctcattgtcgccactcatcatgtaccgtcattcgaactgatggcgccggagttcaagggcagtccgctcaatggggcatttaccgtggagcttggcggtttcattgcagacagcccgattgaatactggatatatggccactcgcaccgcaatatcaataaggtcatcggaaacacccggtgcatatgcaaccagttgggctatgtgttcagtaacgagcatacgtcattcgataaggaagcgcatatttcgatttaagtctgccatacataaatcccgtctgtcagccaaggtcaatatccggcaaacagacgggttattatgtaacaaatttatggttgactattgaagtcgtggcttcaccgacttcccgtcgataccgcatgtttccagaaccgcggtattttctttgttgaaggcgatcaggcatgacggcgctccggccgtaccaccctgttcccccgtaacatggtaaaaactgagccgtcccttgataaagagtattgaatcggcgtttgggaatatcagttcgtggaacaggcgcgtgtccgtgcgggcaaaagtgagcgcgacggcattcctgtgttcgacacacctgcggataaaccggacaatcagtgcagtgtcatagggaggattgcagaacacacgtccgaaccagggttgttgcaggccgtcatcctcaatggtatagtgatgtcgcgccgtatcccatgggcggtttacgggcgaacacggatccaaatcgaacggccccagcctccgaagcaggcagggaggcgtgagccattcgttctttccggtagaagatttcccctcgaaagttacatccatgacagcttagattgtatcacccgagccgatttggatatcgaacgggttgagatcgaattcatgggtgatattggtatcatcctgctgtgactcgagacaatcctccgtgaagatgcaacctttgagcgttacggtcgtcgttgtccagtcctcgccggccatcgggttggcaaagctgataatcaggtcgaactcgccgatttcgagcagcgagccgtacaccgaacgcaacagctgttgcgtggcatagtccatcgtgatgctcgccgtataggtaatgttcccgaaccccctcgacaccggccgtcctcccatgccgtagttactttcgaccttgcgcttcttcgaccatttgatggccgacacgccttcaagggtcgtggaaccttcatcgattcccagggcggtcgatgacagggttatcatcgaccacgagtatgctacattgttgattattgccatatgctatgtcttatttgcggttaatgacagtccttcctctacataaatcttcacggccacgcccaccgggacaaggacataggagatgcgcagcgtgtcgtccaccaacacgttctggttcgggtcgatagtgacggcgtatcctgaaatttcctgcgccgcctgcatcttggccagtatatccccgatgagtgtcttgaaagctgtaatcttcgacggggcgaggaacccggttgaaggattgaccatcagcggtgagttcacatacggcagcagggctgcacgcacggcacggcggctcttgttgatggtgcggttccgggcaatggtacggaaatccccatgtgagcatgtctggtctttcgagatgtagatcccgttctcgcggccggcatacttgatgggaaaaatataccccttatcgtcgagttcgtccagcagtgacggggagagtgactcgtaccggttcaggctgaggaagttctcctctgcctcgtcgaggttgatgtccccgaaccccaactctatttcctggaaatcgtccgcgaagagattgaactgcttgacccatgcgatggattcgtgcacgttggcctttgctatggctcccataaccgctcccaaaaatcccacgggcgtatggttcctgttgcacatctgcatcgtggagatcttttcgtgatgcgcctggccgaatatacagctgatacggcttgattcacagatgcatgaaggtattttattcaggtcaatctgacgcccctcagtcgtatccgcccccgtattggaaggattggcggaaaggatgagcgagagcggctggttctgctccgcaagccccacggccacgtcgttgagcccctttaccagattgaggttgtattgttccgatgcgccgttcgctttccacagcggctgttccgtccatatgcctatctggttgatcatacccccggcagcacgctgcatgatttccagcgcatcccagttcgccgaacagtccgcgaacatcacgtagagttttcctgaaccgcccggattgccggacatgcggaaaaattcacggatatggtatgccgggatgccgtgcaggaaattgacattcatctcctcctcgtcggttgcctccacacgttcgatgataccgaagtcgttcacggcggacttgaacgaggtgatgtagcagacatcgccaggcttgagcctggtctcattggttttaccatacccctccgtgaaaagcgtcggctggagggacacgtcgaacagcagtcccgtcaccttctcgcccgacgagccggtatcgtaaggaatattgccgtccacatccttgataaatacattaccgagtgccattatgatttctttttaagttcgttgtagaaaggattcctgtagagtacggccttgcccctgatggcggccgccgtgtccggcgcataggttcctccgtgcgtgtcgatgtacagcgacggatatgccgggaactttttcaacagggacaggatgtgaggctctgtcgtctcctccgaccctgcattccctttccccgaggtcttggccggcagcctgtcttcagtctcgccgcctgtcccgaggttttccgatgccgtttccggaacgggcaccgcctgagcctccggtgcaggaatattattgttgtctgtctgcggagtttcctccgtgttgattttctttgccataacagtagaatgaaaatggggaacgggaccttgcctccgctccccgggtggatattgagaatgaagaaaggtgtgttattcgctcttcttgtaggcggtatggaccacgatctccgccgggcggacgatgttcacgtccattttcatgcgcatctggaaaaagaacagctcggagttggcctgcagacggtcgattttcaggatgtccgtgtcgttcgcgtaatccacccccatccacaggttggagtccatgccggtggagaactcgccgagcaccatcgtgtgttcggggattcccacgaccgggacgatgcgcttgcccttgaagcgatagcggttgacctcggtattctcggaatacttgacctgcttgtccgagatatattggtcatacgcgtcccaggcgtcccatccgaccacaaaggtcagagatgtcttctttcggatctgcttcggacatttcctccacatcgcatagagcgccgcctccaccgcggccccgtccgtcagctcggtcgttcccgaaatgatgcactgccctccggcaaccacctcggcatcggaggagttcacattgtcgaggatccgtttgatgaccccgtcaaaatatttctccttgttggctccgattttcgtgcagccttccggtgcggtaatcttggccaccgtctctcctccgcgggcggaagtccagatggcgtttccgatatactcgtttttcttgtccataaggagacggagcatcgtcgcctggattttcgggtcgagctcgcggaacacgagattgccttccggctgcgcgaaacgccagtacttctcgtagtccctcgggttaaactcgagatagaccataaaatcggacggctcaagatggcgttcggtgaactggtactcgttcgtgccgtcatcgcccttggctccgtggatgggttgtggggtcggcacgttgtcctggataatgttgcccagcttgatggcaggaagcgtatagcggtgctggatgcccgtcttgatatgaatcagtccctcgcggactgtatcattgccctgcacggtataggtcagcaagtcctcaagtacttcgccgctatacccgttttgaagaaagtttactgtatcagccattgtcgttttaagttttccgttgaagaatgaaactcggccgactggcggatacctgctgtttccgcgcgagacactgcggtctccggcatgtcagttaaaatcgggcggacgcccgcggatagtctgtcagagctttcggaacttgaaatccgcaccgaccacttccgccaccttctcggccatcagctgttcggcggtctttgtcgcttccgccgtggcctggatgttggcagggtcatcggcgatttccttcgagattttctcccgcgcgggaatggaagccagcgtgctttccgccaactcgaagttggaaccggccatctccacccactgcgttttcgcctcacggtcaatcttgccttctgcaatggcattctccaccaatgtctcgatacgggaagcctgctcgtccttctctttctgctcgtaggcggaaaggcgtgccgtcgctgcggccaggtctgtctgcaagttccggatggaggcgtcttttccggcgatgacggtctgcgcgtcgctcagtgatttctgtatttctctgtatttgggttccatcgcggccagttcagagatacgtgccatcacgtccttgacctcaccgtccttcatgcccagcgaggctgcaatcgccccgtactcaaagccttgtgtcttgttttcgtttgccatatcgttttccgtttctgtaagagtaggttcaatgcctttgaaaggtttatttcccgcgctgacacggctcatcagttcctggatggcggccgtatcggtcaatccttctatctcgtcatgcactttacggcaaagctgcttcgaggtatggatgacatgctccgcaggtatgatgccggccttgacggcagcctgtgcgtcgaaataggtcccgtcctttcctgcctgtccgtccatgatggcccgcacatgctccgctttcaggccgaaccgtttccggtaaatcgtctcgatctgtttggtaaaagccgttaccatgtccgacggttcccctccgtcatcgtccggcaacatcgggttatgaatcatcagtatggcataatcacgcatgagagaacgcttgcccgccgcccagatgatggaggccatcgatgccgcgaccccttcgatgatacattccgtatccaccgtggcattggcgatggtggaataggtggacatgccgtaaaggacactgccgccctccgagttgatcaacacgcggatacaggagggacggatgatattttccaaaaagtcgaactcgtcattgaaacgtgaggtcgtctcttccgtcacgcgaccgaagaaacggataacagccggctggcctgccttcgcctctccgacgacatattgaagtgtgttcatatccatatgcaagggttatttgaacaagagtaggcggtggaaaaagaaaaggttttgcactgctatttatggaagtggaaatatgagaatccatccatttatggaaatgcgattatctttacagtataatagattgttcaaattacagaccggttgcaactatttgtatcaagaccggcatgctgaacattctaaattcagcaagtacagaaaatgtatcatgagtcttgtattatctgctgattcatgtctgtttatacgcagtgcggataaatctcctgcatggatttcaattttccgatccagtatccgaaaaaccagatacttcgtcatgttccggacgcggatggaagccgtgtccgccgctgtcatgttgcggcgcatcgctgtgttgggtgaacgggggcatgaccacatacctttttacccagtccctgtatttccacgcggaagattccctgaaccatacctcgtagtctatccagtacgcctgcaacatattggttgaaagcggcatgtcgaaataggtcaggttgcaccgctcgctcagcgccggctcatggttcttggcatcctgtatggctacattgagccgctggaagaccagaaacgcctcgcattccttgtcttcgtccgcattgttgagcgtattcaggataaaccgcacgcgcatggtggcgcgtccctcaccgatacgctgttgctgtaccaggtacctcacgttgataaagtggatgaacacggcagggaacacagtctcatactccgtgttatcgtcacggacaatgcgggcgaactggccgttgtcgatagcgacggttttgaacaggggcggcgacaacgggtcgtccggattctcccgcagggtcaggacagcccgcttaacggcccggtatatctccacgaaagggttcgcggaaacttcttcaggcaggctctccgccggtgccgacggttgtgcgggctgtggtgctgggtgtttgtcttttatcataacggctggtgtggaaatcctttaaaaatcatatctatgaaatgggcggcgatatagtcgtccgtcttcggtgagaatccgatgaactgccggtgtacgggacggcgcgtggaatactggtttaccgtgtacagcccgaacttcggatcggtattgtgtatggcggcataatgcccgtaacgctccttgctgcgtccccgcttgcccttgactggaaagctcttttccgtagtccacatgcaatacctggcgcctttccggaagatgcgcgtacggtccgaacgccgtcccactatgtctgtccggccggcttccgactgtatgctccgggccagagtccccgtatcgttcatgagaggatgggtgaacctctttccccatttggaggtacgaggcgcccatttgctaccgttgaatccccccgaagcgaatgaggacacgaactgctgcctggtatagtcaccggcagcagttgcgaagtcgaatacgttgaactccagccggctggccatgacgcgcgtactggtcctgcttacccagtggctgcaaaactcatcaagcgttatcttgggcataggcgaactttcctttaatgcgtttcacaatatcattcatgtaacccggaagcgggacggagaaatagcggtgcgcatcggaaaagatacgcccgccggttgccaggctctcccggaagaccggatccaccttttccagatagtctcccttatccggcaaagccgcccggacagcggcgaacccctccgcgaccagaaagcagcggcatccccattcgatcggcggtatcagctccggaggaaactcggatttgcggaaggaaatcccttccaatgaaagatgccaggcacgtacccgttcatcgccttgtgtcatgtaggtaagcacggtatccatatccaccgccatccaccatgcggccatcgaggccgcgaagaatacctggttgttctcttcctccgcatggacgaggttatacctgcggcatatcttttcgtatgcttccatgtcctgttcatccgctgtctcgggcagttccccgagcatggcatactcctctgccgcggcaaaatccaccaggttgtctatagctgcaatcaggatgtcacgctgctgccgttccctctctgttgtaaaggagttgtgatttttcagtatctccaatgcccggtccatatcgattcgcagacctgtcagcgcacggtctatgaggaaagaggcacgcagggtgatgatgtcctctataatgtcgagacgttccgcgctgttctcccaatagaggatcagcctgcggaatgcatcgaaaatgacacgatactccttttccgtatcggattccgtggttgcagatgccctgacagccctgaacggagcgttgtccgggagcggaagacgggcttctattccgctccccgcagaaaatttccgaccttcgccccccgggggcgtccgtaacgccggaaatactcctcgtccgacatgatgccccggtcgttgtggctgagaccggatgagccgccttcggctccgaaacctaatcccgggataacattgagctgccggcccacattgataccgaactctttctcgatctcatcggccgccacttcatatttgtccgtgatcagcgaatagagcttgatgcggtcctcgttgctcatctctatccggttcgaataccggaactccaatcctccggggatatacccgatagccaccaggcgggggattatctcctcgttcatgacgttttcgatataccgacggtagacttcgatacggtcgcggaaaatgtcctggtgtgctttcgtggaacccacgtacgactgcatccctccggccatcgactcggagccgagcacgaggttggcaacttccttgttcacaaactcgataagcccggtatatatcttttccgagttggacatggtgaatgtcttgatatcgacctcgtcctcaatgccggtaaccaccaccttgttctgtgccgcgttggctatctcgttagccagcctcttgcggtcggcgttgctctcgctgaccgtctttccgtggataatcggctgtccgtaagtatgggaaaagttcacatagttggccaccgtgaatttcttggccagtatcaaaggggtcgtggcggaaaaaagtcccaagtcgccggagtttaccagtacataacaacggtaatatgccgggtcatgtaaatcccaatgcggctcccacagtccctgccgcttcagtaccgttttctggtccggcaacacattacgccgttcgatgatgttgacttccgccagcctgcccgttctggggtcagtatgcggcatgatttcaagcagggtgtacccgtagagcttggattccactatgcccttgattatcttgtcgaactgcgaaccctgtatcttcagggagttcgccacgtccttgatgtattttcccttttcgtttacacgggcaagcatatagcggtcgccgagaatctggctttccagtgtctcgacaacggaacgtatatgagcgtcctgttgcaggcaggcttcatacaggtcaatgagccgggcgcggtcatcgagaatatatcccgagccggtatcctgacggcatgaacggtagcggttgttgcgctcgatttcgcggacatactcctgaattgtctttttggaggtcttaaaaatactctccaagagttccccgttaaatgatttgtccgatgtagccataatttttttgtttcttgttcaaagagtagagacaatcctcaagagaggtttttacggctaaaagaatatatggagaacgggactcttaatgcttgatttacaaaccgaaatatacaacttaaatatatagat

SEQ ID NO: 96 - DNA, 11565 bp, Butyricimonas faecihominis
attctaaattttacattctacactttaaactatcttcaatatttccctcgcaatcacctcatccgaatccttcattgccagcgtcaagatatgctcggacaaacttttccgttccccatcatcctgcaacaagcgttccatcacctctcccaaacgctccaccacctcggcatccttcaccatcacggcagcttgtttattcaccagcgccatagcattcttcgtctggtgatcttctgccacgttaggcgagggcactaacaccacggcttttcccagcaagcacaactctgaaatcgtacctgcacccgctcttgccaccaccaaatcagcacaggcatacgccaaatccatccgtttcaaaaacggcataaacttcacgttttccggcatacgtcccttcaattgttcttccagctccttgtggtaataactcccgcactgccaaatcacctgcacgtccttccaccccgcaatcttctccaaccatctcaccatagccttgttaattgacccggctcccagactacctccggtgaccagcaccgttttcttatttgcatccagcccgtagaaagcaatcccctccacccgttcattcacggcattcaacaaatccttccgcaccggattccccgtaaatataatcttttcctttggaaaaaaacgttccattccctcgtaagccacgcaaatcttggcagccttctttgccagcaacttattggtcaccccggcgtatgaattttgctcctgtaacaccaacggaatacccgcgttcgtggccacctttccaatcggtccactggcataccctccaacaccaactactacatccggcttaaactcccgcaccacacgtttggccttcttcaaactccgccacaaattccacagcaccttcaaattattcaacgtcaacttacgttgtaaccctctcaccggtaatcccacgatcttatacccggcctccggtaccttctccatctccatcttcccctctgcccccacgaacagaatctctatatccttattcaaccgtttcagcgcattcgcgatagaaagggcaggaaatatatgtcctcccgttccgcctccactaataattactttcttcatatctcaaatatcttcatgttcaattttcctcgttctcttcttcctcgtttataccttgagcagccatctttagtttctccttctcttcccgttctccctcttccgagaaagtatgactgacactcagaatcatcccgaaagacgcactcgtgaacaacagggaagtaccccccatactcaccagtggtaacggctgcccggtcacggggaaaagtcccacgcaaacccccatgttaatcaatgcctgaaacacgatacacagccccaatccggccaccaaaatcgccgggaacatcctcgtgcaacgccgcacaatcacccctacccggtacaaaataatcaggtaaagcaacatcacgatcccggccccaaccagcccgtattcctccacaataatagcaaatataaaatccgaatacgggtgaggcaagaaattccgctgcacgctatttcccggtcccagccccatcaatcctccttttgccacggcaatcttcgcttgatccgattggtacgaatcgtcactgtccgtctcgctcgggttcacgaaatgctcgatacggcttttcaccgtcagcaaacgtcccgccgacttcaaatgtttttccggaacgataaaaacaaccgccagcatcagaatcatcaaccccacgatcaccccgatcaacttcgcgtacgtcttccagtataaacgaccgacaaacaacatcaccaaacaaaccccgcccagcaacgccgatgtcgagaaattctccataaaaatcaagaacagcaccggcaccactaacgtcattcgccataacacattattgctacaacactcctccgtctgttcaaaagcaatcgcacgggcacagtacataataatccccagtttcgccatttccgaaggctggaacgtgaacccgattcccggaatcgtcacccaacgccccgcatcatttaacgtcgtacccgcaaacttcgcccacaacaggaatatcaacgacatccccagcacgatcttggcaaacgaaaggaagtacttgtagtgaaacgactgcaatgtcagaatcaccaccatacacccgaacatcaaaaacaactgtttaatcaaataataactggtattccctccccgcacacgaaacgccagactccccgtcgaagaatacaccacgatcaacgaggccagcatcaacccgatgaccacgtaccacaacgtccgatcccccttaaataccaccttattctttagattcaacatactgatttctctattttaaattaaactccctcccggctccgccgtactccctctataaacagagggagagttaaattactctccgtcttcaggaagagtctccaactcctcctctgtttatagaggaggtggccaaaggccggaggagttcttttcattctaaactctaaattctaaattctactctcctttaagcttttcaccttctccttaaacatctcccctctattctcgtaattcttaaacaagtcaaaactagcgcaacacggagaaagcagtaccacatcccccttctctgcccggcgataagccacctccatcgtctcatccagactatgagtatccaccacctcgcagatcggcgagaacgcctcgatcaacttcttattatccactcccatacaaatcaacaacttcaccttctccttcaccaaatcaaacaacacgctgtaatcatttcctttatccgttcctcccgcaatccacaccaccggagcgtgcatactatccaaagcataccaagccgaatccacgtttgttgcctttgaatcattaatataagtgacaccattcaccacgtccaccgtctccaaacgatgctccacctgcgggaatgttgtcaaccccgtcctcaaatcctcgtcactcaccccggccttcaaagcggccaatattgctgccatcgcgttatacacgttatgccgtccttgaatcgtgatctcctgtttggcaatccggaactcccgatctccccaacgggccaccaccgtgtccccatccatgtaagcgttcaccccggcgtaatccgagtaagtgaacccgactgcctccggcacaatatccccccgttccactctctcccgcactacctcgcagtcataaccatatataaacaaatcctccttccgcatattattcaatatccggaacttcgaatttgcgtaattctcaaatttataatcataccgatccaaatgatccggtgtaatattcgtcaatatcgccgtgtcacaacggaattggaacatcccgtccaactgaaaactagacaactccaccacgtacacccgatgcaaatcgtcagccacctgtgccgccagactattccccacattcccggccagtcccacgtcatacccagccttctccaatatatgatacaacaacaaagtagtagtagtcttcccgttactccccgtgatacaatacatcttcgcatccgtgtgccgtcccgcaaactcgatctcggaaatcacctcgattcccttctccctcagccccacgatcatcggcagcttatccggaatccccggactcttcaccaccaaatccgcagcgaaaacgcattcttccgtgtgttgcccctcttcatactctacccccaattcctccaacacacgcttatacttgtcggccaacttccccttgtccgacaaaaaaacctcataccctagcttctttcctaacttggcagctcccgctccactttctcctccgcctaaaataaccaaacgttccatcattttagattttaaatcttacgaattaaatgatttagtaatttccgattaggtgattcccgctcacgatccaatactcttttcaatctctgaatcattaaatcgccaatcactgaatctctttattttaaatctcctctatcgtattttcaacgtcacaatcgttatcaccgccaatgcaattcccacgatccagaaccgggtcacgatcttcggttccggaatccctttcttctggaaatggtgatgtaacggggacatcaggaatatccgtcgtccctccccgaacttcttctttgtatatttaaaatagctgacctgcatcatcaccgacaaattctccacgaggaaaataccacacaggatagggatcagcaactctttatgaatcatgattgcgaacacggcaataattccccccagcgacaaactccccgtgtcacccataaacacttgagccggaaacgagttataccacaggaacccgatcgtcgccccgataaacgcggcaataaacaccaccagctcccccgaatgtggaatatacatgatattcaagtaatccgcgtacaccatattacccgacacgtacgccaaaatacccaacgtcgcccccacgatagccgaagtccccgttgccaatccgtccaatccatccgtcagattcgccccgttcgacaccgccgtaacaatcacgatcgtgataataataaacacgatccaaccgatctcctcggcatagtccccgaaaagcgccccgaaccaagcgtaatcaaactcgttattcttgaaaaaaggtatcgtcgtcttggtcgattttatatctttcgtcaaaacggtctggctattctcggacacgaacccctcatctaccgtgctagttaccaccccgacttccgaaatggaaaccttctcccggatcagcacgtcatcgctcacgtaaagtgtcacacccacaatcaaccccaaccctacttgtccgatcaccttgaaacgtcccttcaacccctccttgtgcttccggaacaccttgatataatcatccagaaaaccgatcagccccaaccaaatcgtcgaaacaatcatcaactggatatacacgttatccaaccgggcaaacaaaaccaccggaaccagaatcgccagcaagataatcaccccgcccatcgtcggtgttcccttcttctgcatctgaccttctagtcccaagtcccggatttcttccccgacctgttgcttctgcaaaatacggataatgcgctttcccaccaccgtggcaatcaacaatgacaaaatcaccgcgcaagccgaccggaacgtgatatattgaaacatccccgctcccgggaaatcaaactgttctaaataatcaaagatatgataaaacatgacctacaacttaaatatttccttaataacctctttatcatcaaaatgatgtttcacaccctttatctcttggtaatcctcgtgtccctttccggccaccagcacgatgtcccccttcttcgccaacatcaacgccgcacgaatcgcctccttccgatcggtaatcgccagcacccggctcgccgcctcgtccggcaccccggcacgcatatcctcgattatcgcggcaggttcctcacttcgcgggttatcggacgtcagaatcacccggtcactcaaccgacaggcaacctccgccatctccggccgtttcgtccgatcccggtcacccccggcacccaccaccgtgatcaccgtcccctctttcttcagcccctcgatcgtcgataacacgttctccaacgcgtccggcgtgtgcgcgtaatccacgatagccatcaccccctcgttcgataaaatggtctcgaaacgccccgacaccggcaccagcatactcatcacgggcaacaactcctccttcccgaaatccagcaaccgcgcactcgcgtaaaccgccaacaaattataagcattaaaatcccccacgaacctcgtccacacctcgctgccgtccagatgcaataacgtcccgtccagatgccgttccaacgtcttgcagttaaaatccgccatccgcttacaggaataagtatatttacgggctgccgtgttctgcaacatcaccatcccgttcttgtcatctccgttcgtcaacgcgaaagcctttttcggcaagcggtcaaaaaacgccttcttcgcttcgatatacgctttaaaagtcttgtgataatcgagatgatcgtgcgtgatattcgagaaaatcgccccatcaaaatccaacccgctaatccgtctttggtcaatagcgtgcgaactcacttccatgaaacaatactcgcacccggcatccaccatccgccccatcagctcgttaatctccatcgcatccggagtcgtgtgagtagcgtgaaccctctcgtccccgatataattacacaccgttgacaaaagccccgctttccttcccagcaaacgcaccagctcgtacaacagcgtcgccgtcgtcgtcttcccgttcgtcccggtcaccccgaccaccttcatccggcgggacgggttcccgtaaaaattagaggccatcacccccagcgcctccgaagaattgcccgtcttcacgtaaactaccccctctttcaactctcccggcacctcctcgcagacaaccgctacagctcctgccgccacggccttcccgatatacccgtgtccatccgcactcactcccctttgggcaacaaacaaatctccctctccgacctttctcgaatcgaagtgtatcatcttaacctctacatccggtctcccttgcacgacctcgcaggcaaccccgtctaacagctctcttaaattcatctcaacttattaattttagctcctatctattcagtgatttaatgatttccgattagtcgattctctccaatcaacactctttttaatcacttaatcattcaatcggcaatcacagaatctttttcattctaaactctaaattctaaattctaaattatctcaactcaatatgcacataactcccccttctcaccctccctcccggagtcaacgattgctggctcaccgtaccgaccccgctcaccccgactttcagcccgctattctccaacaagtacagcgcatccctcagccccattcccttcacgttcggcaccagtgtcatatccacgctccgggctttcaacacgaactccgtcccctccttatcccgcgaagtcatcacccaatcggcacgctccgcctcatcctccgtcacgttaatccccagctcgtcatatatctccagaaaatcactcttcaacccgttctgactgatcggcaacgtttcgtctttctcctcctcgtcctcgttattatcccccatcaacgatgccatcgtgtaaatcttatcggcaatctccttgaacacgctacccgaaaccacgtttccataataccccaccgaccgcgacgggttatccaccaccacgatacacgagtacatcggcttgtccgccgggaaataccccacgaaactggcccggtacttcggttcggaattataccctttcgaccccgcggccacctttgccgtccccgtcttccccgcgatcttgcaggccgcgttcttcaaattcttcgccgagccgttctctaccaccccttccatcatctgtttcatataagccaccgtctgccgactgcaaatatggctactcaccacctccggttcgaaccgctccactacccggctcccgttacgaatctccttcacgatacgcggtttcatccgtttcccgtcatttgccagtgcattataaaaagccaacacctgcaaaggcgtaatcttcaactcgtacccgaaactcatccagcgcaacgtggtaccgctccacgtcttatcccccggatacttaatataaggatccgcctctcccgccaactcgatccctacctttttattcaaccccatcgcgtaccaccggttcacgaacttctccggctgttgcctgtaatgctcatatactaattccgtgattccgttcagcgaacgctcgaaaatcccctgcaccgtcaccttaccgatcggcgacctcgcctccttcaacgtcaccccgttatgcgtgtaaataccttttcccaagtcaaccgtgtcctccgggtgaacatacccgtcctccaacaaagccaccatcgttgccgccttgatcaccgaacccggttccgcggcatccccgatagcgttattcaacacctcccggtaccctgtcgccgtcttcgacacgttcgcgatggcctttatatctcccgtcttcacgtccatcaggatagccgtcccagcgctggccttgtaatgctccaactgccgggtcaaagccccctgcacaatatcttgacactccacgttaatcgtcgtcaccacgtcattcccgtccaccggatcatccaccgtcaccgaaacccaccgtcccgacatcatctgccggatactccgtcccggttccccccgcaactgtttctcgaaagccccttcaatccccacgcgtccctcgaaactaccatccttcgcctcgttcaaataaccgatcgtccggtaggccaagtccctgtgcggctgcaaacgcacgttctcccgttccaaaatcagaccgctcttcgtacccctttcccgaaaaataggaaatttcttaacctccagcaagtcggtgtaagaaattttcttcttgttcacaagcaaataacgattcggctttgccccgtacttcccttgccacaacttcttccggtactccaccgtcggggcatccttgaaaaagcgggacaacatcatcgacaaactatccaccttcttccggaacagcgtgtccggaatcgccttacaatccagcctcagcgaataataaggaaccgaactcgccagaattcgcccgtcatccgcgtatatattcccccggttcggtgccacttcaaaatccttaaacgacaccgaacgtcccatcttcctccacttatccccctcccatatttgcacgtgcagggcttttaccacgataaaggcagcaatcaccatcacgatcaggtacacaagtcccaaccgcccggccaattcatgttttatagatgctgccatgttatagttaaaaattaaaagttaaaaactaaaagttcatacccatcgtaaaacctgatagtccttaacctgttattatatcttttatctttcatcttttagttttccccttcctaacttccccttgcacaaggggagaaaccgcttggtaatcaactctccccctgtgtaagggggagccggagggggtagttttctccattttcatcttttatcctaaattctccccgtcttcgggaagccttccactctaaattctaaattctaaattctaaattcttttcatcttttgattttggtaggcggctccttactctgcaccaaatccaaccccgcctcctgaatccgtttctccacctccgagggaacactgatcctcatcaactccgaggccgtcgtgatcgactcgaaacgcaactcgctcaactccttctccatgctcaccttcttcatgtacaacttctccgttgcatacccgttagcgatataaacgattcccaaaaaagtcagaaaaagaataaacccgatgttcttacgcaacaccgtgtccgccagcaaacgcccgtccagcaactccttcatcgaatcccccagcacctccttctgttcctgcaacggtggcacaaaatcctttaccttctttttcttaaaccacatagtaattaatttaaaatttaaagtttagaatgaaaaagattccgtgattgccgattcgatgattgagtgattaaaatcacttaatcaccaatcacctaatcacttaatcatcttttcgtttttccgcgatccgcaacttcgcgcttctcgctctcgggtttctttcaatctcttcctccgacggcacgatcaccttccggttcaccaactcgaaattccgtttcacgtgaccataaaaatccttctccaccttcccctcgaaattaccgctcttcaaaaagttcttcacgatccggtcttccaacgagtgatacgtgatcaccaccaaccgaccgccgggacgcaatgcccgctccgcctccttcaacatatcctccagtgcctccaactccccgttcacctcgatacgcaaagcctgatacacctgcgccaagtacttcttctccttctgtttcggcacgcagggagcgatcacctgcaaaaactcctccgagcgagtgatcatcttctccgtccgggccttcacgatcaggtcaaccaaccgtctcacgttatccacctccccgtagttcctgaaaatccgggtcaaatcctcctcgctatatgtattcagaatatccgtggccttcagccggctccgctggttcatccgcatgtccaactccgcgtcaaaccggaaggagaacccccgccccgcctcgtcgaactcgtgcgacgacacgcccaagtcggccagaatcccgtccgcctcgtcgtacccgcagtaccgcagaaaattccgcagatacctgaaattatgattcacgaaaataaaccgactatcatccggcacgttagccagcgcgtcggaatcctgatcgaaaccgatcaggcaaccatctttcaatcgttttaaaatctctctcgaatgaccgccgcccccgaaagtcaaatcaagatacaccccatccggatcaatattcaaccccgaaacggactcttccaacaataccggcacgtgatacatggttacacaaatttaaagttaaaaaataaaaacataaacatctcgtcgataggcaattaatccatcagccctacaaaccgatttgcgacgtcaaaagtacaaattcatccgtattcatcgtactctcttcatactttattttaccccaaatctcgattttcgaatcctgccccaccatcacgatctcatccccctcgataccgatgctatccagcatcctacgcggaatcaacacgcgcccgttcccgtccagctccacctcctgcgccccccggaaaaactcccggaaaaaacgcacctgttcccggttaaactggctcaacttctccctcaaccccgcgatcaacttcaaccactcatccttcgggtaaacgtcaatacattcatcgaaaatattccgccgcatcacaaacgacacctctcccgccgcctgcatttccttccggaaaacagccggaacaacccctcgtcccttgctatctagcttgcatgtataatctccaataaatgacaacatattacttccctaatttgtgatgtaaagttataaaattatttcccactttaaaccactttcccccaccttttttctaacaaaacaacaaaatcctaaccatcaacaccttatgaaagcaattgaaaattgaaaattgaaaatgagaggactaccccctccgcctccccctctacacctactctacacctactctttatacacatctcttagagcgggatagtattttagctcctcctctgttcatagaggaggtggctgcgaagcagacggaggagtttgttgccatgtaaacacttcatttacaagaactccctcccccttcgggtactccctctataaacagagggagagctgagttaccctccggcttcgggaatagacttttat

SEQ ID NO: 97 - DNA, 11513 bp, Butyricimonas faecihominis
attaaaaaccccgtaacgaaagttgcggggtttttcgtacctttgaaactcgaatattttcaaagaaaagggatatgaatagattgaaagagcataaggggataagtctgttgcttcgatataaaaaagagatgctccgtcgtatggattgtctgttggatttggattatcattacatggttttgcgcagggattatgggaatcgtttcgtgatcacggagttcttgcagaaggcgttgtctattgtggtggtttctttcaatcgttttatcaaggatgcgtgtacgatttcggcatcggcactcacgttttattcgatcctgtcgtttatcccgttgatggcgctggctttcgctttggctgccggatttggcgcccgcgaggctttggagaaggagtttatgttgcaattgggcgataaccaagagtttgccgggcagttgctggggtatgtcacgaaagcgattgatcatgccaagggcggggtgatcacgggggttggtatcgtgattttgctttggtcggtgattaaggtgttgaatagtaccgaaatgacgatgaaccgtatctggggggtgcgaaagggaaggagtttacggcggatgttcacggattatttctcgattatctttattgccccgatactgatgattctcgtgagtagtctgaatttgttcatgacaagttccggctggcaggagaattttccgttgatcagttctttcctgcaagttttgatcaagttgttgccttatatgctggtgtggatgctgtttatcttcctctatatgttcatgccggcgaccccggtgaagttcaagcacgctttcgtggcggcgatgattgccgggacggtttaccagatcattcaatggttttacatccgtttccagatcggcatgagttcttacagtgccatatacggtacgctggccgctttgccgttgttgttggtgtggttgcagttgagctggagtgtcgtgttgtgggggacggaattgtgctatattttccggaacaggcatttcatgtacaagaacgaattgttcggggatacggcttggatggagacgttggaatgtgcgctgaaaattatgaaattcgtggctcgggtgtacgtgaatggtggagggggacctagtttggggatgattaacaaggaattgaagattaatactgggaaattacgtatcgtgttgcaagaactggtggatttgcatattctggtagaggcgaaggaagaggatgattacttctattacccggcctcggatttgcacacgatgtcggtgggagatattatcattcgtttttcccgagtagatgaaagccgggatgaagtctggaaaaaacaattcaaggaaaccgtgttgtccggttttgccggcgatcggttgattgaggattctgaggttcagcaataataggaatgtgttcatcttaaagtctcgttttttcttgtatatccggtaaaatttttatatattgtcgagcaaattgaaatgaagtatgaggaaaagaatcgatttagagtacattttctcatcgtcggtaacaatattgttctcccgtctaagttctgctcccggtttggcggagtggttttccgatgatgtgaaacatgatggaaatatcttcacgtttgtgtgggatggtattggtgaagaagcggagttagtggatatgaagaaaaattcttacgtgcgcttcaagtggctggatgcggacgatgaggaagaattttttgaattttcgctccacgtagagcctttgacggaggaggtcgctttgatcatcacggattttgtggatgctgatgaagagggggatgccattgaattgtggaataaacaggtcgaaatgttacatcgcacggttggtggataaagtttttttctatctttgtggattcgtttatcacgagtaaagtagaaaaataagaaaaccaatataaggtgctaaagatgaagaagctccacctgtttatgcttaaaagctttgtcggtcctttcgtggccactttttttatcagtatgttcgtcttgatcatgcagtttttgtggcgatatattgatgatctggtgggaaaaggactggaaggccatgttatttcagaattacttttttacgtgtctttgacactggtgccgatgggattgccgttggcagtgttgttggcttccatcatgacattcggtagtctgggggagaattacgagttaacggcgttgaaagcggcgggtatttccctgtaccggattatgaaaccgttgatcgtgctgatcgttattttcacgattgcggccttctttttttccaataatgttcttccttacgctaacttgaaggcgagtagcttattgtacgatataaaacgacagaaaccggaattatccttgaaggagggagtgtttatcaatgatatagaagggtatagtattaaggtggataagatcgacaagaagtcgggtatgatgtacaatatgttgatttacaatcacacggatcgaaggggtaattacgagatgacgattgcggattccggtatcatggaggcagacccgacggggcgtttcatggaggtggagttgtatcacggttacacgtacacggacgagggattgaagtcgaataataataaaacctatcctttccggcgcgtgcagtttgacaaacagtattttattatcccgttgggtgataaggatttgcagcgtacggatgaagacttgttcaagaatagctacgggatgttgaatatagcccagctggatagtacggtttcggccctgtccctacgattggatggccggaaacaaagaaaagcgcacgatatgctccgggagaattacgtgaagaagcaggagagaaaccccaagcgggatagcgtgattcgtgaagagacgagaggggttgtcaggaatctggatagtctttaccggacttttgacgtggaggaacggaaaaacacgattgaccaagccgtgcagcttgcccggggggctcaaacgagtcacatgaatgatttatctatcaataaacgggacgaagaggccgttcgtaaatataatatcgaatggcacagaaagtttactttgtcatttgcttgttttattttcttctttatcggggccccgttgggggggatcatccgtaagggaggattgggagcgccagtagttgtttcgattttcctgtttatcgtgtattatattatctggatgatgggggaacgagcggcccgggaaggggtgctggaaccttggcaaggaatgtggatttcttccgtgattctgttgccgttgggggctgtcttgacttacacggccatgacggattcggctgtcatgagtagtgaatcgtatactaatttcatcaagaagatcatcggtttctttaaaaagaaagataaaaatgcgtgaattgagaatcgtgtacatgggaacaccggattttgcggtgtatccgttacagaagttgctggaggccggacacaaggtcgtggctgtcgtgaccaatccggataaaccggcggggaggggacaaaagattcaagagtctcctgtgaagaagtttgccatggagaagaggattcccgtgttgcagccggagcgtttccgggatgaacggtttttggaggagttgagggcttttcaagcggatttgcagctcgtggtggcatttaagatgttgccggaggtggtttggaatatgcccccgttgggaacggtaaatttacacgcatcactgttgccggattaccggggtgcagccccgatcaattgggcggtgatgaacggggagacttgtagcggggtgacgacttttcttttgaaacacgagattgataccgggaatttgattttccaagaacgggtggagatcggaccgaacatgacggccggggagttgcatgatcaattgatgtacacgggcgccgatttgctggtgaaaacggtggaggctatggctgtcggtgattacccgttgcaggatcagggcgggttgctggccggacgtgaaccgaaacacgcacctaaaatattcaaggaggatatgaaggtggattggtcactaggggtggacgctatttttaatcatatacgaggactttcaccttttccgacggcgtggaccgagttccgaaacaagaagaacggggaaattgtgtcattgaagattttcgagacggagcgaatcgtgaaagatcatgggaaagaagtgggtctgtcaacggataataaaacttacttggacgtgttggtaaaggggggagtcattcggataaaagagttgcagttgtccgggaaaaagcggatgaagacggaagagttcctgcggggatttcatatagaggattactctctgtaatcaagttattatgcgtgtcgggagagaaactatgcgaaggccgatccttaggttagggatcggggggagtgtgttgcttgccttggtgatagggtggtggtattttctaccaaccccgttgtttacagtgccttattctaccgtgattttggataaggagggggagattatgggtatgacggtggcgagtgacgggcagtaccgggtgtcgggcagggggcgcctttccatgaagtatatggccgctttactgtgtttcgaggataagcggtttttgactcactccggggtggacccgctagcggtgggacgggcgttgtggttgaacgtgcggagtggttcggtggtgagtggcgggagtacgttgacgatgcaggtgattcggctgtcacgtgacaacccaccccggacgattccggagaagatattggaaatgttgctggcgattcgtctggaacagagttacacgaaatgggagattctgaatatgtacgtggaccacgccccttttggtgggaatatcgtgggaatacaggcggcttcgttgaaatattttaatcgtcagccggatgaactgagctgggccgaggcggcattgcttgccgtgttgccgaatgccccggctttgatgtacccgggaaagaatatgcccggtttgaaaggaaagcgggatgcattgttgcgtgaactttatgaacagggatattttgagcaaggggatctggaaatggcgatggcggaacctttaccggaacaggtgtatagtccggagtgtatcgcacctcatttgctggcaagagcttacgggcagcgtcgggggaagatcagccagacgtttattgattcccgattgcaagaacaggtgaacgggattgtaaggcggcatattgatgtgttaaaacacaatcatatctataatgcagccgtgttggttgcacatatcccgaccggacaggtacgggcttacgtgggaaacgggcctaaggtgcgtgatgacgggggaaatcaagtggatattatcacgtcgaaccgtagttcggggagtattttgaaaccggcgttgtacgcgctgatgcagcaatccgggtatatcttgccggggacgatcgtgtcggacgttccgtcccgtttcgggggatatgttccctcgaattttaacaaggatttccaagggattgtccctgccgacagggcgttgtcaatgtctttgaatattcctttcgtgcgtttgttgcgggagtatggggtggagcatttctatgatgatttgaaaaagatggggattacgacgttaaatcggaaggcggagaattacgggttaagcttgattttgggaggagccgagtgtaagttgtgggatttgtgtaatatgtacggggggatggcttccattttgaggcactataacgagtgtgacgggacgagttttaaccacgagtttcgacgtttacgactttgggaaggtgaacaggtggatagtgtcgaggtgcagaataacgtggtcaatgccgcggcggtatggcttacactcaaggctttgcaagatgtggaacgaccggatttggagtcaggatggaagaattttgcctcttcgatgaatctttcttggaagacgggaacgagtttcggtttccgggatgcttgggcggtgggggtgaatccggagtacgtgattggcgtgtgggttggtaatgcggatggtgagggacgtcccgggctgatcggggtacgggctgcggcaccgattttgtttgaggtggcctctctggtgaggacagatgctcgtttctatatgccgaaggaggagttgtccgcggttgctgtttgtcgtaagagtgggtatcgggcatcttcaatatgcccggaaatagataccgtttatgttgcccgtgccggggagaaaacagaggtttgtccttaccatcgattggtgaatcttgatcggacgggtaaattccgggtggattcggaatgtgaatccgtgtcacgcatgaggattgaaccttggttcgtgctgtctcccgtgcaggagtggtattatgcccgcacacattcggattacaagaaattaccaccttatcgtgccgattgccagcggggacaggatgatgtgatggaaatgatttacccgcagtggggattgcgggtgtttatacccaaagatttagggggagtggtacgtggtgttgtatttgaaatggctcatcgggagccttccacgttggtgtactggcatatcgatgatcaattcttgggaactacccgttatcatcaccagttagaggtaaatgtggcccccggacgacatacgctttatctcgtggatgcgaagggaaattcactacggcagagttttgttgtcgtggatggggaaaaggattataaatgaattaatgtttgtcgggttttagaaagtcatttttgctgatcttggtgcgatgtttttctttatcaccggattttacgacaatagttaccgaatctttccattgctgaaggtttacaagtgatgaaatatcacatgatacggttccgtagtcggtctgagtttttgaccaatcatcgggagtattcggattgtagtaaagttgcaatttcagtgaatcttgggtttgttcttgagggtcatatactaaattgattttaccttgaattttctctccggttaccgagttcaccgtggagaaacctgcatgtagatcgaaataaccatgatacccatagcctacacctaataatgatggtaattgacaattctcggctatgttagtattattggcctcctctttgctaattgggtgaattatctcgtattttgaccatgtgacgacatgggcattgttgataaacttttcatcgtttgcggaggtttcccagtcttcctcgttataataaaagccgaaatagcctctttccgcatcagcgagattttggtcgtatgagattaccagtcccccgccatccagatagcaatagaaaccatttgtcgtgtccccgataatcgtggcaacacacatgaaacctcttgagccgtcatctttgttgtcattgcaactagagcctattactagacatataaatagggtaatggtagtcagcaaatttgtattcatacataattgattataatgcagcaaatatagtaaaattttagtacgtcattccaaaatgccagagtggaatgatgttcatgtacccgaattcaatatcatcttttacaacaaagctgttttcaatattttgaatctgtttttgctttttgttctttcccccgacttcaaacgtgatgtcattgatcaggaagtcggatgcgggggatgcaataacgtcagcaatgactctggtttgattaaaaaagaatgtttcccggatattgccgatattcgaattctcgtgtgctagattgtaaattaaattcgtgttatccaaataaattttgtttacttttcctaatcctcgaacaccgccggtggcatcacgtagttgtgaaataagtccggcttcttcaatgtacaggcaataatcggctatattattacgactggctcccaacatttccgcaatgctacttaggttgggtttaaacgggacacttttcgctatgatcgctaataattgttttagctttcggcccgtggatacattcatatccgcgtacaggggaatatcggattccagcgtttggttgatgatctgtcgtaaacgctgatcgtatgtgtcttctagggcaaatggatagtaacctcgtttcaggtaatcctgaaaaaggggcaggggatgtattgattccggaatttccaccttgtgggtgatgatgtcctgtaaaccgtagatgtcggttgagatttgatggaatagttgcaagtattctcggaaagaaagtccctgcatttggtacatgatggctcttcgactcagatcggaaactcctttattgatgtctagtatcgaggacccggtaaatatgatttttaattccgggtggtaatcatagattagttttaattctttcgaccaatttttatacttgtgaatttcatcgataaacaagtgtttaccgcctactttcgtgtatgaatcggccaagtctagaagtttatggtctgcaaagtagaaatcttcagcagtgacgtacaatgccgtattgggattcaaattctctttgatatattggagtatcagggtggttttaccaacacctcttggtccggttataccgatcattcggctattccaatttatttgggaataaatatatcggtggaagtcggtctttgtttcctgaagtagcttgttaaaatgttccaataatttttccatatcacgttccttttccacaaagataataaaaaatgcactgcaagagtgcatttttatctaaattttgcactgtgagagtgcattttctttttagtttggatctcaacgggactgtttaaaaagtcttatccagtaaagctaccccctccagctcccccttacacagggggagagctgattaccaatcgattttcccttttgaatactcttgttattttctgttcacgtctctggaactagcttgagcggtaggcataatctgaatatcgttcaaacagatgtgagccgggcgggtcacggcaaacacgatcgtgtcggcgatgtcttctcccgtgaggggggtaacacccttgtacacgttgtctgcggcttgttggtcacctttgtagcgcactacggagaattcggtttcaaccattcccggagcgatgttggttaccttgatgttgtgtttcaacatatcaatgcgcatggctttggaaagggcgtccacggcgtgtttggtggcacaatacacgttcccgccggggtaaacttccttacctgccacggaggcgatgttgacgatatgtcctttttcatttttgatcatcaagggggctacttcgtgggtgatgtaaagaaggcctttcacgttggtgtcgatcatgcgttcccaatcatctaaaatcccatcttggataggagaagttcccacggcaagacctgcattattgactaaaatatctatattttgccattctgccggtaggttgctgattgcgttgtggacttcctgttggttacgaacatcgaattgaagagccagtacttgaatgccttttgcctttaattcgtcttccagtgcggtcagacgatcgccccggcgtccggtgataatgaggttatacccgatttcggccaatttggtcgctgttgcctttccgataccggaagtggcccctgtgattaacgctatcttgttcatagtaattattgtttaaatctgtcgtgcgaaggtatgatttttttcttattttcgcacgaaataatagttgcaagttacaggttacaagttgcaggttaattaccgaacaaataattttgaacttgtaacttgtaacctgtaacgtggcgaagccaccatatttatgtataaagagatagaattgagaattacgccggaagaggcacatgatcgggagattgtcaatgagctgttggcaaggaggttgcacgtgggtcaggagagaatcgtgcatgtggaaattttgcgaagatcaatagacgcccgtcaacgcagggttgttattcaactgaaagttggtgttcatctggatcgggtggaacagaaggaacgggtatttactccccaataccgggatgtttcgtctgccgggacggtggtcgtggtgggtgccgggccggctggtttgtttgcggctttgcgtttgatcgagttggggaaaagaccgattgttttggagagagggaaatgcgtggaagagcggaaacaagatctgaatcgtttgtacaaaaccggggtagcgaatgaagattcgaattacggtttcggggaaggaggggccgggactttctcggatggtaaattgtttacccgctcgaagaaacgggggaacgtggatcgtattttggaaattctggtctatcacggggcgaatcctaatatattgattgatgcacacccgcatattggtacggataaattaccccaagtgattgtaaatatgcgtaagactatcgagaagtatggtggggaagtacgttttaatagtcgggtgagggatattattatagagcagaaccgggtgaaaggagtggtgacgggtgatgaggagattcgggcagaacacgttattcttgccacagggcattcggcccgtgacgtgtaccggatgttacaggcacggtccgtgttgatgctgccgaaggattttgccgtgggtcttcgactggaacatccgcaagagttaattgaccagattcagtaccataacccgcaagggcggggagattttctacctgcggccgagtatagtttcgtgacgaatgtggatggacgaggggtatactcattttgtatgtgtcccggaggggtggtcgttccggcttgcacgggaccggaacaacaagtggtgaacggtatgtctgcatccggtagaaacacggcatgggcaaattcggccatggtaacctcgattgggaagagtgaattgactggaatgaggtacaaggggttatttgccgggttggaatttcaagaggatttggagcgggcatcttgggaacagggagggaagaacttgtatgctccggctcaacgattaactcactttctgagaggacatttaagtgaaaatttaccaagaagttcttataaaccggggatacgggcaacttcttttcaggaatggttacccgaagtcgtttaccagcgtctttgtggagggttggagcagttcgggaaaaaggcccgggggtttatcacggaggatgcccttctgttgggcgtggagagtcgtacttcttctccattgaggattccgagagaaacagaaaagatgatgcatccggaaattatcgggttgtatccttgtggagaaggagccggatatgctgggggaattgtctcggccgcgatggatggagaaggctgtgcagaggctatttgttaagaaacaagaaggggacggacaggttataaccgaatgtgttaaagtgacttcgtttttttgttaaaaaatttgcattcatcaataaaatatctacatttgcgaatgtataaagaatttattagttctaatcctaaaactgtctattat

SEQ ID NO: 98 - DNA, 11420 bp, Butyricimonas faecihominis
atccatttctaattttagatttaatgattttagatttaagattaaaataatcctaatctatcctcttcattagataataaatttttctttcaatttgctgataataatgtctacagcttctgcagggtctacttcgtagatttgtccggcagcttttacacccttggtgaatgatttgaatacacgggtcggtgatccgttcaatccgatcttctgatcatccacggtgatgtcgttgtaggtccatgtttcgatggggtggttgtaagcctcaacgattcctcttacagacatgtaacggggttttactccggatgccaatgcggtgaacacgcaaggagtgtctacttgtaccatctggtaaccgtcttccatggatttcttcaccgtgaaagtcttgttcccgtcaaaagtcaagctttccacgtaagtcacttgcggtaaatccagatgttcggcgatctgcgggccaacctgtgcggtatccccgtcgatagcctgacgtccggtgatcactaagtcgaattccagagatctcaaggctgcggcaatagtattagaagtggccaatgtatcggctccaccgaatttgcggtcgcttaacaggatggcacgatccactcccatggcgtatgcctctcttaggatagcttctgcctgaggcggtcccatggtgatcacggtcacgtgtgctccatattgatcttttaattgaagggcaaattcaagtcctcccttgtcatcgggattcataatactgggtacaccgtctctgataagggttcctgtaacggggtccagtttgatttccgtggtatccggaacttgtttaatacaaacaacgatcttcatgtcaactgtcttttactttaataaatttgctgcaatcaccattctctgaacttctgacgtaccctcgtagatttcagtaatcttggcatctctcatcattctttcaacgggatattcacgggtatatccatatcctccgtggaactgtacggctttggtcgttacttccatggccgtctctgccgcgaatagtttagccatagctgcatctgcggaataaggcactttctggtcttttttgtaggcagcttgtcttactaataagcgggatgcttccactttggtctgcaggtcagccaattggaattgagtgttttggaattgaccaagggatttaccgaattgtttacgctctttcacgtatttcacggtttcgtccatggctccttgggcgatacccaatgcttgagaagcgattccgatacgtccgccgtcaagtgttttcatggcaataccaaaacctttaccttcttgtccgagtaagttctcggcaggaacgatacagttttccatgatcagctcgcaagtagctgaaccgcggatacccattttcttttcttttttaccgatagagaatcccgggaaatctttttccacgataaaggcggaaattcctttggtccctttggatttatcggtcatcgccatgatgatatacacgtgtgcatagccggcattggtgatgaagattttagatccgttaagcacgtaatgatctccctctttcaccgcgaaagtctgttgtgcggatgcgtctgttccggcgttcggttctgtcagaccgaatgctccgatccattcaccggaagtcaacttgggaagatacttggctttttgttcgggcgtaccgtgttccataatcggcgcacaacacaaagaggtgtgtgcggatacgattactccggtcgtggcacatacacgggataactcctctaccgccatcgtgtaaaggatgttgttaccaccggcaccgccgtattcaaccgggaatgggatacccataataccaagttttgccattttttgaacggtttccatcgggaatctttctgattcgtccacttccgccgccagaggttttacctctttctctgcaaactctcttatcatttgtaagaagagttggtcttgttttgatagactgaaatccattattataaatgtttttaattgatcgaagctagtttttaattctaaatcaacatttcttcagaattaaggccgtccccatgccccctccgatacagagggatgcaagacctaattttgcttcattgtttatcatttcatgtactaatgatacaacgatgcggtttcctgaggccccgatgggatgtcccagtgcaattgcaccaccgttgatgttcgtacgttcatttatccattctctcgtaacgccgtgttgtgccatgagttcgtgaatgactcccagtgattgtgccgcgaaagcctcgtttaactcgatcacgtcgatgtcggatagtttgatttcggcgttcttgagtgcgttggcaatggctggcacggggcccatacccatgatggctgggtccacaccgccttgtccgacaccaatgatctcgcatagaggggttaagttgtattgttttacagcttcttccgatgcgatcagtacgaatgatgccccgtcgttgattcccgaagcgttaccggccgtgacggaaccctcttttttgaaagcgggacgtaaggtcgataatttctctagggaggtcgtccggttcgggaattcatccgtgtcgaacacgtgagtctctttcttcaccttgtactctataggcacgatttctgacttgaatttaccattatcgatagccgcaatagcacgttgttgcgattcgattgcaaattcatcctgttcttcccggctgatcgcgtatttttccgcgatgttttcagccgttatgcccatgtggtatccttcgaaggcgtccgtcagaccatcatacaccatgtggtccactactgtcacgtcgcccatcttgtgcccgtcacgtacacgtgccgggaggatatagcccgcattggacatggattcggttcctcctgcaatgatcaggttcgctagccccgatttgatagcggttacaccattgagcacggctttcataccgctcccgcatatcatgttgattccgtaagccggaacttcttgtgggatcccccctttgatggatgcctgacgggctacaccttgcccctgtccggcggatagtacgttgccgacgatcacttcatcaatattggcgggattgactccggtttccgcgataatgttttttattacggcggcacccaagtctgctgctgtcattgaaagagttgttcctaaaaatttgccgatcgctgttctttttgctgctacgatataggtttttgtcattgaggcattgcttttaagtttttggaaattattaattcacagcctgtagctgctttgatgtcatctaaagtaaattcagggtttaattctaccagttcgattccggcaggggtaatgttcataacacccatttcggtgataatcatgtcaacttccccggcagcggttaacggcagtgtgcattctttcaaaatcttgtgattcccttttgccgtgtgttccatggcaaggatcacttttttagcacctactaaaaggtccatggctccacccatgcccggggcttttttaccggggatgatccagtttgccaagtttcctttctcgtctacctgtaaagcaccaagaatggtgacatccacgtgtccaccgcggataagtccgaaagaggttgcgctgtcaaagctgcaggcgccttcgatcgccgtgatgtagccaccaccggcatccgtcaattccggattttctttaccttcttccggtttcggacccatacctaataatccgttttcggattgtaggatcacgtgtacgtttttgggcaagtagttcggtaccatcgttggcagtccgattcccaagtttaccacgtcgccgtcttttaattcgagagctacccgttttgcgataacttctcttacttgatctttatccataccgttttcaatttaaaatgctatttattttttcttctaacaaattcttgtgcaacaaatgacgccacgtcatccgcataggtgttcatgccgaaacctgcatcgtaacccagctcttttgccaattcgtgtgagatacgaggaccaccgcaagctaagattactttatctcgcaagccttctgcctccagcatttccacgagttcgatcaagttcttgatgtgaacatctttttgggtaacggtctgggataccagaagagcgtcggctttcagctcgatagctttggcaataaactcttcattgggaacttggcttcccaagttgtgagcctcgatcatgtcgtaacgttccagtccgtagtgtccggcaaatcctttcatgttcatgatggcgtcgattcccacggtgtgagcgtcggttccggtacttgctcccacaacaactaaaggacgtccgatattttcacggatgaactcgtccgtttcgtgcatatcccatttcgttccttctactttcggaacatgaatactcgtgaagtccacggtgtgcgtgcagctaccgtaacagttgaagaaggtgtagccttcggtcaactctttatggaataccacttgcgggttctcgaaacccatttttttcaacaattgttttgcggcttcgatagcctcatccccggcaggtacgggcaacgtgaaactcaactgagttttcccgtcgttcatcgtgtccccgtaaggttttatttttttcagatccagcgtctggtcgaaatcatttttttcggtagaatataatcctccactcataatgaattgaaaattgaaaatgcaaaattgaaaattatcaatcgcattggtttaaattttatttttattcacactcttgaaacttggaactaaaaatgacaagtcgtcattttcaattctcaattttcaattttcaattgcctttcagcattaactcgataaacgggttatagtagttggcgcctttggctgcaactccgtcaagtcctttaccaccattcttcggacgtttcacgtcaccgaagattcctttttccaaagcggtgaaaagaccttcacgttcaatgttttcaagtaatgcgatagcgttgttcaatacttccttggcacgattctggatgataccgtcctttttgaactctacctcgtcaccgatattcttcatgttaccgaagatatacttggcgttctcgatagaaaggtaacggtcggacatgaacggcgtgtggatagcttccgttggcatacccaataattggattccttgtgaagtccagattccgatcatgttgaaaagtgcatcctgaatgtgtccgcggaaaatatttcccgtcatgaatttggtcggaggcatatattttaaagtggctttcgggaaaatctcacgggtcatttgagcctgagacaattccagtaagaatccgttttcaagagacgggtccatttcgaaagcgtgtcctaatcccatttgttcttctttcaatccggcgatcaaggctaattgctcgttgatcaagtcggatgccagtacggtgtgtgcctgttccacggcatcagcggtggttaggtagttgtcctctccggtattgatgatcaccccggcgaatccgttgattacccttgacatgaactggtcaaccagtgtacgctgcatattgatatcccggaataggatcccgtaaagagcgtcgttcaacatcacatccaagccttccagcgctcccatagccgcaatttccggcatacataaacctgaacaatagttacataagcggatgtaacggcctacttcttcgcttacttcatccaaagccttacgcatgatgcggaagttttcttgtgtagcgaaggttcccccgaatccttccgtggtagctccataaggcacgtaatccaacaaactctgccctgttgtacggattacggcaatgatgtcagccccctgacgtgcggcagcctgtgcctgtaccacgtcttcgtagatgtttccggtagccacgatcacgtagaggtagggtttcgggccttctccgatcgtgttcaagtagttttccttcttggcacggcgatcactgatccgtttgatacttgcgtcaacgtgcggtttaagtgcggctttaatcttgtctgtcgggtgaacggggagcgtggtaatgtccagttctccctctgcaaccttctctgctatttgttgcgggttcataccggtttccacgattgcgtttccgaggaagaatagaattccttcacctaacacgcctttgtctttgatctcgtctaccagcacgttgggtaggggcacggtgttagcgtcaaccccgtcaataccgagcaaacggcataacgtacgctcaacggcaacggtagagtattgttccacgaatttttgtacatcgtcggctatcttccgggccacgtcctttgcgtgtgccactttggtgaaatcaagccctagtttactgttctgcatatctttgttctgttattaatttctgttcttctcttcgtcatccaaaaactcctctgctttgtccaacaattcttcgtcaacgcccagaatacgggcgatgcgcatggcttcttgcggaacggagtcgtgagtatcttcgattagcgagtaatcgatgaactcgtttatattgttgatggtcaatagacctttcacgtgttcttttacaaatccttttacccgcatttttttacaacgggctttgatcccgctgtaatggctagtaatcaaggaacgggcccctttatccgttaggaagtcgagcatggcattcacgatcgcctttccttccgtggggttggtggttcttgccagttcatcaattaagatcaaggcgtttttacctgctttcacgtcttgaacgatggcatttacccgtagcatttccgaggcatacgaggacagtccgtttaattcggattgctcgtccccgatgcaaaggagaacttcgtcaaccaaggcaatctcggcttgttctgccggaacgtaaaaaccgaattggaatagtgtttgtgccagtgccacggttttcaggataacgcttttcccagccatattggctccggtaatcaaacaggcgccttgctcgatgtcaatgtcaatggcttggaatttcttgccttcttgccaaagtacctcttttacttgtgggttgaatatttttatatagcgagttgtgccagaggaaatttccggtttgcacaactgcatatcaatggtctgttgggcttttgccaacaggatatctaaagttgccgtgtttgccaaggcttcgttaatttcttttttatagggatgaatctgttcggatagcttttcccggatttggtcttctaattccgtatgctcgaattgaagttgatccagtactcgttcttctgttttttcatccattttgagcgtcttcatttttgcccgcagggctgccagttccggggaataggcatcatacacgtaaaaatgaggaatacgcatcttttcgggatctagaatgtttactaccggttccaagtccgggagtgaaacaaccgtgatatttgctgataggagcaattcccgcatctccacgaccagcaaagaaaaagcttttaattcaaatagttcaatgtcatccagtatctgtgattccgtcacccggttcgctgttccccggatgtccttcacttgcatcagtttgactttgatcttggtaatggtgtctgttagttcggaggtttgtagaatgttgcgcatgacctcggttttgtccaattcttgggcaattgcttccggggtacgcaaataaggtaatgtgttcaagatccgtttcgccagaccggattgaatttccagtttgtcgatcatgaatctgaacccgttaatttcttctatggcacttcttaaaaacaccgctactaattttagatttaatgatttatgattttagattccagccgcacgggccatcgcttctaaattcattttcaattttcaactttcaattcttttgacgtcataaacaggaattcccaagctctcttgcatggctactctcagttcgtcggaatccagacaatatccttccggagattggggattgatgcaaacggccagtagtttacttttttgcaataccttcatggtgccgccttttttaaggaaggcgtagtatgtttccatggaggcgaacattttggtgaaatcacggatgatcagtgtgatctccttgatttgcttctgctgccgtaggaattgcaataatttgtcactgatggcgcccgccacgtataacgtgttcccgtacttgaaaacttcgtctttgttattttcaagcataaacacggaaggtatgttcagatcgtgaactttcccgttttcgtcaatggaccacattccttgctcgatgtcgatcaattgccggataatttccggctctgctttctccaagcaaatgaggtcatacacgtattttgtttttctaaccagttgaggaatattacaggataccgcggctcccgtggctaacaccatggcttccgtcacagccggagagctgagactgagtcgggagagagccccgtcgacgatggtggtatccacgtcaaaacgtttcatcccttggatgagggttttcaatgatcccgtgtcggcaggccctgataacaaggctttccccgaactgacagctctggcggttaccagacgtcctaacgaggtttgttgtgtgctgacatccatgatctctgccaccagacgtttcgaccggtaatgcatctctgacgtgatgaatatcatgtcttcaaagatttcaatttccggtttgggcgtttggcaaacctgatccctgttttccccgtcgatgcctattgaggtaagggcgaaacgctttcccgtattcttcactttccgaagaatatagtttaagcattccgtttttccggcattttttgccagacccacgattgctatactattgtattttagaatctcctcgataaacattggttattgatgatttgttggttaagtgattctgtgatttcctgagaagagactaaatcacttaatcggaaatcacggaatcacttaattattttattcgtgatgatttctctcgttacgagccaaatgtttcggttcgatggagagcatatcgccatttaacagagcggcaacaccttctttgcgagcttgctcacattctgggcagtgacactcttccttgtaatctgtcggttccgtgtaggttgtgataacaccttcgtagtttctcaatacaacccggttcggagattgagagatcacgtagttcggcattaccggagtcttaccaccaccaccgggtgcgtcaaccacgaacgtgggaactgcgtatccggaagtgtggccgcgtaagttctcgatgatctcgatacctttggaaaccggagtacggaagtgttcgatacccatggaaaggtcacattgatagatgtagtacggacgaacacgcatttttaccaatccgtgcatcaatttcttcatcacgtaggtacaatcgttgatacctctcagtaacacggtctggtttcctaacggaatacctgcatcagctaagcgagcgcaagcagcagctgattcttccgtgatttcgcttgggtggttgaagtgggtatttaaccagatcgggtgatattttttcagcatattcaccaactccggggtaattctttgcgggcatactaccggggtacggctaccgatacggatgatttccacatgagggatagctctcaaacggctgataatgtattccaaacgatcgtcgcttaccaacaatgcgtcaccaccggacaacagcacgtctcttacttgcggagtcttggcgatgtactcgatacatctgtcaatacgttcggtcggggaggcactgtctttttgtcctgcaaaacgtctgcgggtacagtgacggcagtacatggaacattggtccgtgatcaagaacaacactcggtccggataacggtgagtcaatcccggtacgggagaatcgctgtcttcgtgtaacgggtcttccaagtctgcgctggctttgtgtaactccaatgcagaaggaacggcttgtttacgtatcggacaatgcgggtcgttcttgtcgattaaacttaaataatatggggtgatcgccattctcagcatttgtaatgctttacgaataccctcttcttcgctgggatccagatcaagatatttttttaattgatccacagtctcaattctgtttttcacttgccatttccagtcgttccattgttcatctgttacttccggaaaaaattcttttcgtctgctttcagccatctcagtttatttattttagatttatcttttaatttttatcttttatctataaaatcgcaatgcgattttatttcacatacaatctattaaatagttcccgaatttcctcagactcccgaatgatactcagtgtcagttcggcgtgtcctttggcgtatccgttccccacgattaaatttatatcttttcctactccttcagctcccaatgccgctttcgtgaagctggtcgccatggagaagaaataaacgcatccttgtccttttgtgacgagaatcgaggtcatttctgtcgatggaacgtttacattgttaatcgttacctcacaacctctttcccctgcaatggcagtcacttttttatacacgtccatcacttttgttgcgtcggcaacaataacgtgagtggcgagattcatatctttaattcttcgggcgttctcttccgagtattccaccacgatgacctttccgtaaggtccaacgtttttcatggcctggtagcaacaaagtactccagactttcctccccctccgatgatacataccgtatctccttcttttaccagacgggccacttgagccggggccccagccacgtccaacacggctaatgccaatttttccggaatatcattcggtagcacggcatataagccgctttcaaacaggatcgcttgcgcgtccacgtcgacctgatctgatgccgggtcaagatgcttgatcttgtttatttttaatggggtcagggataaggaaaccagtgtggcaattttatctccgaccttcagtgatttgtccgggaaattaggcccgatctctttcaccgttccgatgagcataccacccgatccggtaacaggattttgcattttacctctctctgccacgatagaaagaatcatctctttcattttgtccgcctccccgttacaagcgcttttaatctgcgtgtaactggccgaatcaatgtttaatgtttgtacatcaatcagcaattcgttgtcataaatgctcatcgtgttatccagctttaatgccggttgcggaagtgttccttccggagtaattaccctgtgtgttccgtatctacaacccttgtccatcaaatgattttaaattttagattttaaatttaatgatttatgaaga

SEQ ID NO: 99 - DNA, 11378 bp, Butyricimonas faecihominis
acaaagaaaagctatgagattaaaacattatttatcctgcatgttgatcttgttgtcatttgttacggtgaatgcacaagagaaaaaagagttaaaagaaggagatcaagctcccacgttcaagtatttggatattaacggcaaggaagtatccttgagtgacttgaagggtaaatatgtctatattgatgtatgggctacatggtgtggaccctgccagtatgaacttcctcatttgaaagagttggagaaaaagatgcatgggaagaaaatcgtgttcgtgagtatttcttgcgataaagataaagctgcttgggagaagatggtgaaggaacaaggtttgggcggagttcaattacacaatggcggagatcgtgaatttatgaccgctttcgggatcagaggtattcctcgctttattcttttggacaaagagggtaaggtggtgaacgcgaatatgactcgtccttcaaatgctgaaaccgagaaaacgctgaaggcgttgaagggaatttaggaattttagatttaatgattttggattgagggagggattgaagtaactggaatttaaaatttacaatctaaaatttaaaattaataagatcactgaatttttagtttggctttggacaattgtttagagctttttatcaggtgaacgggccttagggatggggcccgtttttctatacaacgtcgtgaccgaagggggtgatggccagacgggccagtttgaaatgttgcacgccgaaggggatgccgatgacggtgatgcagaagatcagcccgaaaaggagatgggatagaaatatccatattcccccgataaaaaaccagatgacattcatgaggaaggaaagacaaccgctactttgcgggaggtctaccacttggctaccgaaaggccagagggccagcactccgagttttagggtttgtatcccgaaaggtattccgatgatcgtgatgaacagaccgatgctagagacaaaatattctagcgcgatgaaaaaaccgccgaacaggacccagatgatatttccaagaattttcatgtgttatcgtgttttataatgattttccaaagatacgataaagaatgcaatttaggaacaggggagaaaggaacttgtaacttgttgtgagaattgtgcgtatgattcatgtacttattaacttgtaatgaatatgactatgatcgagcatttgacaaaggatagttttaagcggaaggtgtttgactatcagaatgagagggtgtatagatttgagggggagcgtccggtcgtgatagatttctacacgaattggtgtgtcccgtgtaagaccatagccccgatcttggaagaattgcagcgggagtacgaggggaaagttgatatttacaaggtggatagcgatatggagaaggagttggtgaaggccttcaacgtgcggagcatcccgaccttgatgtttgttccggtggaaggccagccacaagtgggatgcggggccgtgtccaaaggggaattgaaacatttctttaatcaggtatttcatatttgatatggggtaatttgttgatttgtaggagataatcttgtgaatggcgggattattaatttctattaatttcggagccttgaatttgaaattaatatatacctttgtgcgttttaaaattaagggtataataatatggaaaaggtgtttagtccgaaattattcggattaattaaagacggttcggtaaagaagaatttatcgaaagatgttcttgccggaatcgtggtaggaatcgtggccttaccgttggcaatcgcttttgccgtggcctcgggtgtttctcctgaaaagggaattataacggctatcgtggccggatttctcatttcattctttggtggtagccgggtacagatcggtggccccacgggagcttttatcgttattgtctacgggattgtgaatgattatggtctggacgggatgattatttcaacgatatttgccggggtgatcatgatcgggttcggtatgttacggttggggacgttactgaagtttattcctcacccgttgattgtcggttttacttccggtatcgccttgacgattttctccacgcaaatatcgaatgctctgggactgacactggcagacgtgccggggagttttattggtaaatggggtgcttatttcgggggaatagataccgtgaactggtatgccgtgggaatcacgatcgtgaccgtgttgatcgcggtgtatatgccgaagattacaagtaaggtgccgggttcgtttgttgccatattggtggtgacgcctatcgtggcattcctcttgccggaaggtgcggtgacgacgatcggttccgagttcggggagattaaatgtaatttgaccccggtgttcccgtcaatcgagtggggacagttgtctcattacttgcagccagccatgacgattgccattttgggtgctattgagtccttgctgtccgcggtagttgccgatggtatgatcagtgggcatcaccgttcgaatacagagttgatagctcagggtattgctaatattgcctctcctttgtttggtggtattcctgccacgggagccattgcccgtacggcaactaacgtgaagaacggggggcgtaccccgattgccggtatcacgcatgccgtggtgttgttgctgatcatgttgttcttcgggaagtgggcgtctttgattccgatgtcatgtctggcagggatcttgatcgtggtgtcttataacatgagtgaatggcggtcattccgttccattttgcgggcatcgatgtctgacgtggtgattttgctggtgacattctttttgaccgtgctggtcgatttgaccgtggcgattgaaatcggggttgtgttggctgccctgttgtttatgaaacgtatggcggataacgccccgaaagagattatcggagccacgaatatggatagcgatgtgcttgaaaattacaagaacctaccgaaaggtttggggatatacgagattagcgggccatttttcttcgggtcggcaaaaacatattgcgaaacaattcgtaacttaggcgtgaattacgaagtactgattattcgtatgcgtcatgtgcctttcgtggattctaccgggttgaagaacttgagagagacaatacttcaattaaagaacgaaggtacgtacatcgttttgtcgggagtgaatgaatcggtgaaaaaggatttattgaaggggggaataggtgagcttgtcggggttgagaatatttacccgaaattcgatttggctttacaggctgcgaaagagaagattgaagagaaataattacaaaaagatattgaagtatgagcggattttttggctgtgtatctcgtaaagattgtgttgctgacgtgttttatggcacggattaccattctcatctgggaacgaaacgtgcgggactggctttttataacgggacggattttaatcgctccatccatagcttggagagtgcctatttccggaataagtttgaaccggaattggatcgtttcgccgggtctaacttgggaatcggggtgatcagtgatatggaatcacagcccatcacggtgacctcgcatttaggacggttcgctgtcgtggtggtagggcgtttggctaatttgaacgagattgtggatgagtttctgaaggaacgaaagcattttgccgaattgtcgagttcgacggtgaacccgacagaggcggtggccatgttgattaatgccgggaatacgtttaaggagggaatcgagaacgtgtataacaaggtcaaggggtcttgctcctttttgatcctaacggagacggggatttatgcggctcgggataaatatggtcgtacgccgattatcttggggaaaaacgagcatggatacgtggtggccagcgagagttcttcgttcacgaatctgggatacacgattgtgcgggatattcagccgggggaggctttgcagattacccgggatgggatcacgcaagtgacgactccgggatgcaagaaacagatttgttctttcttgtgggtatattacggttacccttcttcttattacgaggggattaacgtggaagatgcccgttatcgttgtggagcggctattgccgaacgggatgatgtgaaggtggattacgtggcgggaatacccgattcgggagtcggtcacgcgattggttactcgaatgcccgttgcctgccgtacaagcgtccgttcgtgaagtacacgccgacatggccccgtagttttatgccacagaatcaggcgatgcgggatttggtggccaagatgaaattgttgcctaacgaggcatttacacgggatgcccggattctatttctagatgattcgatcgtgcggggaacccagttgaaggataacgtggtgaaattgaaggaatgcggggtaaaagaggtgcatatgcggattgcctgtccgcctctggtttatccttgtgcgttcttgaatttttcctcttcccgttctaattttgacttgtttacccgtcgggtgatccgggatttggaaggtacctccgatttgacggaagagatattgaaaccatataccgatcccgattcggagaagtacaagaagatgctggacgtgatggctcaacatttacagttggattcattgaagtttcaacgtctggaagatattgtgaaggcaatcggattgccgaaggaggagctttgtacccattgttgggacaattcttcttatatgtaaaaaagggctggaaacagcccttttttacatataagaagaaagataaaagtttttatcttaatatgcatggtggtcatctttcacatcctgtatatcaatctgttttttgttgagagctcgccaagcgtagaatatataggccagcacgatcggggaggccagagacacgtatgccatggttttcaacgtgtagagggaggatgaggcattgtaaatggtcaatgacgaattgagattcgtgtatgacggatagaatgccgtgttattgaatcctgccacgataaacaaggcgattacagccaagacgattccgattccggaaaaccaaatcccttttctccaatggggtttcaagatggattggatgattccgaataaaactccgataacaccgatcaataaaataagcgtgttcaaaggcatttccagcaggttgtggaaatatttgtacgggacgagttggatgctcttatcttccatgatcgcatagcctttacccagtaagatgatggctaggaaggcaagtaggagtatcacgaacgggatggagttgtataatacttgttttttacttctctcgtagatcacgtcgtgtttgatgttattcataaaatagagggaggctaatgtacgggccaagaagaaaatggctagacccagacagaggtttgcgacattgaacagcacctcgatacctctccatggactcatccatgtaacatcattcatttctcctagtttaaacgggttacccgtgaagaaagagccgacaacggcaccgatacagatggtgccgatgaccccgttaatgatcaggaatatattgtaggtcttttccccgagcaggtttccggctttccggcgatactcgtaggaaacggcctgcatcacgaaacagaacaatacgaccatccaagcgaggtaagctcccccgaaactggttgaatagaatagcgggaaactggcaaaaaatgctcccccgaacacgactaatgtcgtgaacgtgaattcccacttacgtcctaaactattgaccaacagattgcgttcatcgtcagtcttggcaatggtatataatagtgtttgtcctccttgcacgaacagcaggaatacgagcaatccgccaagtaatgatattaaaatccaccaataatgttgaagaaattccatattcatttgcgatttgtgatttatgattttagattttaatgattttccggtcccttttttatctggtggaacataattttcagttctgcaattagcaggatggtgaaaagtatggcaaacatccagaaagtggtgattacccagtcggacgctattttggtaacggcaacattcgtgggcatcagatcctgtacgacccaaggttggcgaccaacttctgccacgatccaaccgcattgggaagcgacgtaagccaagggaacgcagacaagagccaagtaaggaatgagtttgaatttctcgaattttctcttctttgcataccacagggaaagaatgaatagaagtgtgaataacatacccaagccgaccatgattcggaaactgaagaatacgagtggcacgtgaggtatgacgtcatacggggatgacaagtagccgtacccgaagtcggaatagttggctttaaagacttgtaacgtgctgtcggcaaggggatggttttcgtccttgacggcttgcttatatgttttcaaggcatcgatggcggtgcggccgttagccatacgttgttccaaagagggataggtaataccttcttgtgaggtgtaaccatctaaaatattttgaataccgggaatataggcgttgaaatcatgataccccaagaaggaaagcattttaggaacatggatcgcgtattccatttttttcatcttgggtgtcggtaatgacggatcgtttgtcggaataccgattacggtgaattctactccgttacccccctcgttcaggccttccatggcggcgaatttcatgggttgcgtcttggttacatcctgtgcgctggagtctcccgtgtacatggtgagcagaatactgattaacccgaacacggaggcaagcatgatactcttacgagcgaattcaagattccttttcttcaggatgaaccatgaactcactcctaccacgaaacaggccgacagcgtgtaggccgaagttaccgtgtgggtaaatttactgatcgctgtgggagagaagagaattgcccaaaaatcatccatttcatttctggccgtcagtgggttaaattccatgccgacaggattttgcatccaagcgttggcaaccagaatccatagagctgaaatgtttgccccgacaaataccatccaagttgaaaccagatggaagcgtttgcttactttattccagccaaagaacatgacagccacgaaggtggattctaagaagaacgctataattccttcaatggccagcggggcgccgaaaatatcccccacgaaccaagagtagtttgaccagtttgtaccgaactggaattccagaattaatccggtagccacgccgatggcaaaattaataccgaacagtttcatccagaatttagtggcattcagccaactttgatcacccgtttttacccacatggtttccatgatggcgagcatcagggccaatcccaaggtcaggggtacaaacatgtaatggtagattgctgtcatggcgaattgccatcgtgaccactccaccagagtggttgttgtcagatcaagaagcataatattaaggttttgttgttaattcttcaaaaacatgattacttttctcctcggcactgtcgtagtgggagttcaagtaattgggcattaaccaaagtttaaagactaaaaacatgatacatagcttaataatgataataagccaaagagttcttccccaccggggcatattcctgaatccgtcgtaatatagatcccaagcttttcttagcatacacgactttattttgttatttatccattaaagaacgtaatcaaagataaaaatgttttcttgatttccatgttttttttgcataaataatacctatgtgttaatagaataaatttatttatctatttttgaagtaagaaatgtgtaacgtcaagttgcttttgtcgtaaacggagagttgtttgttactttgtaaagattgaattatgaataatataggaaaatattgtctgggagggttcgctttggcggtcgtgggatttttgtgttggtatttttcttctataatagcttatatcttgattgccgtgatcatctcttttttagggcgaccggtgatgaattgtttggagcgcttggaaattaaggggtatcatataccgggaggtttgcgagccgcgatagctctgatttgtatttgggtagtatttatccttttcttttatacggtgatcccgttagtgagccaagaatttcagtcgttgagtgatattagtatcacgaatatcgtgaacaagctggaagatcctttggccgatttggagcaggggttgaagcggtttggcattcttgaatcgaatcaggacgtgaaggaatatatcgtgacgaacttgaagtcggtggtggatgtcacgcagattcaaaatatattcggttctttggcaggtacgatcagtagtatttttatagccttgttttccgtgacgtttatggcattctttttcctgaaggatagcaagttattttaccggatgttgttgaccatcgtgccgacacgttacggggaaggcgtggggaatgcgctggattcgattcaaaaattactgatgcgttattttatcgggattaccttcgaggtgctgatcgtgatgggtttgaatatactgggattgacgatcgtggggctaccgtttaataatgcggtgctgattggtttgatcacgggaattacgaatgtaattccttatatcgggcctctgatcggggcggctttcggattgtctgtcgggattgcgacgaatgtggatgtcgatttctacacggtggtatttcccttgttgatatacatgagtatcgttttcattattacccagttgattgataacgtggtgttacagcctttaatttacgggaatagtgttcacgctcacccgatggagatctttttggtgatactgattgcgggaaatctggcaggtataccgggaatgatcttggcgataccggggtatacggttttgcgggtaatattgagggaattctttaataagtataaactggtcaagtcattgaccaaaggcttggaagatgaaaataaaaaaaactagaagtgtggttaacttctagtttttaacttttatcttttagttcaaatcacccctcgcatccgatcctcaaaagcagaaagtgcggcttttgctccttctcccatggcgatgatgatttgtttgtagggaacggtggagacatctcccgcggcatagattcccggaatatttgtgcggcaatacgtgtcgatggcgatttctcccattcgattcgtgtcgacgacttcccggaaaacgccgctattaggcattaaaccgatctgaacgaaaattccgtccaattcaatggtacgaacctcttcggtggtctggtcttttacccggatgcctgttaccttatccccgttgccgataacttcaagtgtttgcgaattgacaaagacttccacgttgggtaagctttttagtttttcctgtaacacttgatcggcctttaaattgtccaaaaattccaatacggtaacttttgaacatattcctgccaaatcaatggcagcttctatccctgaattgccccctcctacaactgcaacgtgtttgcctttgtagaatggcccgtcacaatgcgggcagaacgcgacgcctctaccgatatactcggcctcacctgatacgttcagttttctccaactggctccggtagctacgataacagccggtgcggagaatttctccccggtagccgtggaaagtattttttgtttatcctctaatgctattttttcaatctgccgatgttccagcaggtcaatcgggtaacattgtaaatgtgtccgtaaattgtctgccaattgattacctgttgtttccggtacggaaatcaggttttcaatccccacggtttctttgacttgtcccccgatacgttccgctatgacggccacgttcaaacccttgcgtgcggagtaaatggcggctgccgatcctgccggtcctcctcctagaacgatgacatcataacttttttcttttacctctaacgtgttttcttctattccgtattgagcctcaagtttgtttaataattcaccgaattcccctcttccgacatggatgagttttccatccgcgaacacggaaggtactccttgtatctttaatttttctacttcatcttggtagattgccccatcgaccatttcgtgatggatttgcgggtttaaagtagccatggcattcagcgcttgtacgacatccggacagttggtacaagttaaagatacgtaagttgtcaggtgtatgggacctttcaatgctttcacccggttgcagatggtctcatccggaaaattcttccctttcccgtctgcattcatgatggcaagtaggagggaggtgaactcgtgtccgttggggactccccggaatttgatgcctgtgggttctccgtttttcagtaaagagaattccagttcttttccctctttaatccggcaagatattttatctgaacattctgccacgtcagccaacatttccgttaattcctgacgactttcgtgttgaggagccacggcgatgtccaacgtgtattgagcctctaaaacggcgaaaatatttttaagttggtcttttaaagaggtatctagcatataaatgaagtttagaggttaaagggtaaaaaattagagtttagaatgtttttcactttaaattctaaactctaaactttgaactatttaaattttaccaaccaaatcaatgctcggtttcagtgtgtttgcaccttttttccattttgctgggcaaacttcgttcggatgttctgccacgaattgagcggcctcaacttttcgaagtaattcgtcagcgttacgtccgatgttgttgtcgtggatttctgcaattttaatctttccttccgggtttaccacgaatgttccgcgataagccatcccgtcttcctcgatcatcaccccgaaggcacggctcaatactccggtcgggtcagccaacatcgggtatttgattttgcgaatgctttcagaggcatcatgccatgctttgtgtacaaaatgagaatccgtgcttacagagtaaacttctactcccatggctttgaattgttcgtatttctctgccacgtcaaccaattcggtcgggcaaacgaaggtaaagtctgcaggatagaaaaagaaaattgcccacttgccttttacgtcttcgttacttactgttttgaactctccgttgtgaaatgcctgaactttgaactcaggaagttgtgaattgataattggttccattgttttttatttttataattgattcttgtttttattttctcgatacaaaaatatatcat

SEQ ID NO: 100 - DNA, 11345 bp, Butyricimonas faecihominis
tatatcaataatttctttttcataacaccagtttaattgtcatgacaatacttttttgaaagcgagtcccccaaaaaacgagaactgaggggacccagacttaaacaacactttatactgcccacaacatcatttccttacttttttccccccacatcaaaaattttctccatactcccgtcctccaccatctttttcaatttagttggatgacaggtcccaaatttattataaaggaaccagtcccatctttcaataatatattctttcccttcttgattcgtgactttatccttgttcaaacaaaattcaacttgcttaatgacttcacatttttcttttaacaagttatcatataattctttcatcatatttttcggaagagaatttaacgcttcgagaacaacatccgagacaataaattcaaccgcaaaagcatttccttctttattgacataaagccaaataagaaattcccgctgatgaggagacgaacattttccaactaacgtttttatttctgctggaaccacttctgtccaaacatactctttccaatccgccaatttttccaatatttcattagaaaacgagtcacccatacgccccggatatttactttcgaaattctgaaaactctcttcaaaatcaggaatatgtaatctccaaagatttacttctgattgtcctttatatattaacgttttcatctttattggaactacttccaagccgttaatcatccttttcgacaaagtgtctcctttttcaacattatttatagtagacgcatttaccattatttcaaatgataaatttaccaacaacatcagaattatagttttcattttattactattttaaaggtttacgattcttatcttttaaaatcaaataaaaatgtttctaataagagtggtatgtaataattaaaatcattctcatttaatacatcagaaataggtctatcattagttacaagtcttcttatacaaaatgttccatactttttaaactctattccgaaaagaaacttatcgaaacttgatgtattaatcaaattattaatccagtctatataaggctgataaaacaaaccctcatcaggactcatgccttgatacttaaaatcacaattggcacaatacttttgcataattacatcagtcaacactctcatttcatattcttcgcaagctggtataacgccatctcgataaggaacataattatacatggcataatgatgcaataattcatgtaaaacattctccatggtgatacaatcctctcttaagaaaccaattttgggcgggtatatgggatcataccatgcttccccaagcgaactagaccctcctgttatctccatcttgactttcaaaccatcctttaccagagagttcaacattttattcgtttctggaaaagtatataataactcaagtatattctcgagtttacgaatactatattggtccatcgagtttctgtcatactctatcaaatctcttaacgagtcaggcataaataatcgttcattgcctgctttcaaggtggaattatcttccaacatctccatttcatttgtacaaccaacaaaaaacaagaagattaaaactaggatatatatcaataatttctttttcataacaccagtttaattgtcatgacaatacttttttgaaagcgagtcccccaaaaaacgagaagtgaggggactctgatctaaacaacacgctctattattgctttacttattttttctttttcaatatttcatcgattttcttttccaactctttgccccgcagatttttagccacgatacgattttcatcatctagaataaatatacaagggagcgttttaacccggtagtttacaacgatcacggaattcggcccccgcatatcagacacgttcttccaatcgctgccatcctctccgatagccgtcagccagacactcttgttatcatccagcgaaacactgataatctccaatcccttaggacggtaacgcttgtataatctcaacaagttcacgttctcatcccggcaaggcttactccaagatgcccaaaaattgactattttcactttagcccgtgtctcatgcaaggcaagaacacctccatcggccaatggcgcactgaaatcgggagcaacagcccccacagcaatcttttgcatcttattcaactcgtcaacaatccgtttcccataaaacgtggcctgcgcctcctctcccagcacctcgtaacgctcagtcaattttgcctcgtcaacaccttccattttggatgctaccatccaagccgcaacaatcgaatgattatactttttcaataacgccaattcctcggcctccacgttcaacagaatcgtctggaattctcgctggaactcttgtaaccgggcaggatttgcaatcgcttgtgcatccaaccgttcttgactctccaacagataacgattcaaatcattaaactccgaccatattttctgggcctctccgcctccttccactaccaaagttccggaaacagaagtaatcaggtagggagcgttttccaacataattgttgccaataccgcatctttctttcctgtcatcaagtataccacggtcatttccgacattcttcccgaaaactcaaaccgaccatccgtgaccgtaatatcccccaactcgatcaatccgttctccgtgtcggcaatcaacaccatctgtccgttgaccgtgggctccaaccgaccttcaagcctgtaactgccatcttgtgcgacgcttgtaacgataccacaaaacaacatgcaaacagcaaataaaacctttctcatgtccacttgttttaggttaaaaagtctcccgtctcgattttaatatctcgacgggaaacttaaactcatatgatgaattgatgtattatccctatttccgttgttgcgggagtgtcaacaccggctctttttccgctttcacggtagccttctcaatcaccaaaccgtccacgattactccggcaggataaatcatcgaggccggataattgttcagcaagtaattcaagacttcctctttcgaagatatagccactaacttcaataacttagtcaaatccggtaaccggaaactcgtagcccgcacacgggtctccctcccgtctttcaaatctacccggtacacttccagtgtcgcaccggaaatgcctctcacgatgtaggcacaggattgtccggcctcttttgccgccttgattaaagcctttttcatcttttcgtgagagatacctttatccacctgtacgtgaatggttccggttccagtcgccaccgtcgggctttggggaatcatcataaaccgggaactaccggtagtttccaaggcatttttcgtcgggattcgcccgttcaacatcttcccgaatacccctttatccaccagtgtcatctcggcctccggggtaaccccctccccgtcaacctcgtaataaccatataatggcgttccattatattcttttttcgccgtgtaattcttaacggttaaacgactatcaataatccgctgaccgaactgatcagccaatccgccccgtgtcggcccgagtgaacgggtagcaatcaaaccgccccgattcaataaattatttgctagaatcgtggccactgctcccccctcgaacatcaccggcccgttataatattcggccaccactggcgtactcttcaaacgcaacaacccttcagcaaaagctttcgttctttccttcaattgctctatggaaggaagttccgccgggttctgcaaggaaagcgagaacgaatcactcaaactcgaaccatcatcacaacgcacgctaccactaacagccagagagattgccccaccgggtttcttcaactgcacgccttcagttgtcaacctgtaaatatccatctccagcccgttaagcatcacgcttgaattgtaaatatccttgtaatccttaaacacggccgaaagctccatgaccaactggtcaaaagcaaccgaatcaatcacgaacggcatttcccgttcctccagatgagtcacggccggtagcagttgcatatcagctagcccggcctcatcggcaggcaacggattctgttgcaaataattcgtcttttgggccatcattcccagcgaatacttgtacatcatgtctgacgattcccataacccgcgacgaataacatcatagtccacctccgagggtaattgcaccggggcaatctgttccagatattgcacgttactgttattctggtaatcaccaagcattacctgcgtcccgccattcatcctccacggggaaacactggaatgtaataaccctcccaacgatccaatcatctggaaatgacgataacgagctatcgtgtatgagatataatagggtttcggacctctcggcaaaatcaatgcctcacgattacgatccaattccgaacacatggcagcaaaaatagtttcatccgtatttccgacaacaacatttcctggttgtggagaaggcagtataggtgcaatatcacgagcctgtgcccgacgctgggtctcgatctggctcacgaatatcattggtgaagatgccgtcacgggaacccatcccgactccgcaccgcaaactcccgtgaaaacactgggctcatctccggctgctgtgatattggaaaacatggacaaaggcgttccgatcatatccacccctcgtaccaactcatcgggacgaccatccacgaatacccggaatacttccaacggggtcacattgaacgagttcaaacttccaccttcacccgtatacgtgaaaccgcttgtcacagtctggaaataataaccatactctttcccttgtttcttggcctctgcaatcaacatggcccgcaactccttttccgtgtacggccgagttgtttcaatcaccaaattcgattgccgagacacggggtcaccgccaccggacgttcgtccgtgaccgttacttaccggaaatccatccaaaggaatccggctcatcaaaaactctttcaacactccgttcaccacattatccacccgtctagctttcaccccctcatcatcataccgataataaccatacatatcagtcccggcataatgttccagcaacgggtcacaatatacttgaaattcaacgggcaacacttgctctcccaccatctttttaaacgtctggccgcctgttttcaaacgatggccttccaaccgatgaccgaatatctcgtgaaagaataccccactggcagatcccgacaaaatagaaggtcccgtatacgggtcagcaaccggagcatcacgcaatgccaataaccgtttaaccatatcttccgcatcagcaatcatttgcgcattatccggcaattcatccggtgtgtaagcgaaataactggcattcaatggtagattcatgccatcagccgcattcaacgatgccgataatgtcacccgtgctgccacccggttctgtacgaccacagtcccctcgctattcacaaaataagtgcgcaatacctgaaaactaaaattagccgcaccttcacgtaaaacagaacacgctttgaacacggcagacacttcattcatacgcttttcccacacccgaatatccaccttctgtttctctgcgggtacaggagtttcgtaatagtcctctacgggcgcctcagaaaaacaaggagctttatcctcatcctccacactcatggaagtcttcgttttcacttggtcatacatattacgagcaaactcgtaacgtttcaacgtttcccgccaaatagcttcccgaatcgcctccggggccgcatcatccaatggcaggaacacaccttgggctccccgagatttttctccggccacccctccttgctggttatatttaaaattatccagttccggactacccaaacgtacttgtgggacgagcatccgggtatgattttcgctcgataccgccacggctccaaacgaacttgtcacgctgaccgtataatcatccatgacccgcagattcatataatagggtgcggattcctgctttttcaactcctccatgttgtacttcaattcctgtttcatcagttgcaagaggcgatcctcctgttcctgactaaacaccccggagaaagtcaatagcaataccccgcttagaaaaagtcttataaaatgattcattctaaacattacttcttaattctatttatggggctgtcccaaaaagtcatttttcaaactccctccccccttcggggtactccctctataaacagagggagagttgaaatactccctgtcttcgggaagagtcaccagctcctcctctgtttatagaggaggtggcacgaagtgacggaggagttttttgaaataaaatgactctttggccagccgttaaataatattttacttatagagcacgatatcccccaagttaactttacagaaaccactcgtatccatctgatcacgtagggaaatcttgatataacgaaccagtcgggttccctcaaccatcggcaacaatgtcacttcaccagaactacgtcccaacgtgttattttcaaaataagtcacatccttccaagtaatcccgtccgcggatgtctgcacggaaatcgtggtaggcataaaattcaccaaccccgtattaccaccccattggccgtaataaggctgggcaatctttattccccgaatttccgtggccaccaacagctccatctgcaactcgtaataacgtatactgcccaaaggagtcgtaatccaagcactttccgaattattatccatcagaagctccaaatctgcatccgcatatggatcagacggtacacattgaatccgtttcccatcctcatcctctttaaaagcctctttcgggataatctccatggccggtaactgggaatatcccatataagtcatgtacggtaattccgaatcaaaataaggcacaaaatatctcgcacgcccataataatcaatctttaaacccagtatatccggctcatttgccttatccaacacctgacgacttttttccttatctcccaatatattactcttggcatactccgtcacgtttctctcatccaaataacgattcttacggaatacgagctttttcaaatttggacaatacagaatatcctcgaaagtttccatatcataatcaaactccaactcctgcgcattctccacgaactcttcaaatcgctcttcatcctcttttgtatccgtgtgataaccataacgtctgtggatcgcgttcacgaacccggcactataatttttcttccgacttatcacgtacggggcgaactcgataatatccggacaatcctccaattttcctctccggagcacataaaccgtgtctgccggattcatactcacatccgggatcgtgacaagcgtattataactggtctctttatcgaacgtgtaataccgtgtatctccggcagaattcttgtatttcaattgtaactcgataatattctcgttccactggtcggaaaagaaaatcatcttattcttcaggaaataggatctcgtaacccctctggtgaatgccaacataatctcatgctctctcgtatagggacgcccataggttgtttcaaccaaagactcgtttcctgcagcatccacggcacagacatcaaaccgatatgtcccgtcctccagattcgttaactcgtaggaagtagactcccccggcaacataaccgaatccctacgttcctcacatgaccagacaacttttatcttatcgatcgtggcatccgttccattaatccagtccaccatcaacctctcccaaccgggagtggcatgaacttccgtacatttagccacgtaacgaattttcccgtctcctgcaaaatcgctatacgtgtcctccagactctcgttacaagcagtcaataatagtactgccgcaaaccagtataatatatttcttctcattctcatcgcttaattcttttttacataaacttccagctcgtgcaacgtaaaatacttttgctgattactgtttacttctgaattcatccgcttgaaggtatcatgcacgataatcttcaaatagcgataggtctcgtcaatcgtggggaaaataacatccacgtaaaccggatccttttgggcaagttcctccacggtctttgctgccgcagtagtcgatgatgtcaggaatgaccatctatcacttgcggtagtggcatcacgtttttgatccaatttccctaaaggtacccaatccccggaatccgggtctgaagaagtcttgctaccgtacacggttaatttacacggagtcttatcctcgtaacaaccggaccaaatatatcccaactcctgccccgtaagtggattagatgcattactcaacggatacagacaatacaaacgcagccatgccggaaccttctgctcccttaaatccaaaacgatcggcttatcataagcctgaggaccagccaaataagtcgcatacgtcgtggtacttttacgctccggtttattttcctcgatagcagaagctatcagacgagcttctcccttcaactctccatcaaacaagtactgcacgcctgtcttagcgataccattctccacggaaagtccaaaatcattaaaattctctggcttcatggtccattgttccgtggggaaagcgtcgacatcaggataaatctcctgtctcacccgatacccctgaaaatcttccgtacgaatgactaccgtattctttgcgctctcttgctgtacggcaaaattcagcgtatcaccaccttgaagaataggaaaacttctcatcagaatcgtgtccggcttttgagtcttaggatctactcccaaataaaaaacatgagccatcccggttactaccgcaggacttttataaatcacctggaaaccattccaagaagaatgtatctctacattatcgaaaaaggtccacggtgcactgtccagcgttttaaaattatactcgtacaaggtcgattcctcatcccgatgattaacaaacgaaatccgggcacttacgtcctgtgctttcgtaaaaccatccaacaaaagcgaatcaccactatatccacaagttttcaacacttccaacccttgccaattcttgtaacgcacattcatggcaaaaatatcactgttattcggcaaagaatagtgcatcatagcacctccctccaccggggtaaacttaagttccaaaccttccgttgacacgccgaaaaccgaatcgtcgtcactacaagccgaaaagctgaatattataaataataacaaaatcgtatttttcatcattctatcttttacaggttaaaatttacaatcgtaaatcaaaacttcatttaccatccgggattttgaaccattccggaaatcaggatctcttcagcattgaacggttccagataatcccgcggtgccacaaacttatttttgctccacaccacgatcgggccgttctcattattgtagaatgtctggaacgtcgttcccaaaatattccaaccgtattgtttctcgttcatcacctgatgagcaatcgtccagcggcgaatatcccaatagcgatgtccctcgaatgcaaattcaatactatattcatggcggataatctcacgcataccgactttcgtatccactttggcaggggaatttgaaaaagtcttccaagcctcccgtaccggtagaattccggcccgttcccgcactttatcgagaggatcatacacccggctatccggttgatccagatactcgttccaagcctccgcctgcatcatatacacctctgccaaacgaatgactggatatgtttcctgtcctttcaaattcgccacgtaattcgaggtcgcaaaattcccgaatgtctgttttttcaaccagtatccgttaatattttgccaattattacttacgataaaatcttcttgtgtaccccaagattcgtctttgtgagcctccaccaacaggttataatttctcgtcgccgtgttcgtcccgcgctgccagtacatccggtcgcccgcgatactcgcataaaaacgaggttcccggcgcaggtgaagattcaccaccgacgtgttcatcgggatcacatcctcgtaaatcacgctactctcagaacccaatttataacggttcgcgtagctccatgaattatcggcatcaatcggtaacccgtgactcgtgtaatacatttccaccattttcatcgagggagagagacaaccgagcaaactctcgttaaaattcacctcgtcatccaatagccggggcaatgtaaaccgatataactgcaacgtaccccacttcatttccaataaatactctttattatcaaaacgagagaacatactactttcgatatcattcatctggttcaacaacttggtctttttcgtggtttcctccgtgtataaatcccggtctcccacggcacaaatttcggcagccttatccgcggcctccgcggccagtaaccatttattccggtcataagaagaattaaaaagtaactccccattcttattcttgaaatcggaatagaaagcattcccattaaaaagaggagatgctgcataaagcaatgctttggcttttaaggcatacaacgcctccagacaaatcgtgtgcccgtaagccgggtcccgctgattatgcatcgggatatacggcgctgcctcatccaacaacctgacaatctctttgaaacaagtatccacgtgctgccgcggcaattgataagcactcacgtccaattccatcggcatattctgaggcacgagacaaatcggcccgtagcgacgaaccaactcaaaatagataaacgctttcaaagccttcacgtcagctttccaccattcccggtcttcgtcggtaatattgtaagtattatcgatattttccagaaaagtattcgcattccggataaccgtgtacatcttgtaccacaacgacccgtaaggactttgcgacatctgcaaaccatccgccaccttcagcccgtcaagacggaatgtagttgaattgtacaatgcctgacaagtcacaaactcatcggctcccaaaaaagacgtgttattcgtcagactcgtaagcaccgtattaatttctccatacagccctttccaccaagattcggctttcgtccgttgctcgaaaagcgattccaccgtttcaatatctttctccggcacccggttcagatagtcacatccggttagcaaaagcattccgcaaagtatatataataaatg

SEQ ID NO: 101 - DNA, 11302 bp, Butyricimonas faecihominis
ttagtggacagtagtgaccgtgtatttgacaaagtagggttcaatcgcgtagaggacactgttttccgtcagctggtgaaggctcgcctttcatacccggcaagcaaggctgctacggttgagtatctgaagaaccatttcgatgaggatgttgacctttcaaagatttaccgctatcttgacaaattaggtgacgtgcagcaccgtctggttcaggagacaagcgtaaggcacactcttgaattgttcggcggcaatatcgggctgttgttccacgatgtgacgacgctttattttgaaaccgacaaggaggatgacttgtgcgagaccggattctcgaaggaaggactgtacaagaacccgccggtcatactcgggttgctagtcagtcttgacggttatccgctggcctactacatccatgagggcaacaaatacgaggggcatacgatgctgcctgtggtacaacagtttgtgaaggaatacaatcttcatgactttatcgttgttgcggactcggggtttatgacaggcgacgacatcaatgagctggagagactgggctaccggtatatcatcggagcacggataaaaaccgaaagcgaaaaagtcaaatcgtggatactggaacaacccaagacagaccgcacgatggtggaatatgacaaaggtggaggccgcgggctattggtgggctataccgatgacagggctaaaaaagacgcgtataacagcgacaagggaacacgccgtcttgaaaaggcatacaggacaggcaaactcacaaaggagaatttcaacaaacgtggctataacaagttcctggacttgaagggcgatgccaccgtgaccatcaattatgacaaacttagggaagatgccgaatgggacgggctgaaaggctatctgaccaataccgacatcccgactgaagctgtctatgccgcctaccacaacctttggaatgtggaacgtgcgttccgcatagccaaatcgaagatagaggtgcgaccgatgtttcacttcacacggcgcgggatagaggctcatgtgtgtatctgcttcgttgccttgaaagtatacaaggagttggaacgcctgctcaatctctcacatgtcaacatgagcgtggacaaggtgcttgcaatggcacagacggtaaccacgattgaagtaaaactaccgctaagcaaggaatgtatccgtaaaaccatgctcatggaacggcacaaacggattgcatcgctattttctgatgagttttgggtgacacgttgacgaagtcaggaaaaaaggagttcttcaaatttatttcgtaatattgcatttgctgattgactctgccttcgttaaaaaatatcgttaatttcttgcattacctcgtcaattgtattatctttaaataaaattataaatcttttccctttgccattacgctcacaaatttttagctttgtaaaaacaatagatcatggaaaaaatagatttaaacaaaatatacaagagaaaaaagagcgaccgagacatattccaggaactaatgcctttcaaggttaaggaaattctgctcatcgccaattactacgactcatacaccatcgaacgggagggacaattttctgggaaaatattcggggaatatctccaattgaatcttttcaccgccccccgttttacttccgtggcaaatgaaaaagccgcccttcacgaattgaaaaaacgacatttcgacctgatcatcattatggcgggtctagacaaggaaaccccgcttattatcagccgcaatataaaagcactatacccggacatctgccagctcatgcttgtcaacaacaatgcagacctttcctacctgtcgcgtacagaaaaagagatcagccaaaccatagaacgggttttcgtgtggaacggttccacaaaagtatttctcgccatggccaaatacttggaagataaaatgaatctcgaagcagataccaaattaggggatgtcagggtcatactcgttgtcgaagattcggttaaatactattcccgttaccttcccctgctctacacggaaatcatgagccagacacaggcgatcattgccgaggaaccttccgaagatgaaatgggaatcatcctccgcatgcgggtacgcccgaaactaatcctcgtgagtaactttgaagatgccgtaaccattatcgacaaataccgcaataacatcatcggggtcatttccgatgtccgttacgcccgcaacggtgtggaagacgaagatgccggggtaaaccttataaaatacgtacaggaacttgacaataaaatcccttgccttcttcaaagccacgaggctgacaacgaacaccgggcacgagaaatcaacgcccattttatcaacaaaaactctctcacgctggcccgggagatacaggattttataaaaaaacaactcggattcggagattttatatttcgggaccaaaacgggaaggccatagacaaggcaaccaacattgaagaattttaccagaaattgatgaccatccctgacgagtctctgaaatatcacgccattcgcaatgacatatccacgtggcttatggcacgagcagaaattaacctggcgaaaaaactacgtcgttacagttttagttatttcaaaagtcctaatgaaatacgccattttatatctaccgtttttgaagcgtcaaaactcaagaagttacgaggacgtattataagattcagtcccaaacttgttaattcaaatcgttatatcacattgctcggagagggatcgctcggaggcaaaggacgaggtctagcctttctttctaattttatagagaatgtctacctcaaaaaactcattcccgatctacgggtggctattccgaaaactgcagtaatcggcgtggacgaatttgacaatttccttgagacaaacaatctgtatgatgttattttcacggacaaagaatatgaccatgtcctcgaggcttttaaaaaagcacacctgtcagataaattacgtaagaatttacgagcctatctacaagtcatgaccaaaccgttcgccgtacgttcttccggacttttcgaagattcacttaaccaaccgtttgccggcgtgtattccacctatctgttacccaacaatcatccggatcccgaacgtcggctggaagatgtggaaaacgccataaaactcgtttttgcttcaatctattccccggaatcccgggcctattttaatgccatagactacatgatcgaggaagagaaaatggccgtcatcatacaggaagtcgttggtaatgaacataacggaaagtattatcccgagattagcggggttgcccaatcctataatttttacccgttctcttatatccagccggaagacggatttgccgtgacggcaatcggtttgggagcttacgtcgtggggggcgaaagaacacatcgcttcagtcccgcttatcccaaattgcaactcgcctccgtacaggataaaatcaaagcttcacagcgttatttctacggcatcaatatgcttgcctgggattatgacctctatcgggatggagaaaatgccgctatcaaagcatacgaactttcggaagcagaacgggacggaacactggaatacacagcttccgtgtatgatttcatgaatgaccgtatcacttatgacttttcggtcaaaggtcctcgtattgtggatttttccaaaatcctgcaatacgactatttcccattggcccccacgttacagatattattggatatcttttcacaggcaatgggttcgcccgtcgaaatcgaattctccgttaatttcgaaaacggtacgcctattttttacctgttacagattaaaccactgattaagaacgagtataacattgatattgatgatatcgatgttaccccagaacacgtgctattgaaagcaaataaaggcatgggtaatggaaaaatacaatacattcgggacgtcgtatacgtagatccggacaaattcgatcgcctacgcaccgaggagattgcagaagagataaaacatcataacacacagatagccagggaaggagataaatatttactcatcggaccgggacgttggggtacacgtgatcccctcaccggaatacccgtacaatggtccgacatcgccaatgctaaagtcatcgtggaacaagggttacccgattttccattagacgcctcgctaggatcacatttctttcacaatgtgacttccatgaaagtcggctattttgcaatacctttcctatcgaacgaatctttcatcaactttgacattctccgacagcaagaaatcatagaagagttgaaatattcccgccacgtgcggtttaaagcacctctcacggtctggatggacggaaagaaacagacatccgtgatcacctactaataaatttgatcccgatataaaccaataacattaaaaacatgacaattgaaaattacattcaagccggtttacagcatttcaatatttattcagagacaatctctgatattatttactttctaaccttgctcgtaattatcggtattataaattggattatccatgtgatcacccgacaatggttggcacccattgtattgaaactgacccaacggacagcaaccaactgggatgatcttatgcttgaccaacgtttcttcaatcgcctaggactactcattgcccccctcgtgatccaaatcatattcaaagaatttgaatggacacagtttgtattcctcatgcaattgattaacgtctggatcacgctgtctttcctgttcgtcatatcgagcatccttgacggaataaaccggatatatgacagttatcccatagccaaagaccgcccgatcaaggtattcattcaggtcatcaagatatttttttactgtgccgccatcattatcgtcatcagtattctcattgacaaaagcccgaccgcactacttgccggactgggtgccatatccgccgtactgatgttagtattcaaggattccattctcggcttcgtggcaggcatacagctcatatccaatcgtatggtaaacatcggagactggatcgtgatgcccagcagcaacgcagacggggacgtgatcgagataaaccttaccaccgtaaaagtacagaattgggataaaaccatttccacgatccccacctacaagctggtttccgaatcattcacgaattggcggggtatgcaggaatccggcggacgacgcattaaacgctccgtaaatattgacatctattccgtgcattatctctcggacgaggatctcgaaaacttgaaacagtccgctttgctaaagagctatatcgaggaaaaaatgaaagacttgaaagaatacaatgccaatgtcgaaaatcctcttgataaacgccgtcttaccaatatcggaaccttccgggaatacatggaagcgtggctcgccgcgaacccgaacataaacctggaaatgacccatatggtgcggcaattacaacccacccccacgggtattccattggaaatatactgcttttcggcacggaaagaatggatcagctacgaacgggtacaagcagacatctttgaccatctatttgccatcctcccgcttttcaagttaaaggtattccaataccccacgaacatggagtggatgcaggaaaattagagataaaaaaactggagatcgtcttcgcaatctccagtttttatctctcttcatcatcaataacaatcccaatgatataatacccggctaaaatcacgtttggccaaatcctccgggcgaataaaaaaattgcacacaccggaatcaccccacatgatctggtggtccgcatccgaatccaactgaaataacaaaacagaatcttcctttaactccggatgatactcccgcgggtcaagctgggtaaacaacgggtatccaccaacacggtgacctcccatatccaactggtcatacaccttatccagatcatcctccggggcacgatccaacgaagtgacccgggcatcgggattcgcctcgttatacacgtcgagcaataacttgtcgaaacggtaatctcccccacccatcggcatggatgacttctcaaaattcaacttcatttctcccttcacggggaatccttcagggtattccacgccctccgtcggcaaaacggaaagtaaggcagcctcatcttccgccacctcctcgtgataaatcacccgaaaccctttttgctcctccgggttctcgaaattcaaaccgtaggcattctctctcgcgacataaaactggagtattcctttcgtcgggaaaccttccaacggcggcatttcactaaaattcacctgagccaagaatcgcaacggcaataatttccgttcttccttctgtccgacaacctcccccgcggtggccgacggcacggcagcagtattcccgtccaacccggcaaagggtccggctgccacgcttgcggctaccgcagacgcttgaccctccgctaccaccgtagttccgggctcttcgtaaggatactcaaatcccttgggcatatacggcataccaccgattttactctcccaaggtctggtctctcccggttccgggatcaattttacacacgccgttgtcgttttctctcggataattctcaacatcctatcggccgaagtttccttcttgccttcatttcccccgcccccgaatattttattaaagaatcccataatatcgtatcatttaaatgatttccgcaccaaaaatacaaaaaataaaaacaaaacttgttatctccccatatttaaacctgccattcccaataataaagcataacggtcattactccttaacggatttgccaatacaagtaagtcatatccacacagggtattccatgatccatgatcggttccgggtaattatccgtgaaaaagttttttaccactgcggccgccacacctacgccacgacggtctgcctgtcgaacgacgtacctatcgaaacgctctcgaagatgttgggacaccgtagcatccgcacgacgcaaatctatgcgagtgcgcccagaatggtcgcttaataaatacttctttagcaagaagttaggattgggttcgatataatcctatcgtcaatcagtttatccaaaggggaaacccgatggggagtgtagcatactgattaaagctccaagtccactaatagtcaagtggcgactgaggagcaagacgaaaagacatacataaggatgaagccttgattggttgaacgatagttcagtggtaccacatcttgcaacaacggaagactattatacatacgttgtttcatagtactctgcctattttgagcgttagtgcagagcataaagaaccgactatgacacagccgcaataagcggacaagaacgaaagtcgcatccgacagtatgtcgtgctaatagttattaagagaactaactggggattacctaagtcggaacgctggaataaacagctataaagaaagcttttgaatatccgatatggtaacggaacttccatagtagtccgagcaagggaaagccttgtacatggcgaagggaagtagtctgtaactttaatacaaacaacggaaaacgtgagagacgtatgagaaatccagagcaagtattaaacattttagctggacacagcaacgagcctgagtataaatacgaaaggctctaccgtattctattcaatgaacagatgttctttgtcgcttaccaacgtatgtatgcgaagccgggaaacatgacacccggcacagatggtaaaacagaggatgaaatgagcattgataggataaacaaactcatagagagtataaaggatgcgacttataatcccaatcctgcaaagagaatttacattccgaaaaagaatgggaagatgcgtccgttaggaataccgtcgtttgaagacaaactggttcaagaggtagtaagaatggtacttgaagccatatatgagggacactttgagtggacatcgcacggtttcagaccaaaccgaagctgccacacggcactgaaaagtctacaaaataatttcaacggtgcaaaatggttcattgagggagatataaaaggcttctttgacaacatagaccatgatgtgctgatagaaataatgaaaggtagaatagcagatgacagattccttcgtctgatacggaaattcctcaatgcggggtatatggaagagtggcaattcaacaagacttattcagggacaccgcaaggtggtatcataagccctattttggcaaatatataccttgacaagttcgataagtacatgaatgaatatgtcaacaaattcaataaagggacagtaagaagccgcaacaaggatatttgcaaactcaacagcagagtacactacctaaaacgtaggataaacgaagtgaaggatgcaaacgaaagaacaagaatggtagaagaactgcacgaaaagcagaagcggatactaacaatgccgagtggcaacgatatggatagaaattttcgcaggctgagatatgtgcgctacgccgatgatttcctaatcggggttatcggaacgaaaaacgaatgtgagacaatcaaagctgacatcactaagtttatgcgggaaaagttaaggctggagatgtcacaggaaaagactttgattacaaacgcacaagacagcgcaaaatttttgggttacgaaatatatgtccgtaaagactatgccacaaagagaaacagtaacggaacagtgcgcagacacttcaacgggaatgtgatactgcacgtttcaagagaagcaatcaagaataaactgctcagcctcgaagccatgaaagttgtcaccaaacacggcaaggaaacatgggtgtcaaaaggcaggacttatatgattgacaatgaagcgcacgagattgtatctcagtttaataccgaaatacgagggttctacaactattactcaatagcaaacaatgcatcggctttgggacgctctttcggctgtattatgaagttctccatgtacaaaactcttgctcaaaagctgaatatgtcagtgagaaaagtcattgaaacatatcgcaaggataatctctttgccgtgccttttgtaaacaagagaggagaaaccaagtacagggtattctacaatgagggttacgcccgtaaaacggattgtgaaacagccccaagtgacaatctgccgtatatgttcaaaacaccatcgttgagtttgatagaaaggcttacaacaaaaacgtgcgaactatgtggcaagcacggagaagtgggaatgcaccatgtccgcactctcaaagagttaaaaggtaaaaatgactgggaacgcaaaatgctctatatgcacagaaagactttggtcgtttgtgcggaatgcaacgcaaaaatccagagccgtgataagtaaaaatgatgttacagatggagagccgtatacatggagacgtgtaagtacggttcgggggcaggtaaacgaaaacctaccgctgtaaagcggaaaggcgttgtttgccgagcctacagattacagccgagaaagtgagccgcgatatggagaaactcgcgcagcgtatcgagcagatggagagcttcatttgtcaggcgatttaatgaacttaaaaaactgaaaagcgatgaaagaagaaagaaacatcattacgatagacgagcagggcagattgaatatgccgaccgatacggtaagcgtatggatgacggaagcggaaatagtcgaactgttcggcacgaccgccggagcggtacatacgggtatcaaaaccatcttcaaagaaaacgccctgaacgattacgaggtctgtgcgtgtgtccgtctggacagcggcaatcgggtggacgtgtataatcttgaaatggttgtcgcccttgcattccgtattcgttcgcagggcgcaacgaaattacgggagtatatactccgtacactcggtacagtgagcaaacagcctgcaataaatatactgatggtctgcacacgtaaaacgagtgggtacagcctttccatttgcatctataggagcaagtatttgctggattctttcttccaataaaggtccatcatcaccaatttgtctaatacgattatatagactgtcaagcattttatttttataccatgtaattaacttggatgacggagcatgtaatttccacatattatttcttattttctagttcctgtatttgacgttctaattctttgatttttaattcagtattgttgtcatgggaaacacgatgaaattcatcaagtaaagccatacgtattatcggttcatcaatgagcattattttttcatgaatctttagcatatcaacatttatatgctcctttgaaaacctttccattttttcgattatgtctctaataactgaatctgcataagctccgataggtccatctttcaagaaaaaactatttttgagcatatcatggatgttagcaccaaaagtactcatgtgtttgctagttacatttacatgatcgtcttctatttttaatgctaaaatatttcgacttagtatgtccgaaagaatgaatggggaatgtgtaacaaaacaaatgttgatgctttctatatgatgtagttgtaattgtttaataccatcaagtacatttttaatatatgtacgttgtagctccggatgaaaatataattcgatctcctccatgatgacattaacgtgcctatatgcgacacgttgtttgtgagagtcctgccaaactgattctaaattagatagatgataaagtagtgcgcttattgaatatgtctgttggcgttctccggaacttagcgtttcaaacagtatgggggtattatctttattgtcttctaactctatgtttacatcatagatgggaggagggaccaaatcatcaactgaaaggatgagttgttttttggagctatcatcaatgtgattttgtttttgggatataatatgttctattttatctgatatgcttttaatatcaaatgattggaatgtatcgttaaagtcaaacgttccgtatatgatgtaggctagtatttggcgtattttctttgttatatgcgaatgatctacatttaaagattctattagatcttttaattcagcctccttgattttgtgagttatattagaatgttccttaaagaaagaataatattgttggtatttacttgaaattttcaatgtcttataaactaaataaccaattgcttcctcgtaggc

SEQ ID NO: 102 - DNA, 11290 bp, Butyricimonas faecihominis
gctatatataatagcgttctattaatattttaattgcttattaaaataactttatccgtgagtgatcatgacttgatcacaaaataaagataaaatatcggataacaaagagatgacaacgagctttcctcttacagacctcccttagtcataaaaatatcccggcctctatttcagagaaccgggatactcaacgattcgatttcgaaagcctcttttaatattctcggccattaatgacctttaccttccaattgcatcaattgttgggctacaaacacaatcatcgtcgcatccatattcagaaatgaatgacgtataaattttgccgcacgttttttcaccgcctcgtctgcattcacgaacaaattagcaaaattatacatgagaaaagactgaaaatcctcattcaacttatcatactccttctcgcatagcgtcataaaagcgtctaaatcacctttactataagactcaataaaacgaaatgctgtcgtataacgaccgtctttattcaatcccaaatccgtgattcccttcttcatgatatcgtattgctcttgatcaaaaggaacttgcgcggatagataattcaaaacgtccatcctgtacaattctcttattcgatcagaaatatcactcttaattgcaggaacaaatctatctcggttcgcaatcatatattgtgcaatagcatccgtggtattccccgtgtaagtcgtgtagataaacaggttttcttctgccagacgctccttatcttgtaaaccgttaaaataatcttgcactatcttgaaagcctcatcctttttggccatgtccggttgacgatttttataaacttcttccattttcatcccggcataggcggaaatcaaggcggcagtacgctccccgctttcatagcgttggcgcatacgttctggtgttttgttcggatcgatcaaacggtcgatactaccgataaaagcatttccgtccatcgtcccgcccaccttggtcattaaaatcttttcatcgggagttatcgcgataaaagtcggataagcttttacctgatagcgttttgccagttctggcccttcgcccttctcagcatcaatttttatacaaacgaatttggcattcaagtaatctcccacgtttttcatcgggaaaacgttgttcatcatcatcttgcagggaccacaccaagaggtgtagaaatcaatgaatactagctttttctcggttttagcggcagcaagcgcttccttgtaagcgagattccgaaaattcgtctgggccattaacgaaaaagtaaacaaggaaacggacaagaatagaataatttttttcatcgtattaaatttttagtaaagtatcatttatcaataagggaaacatggaccatatccatacatcggtccaagcatggcggtctgatccacgactagctggcaaacataacggacgcttttcaattttccttccccggagaatttatcaacgggatctccatatggctgtcctccgcggatgttatacaagtacacggtataggtgttttctttctgcgtcccaatcacgatattgtcaaagttcaaggaggtgtccccaaatggacccatattccaatacagattaaaaatataggaaatcgtttctcctgccggaaggcccgtgacggggatctcgatttccgtttccgcatcaaaattataggcatacagtttattgttgtgtacgctgtaaataaatgtcccggtcatcccattcccggctataatgcctccttgcgccaaatgcaaagccgaactcaacggccggatttccacgatcttaccaccggaaagcaagtacaggtaacgggtaccggaaactttatcctgacacaggaaatagatggtttcgacaccacccacgtagttaaggccgctcgataggcattctaggttatcttgattgatctccgtgttgtactcgacttcagatgccgcaatacaactgtaatccacggtcataacgcgatgtttcgtgttattccaatacacatgccccccgaatcccccgtttacaagctgaacgtgtttacttcccccgttatccagcgggaatcccatttttccactattttcactggttgaagaagagcggattcccttgttcgagaaatagaatatactggcaagactacgaaccagacaatagggttcctcgtccgcctccatttcctcgaaaagtagattcgaattatcaaacgctttcagcatgtccacggtgcgaaggcaaataagtttattctgttccgtggtgatacagacggtattggcgttcaccattttgttctcctcggtgtcgataaaggcttggctgtaacccacggagagatcacgaggagaaccggataaggcttccccttgggtcgaggctaaaagatcggagactagcccgttctgcgtgtacacgtccagttccgtgttccagtctaccgtctctttcaagatatagaatccctgcgaaaacgtggtggaaacggcaagtttcatctctgccgtcgcagcgtagccattcgcggttgccgtggcttcaaaaataatcgtgtaacttcctgccggcaaatttacctcgtacgacaggttcttgaccgaatcgattttattcgtccggaatcctttgtcttgatcttccttgtaaatgtaccacgcgtaggttaattgatcgtccgggtaagtcgtctcgatttccggctcacgaattaatttattcccactataagaaataatcgacgcgtcttccaaggttccgatcgttatgtccccgatgttcttggttcccaagctactatcatcatcataacaggataccaatccgaacaacgtgaataacacggataatatgatatattttttcatatcttcttacttttaaaattaactccaacttttaggctcaaaactaactggcgttccatcttcttccttgtagggttcctctccggcctcttcccgtttcgcgttctcttcttccaacttccgggcaaaccaaccggccaagtagttaacataggccgaatccccgtccatcaattccttgatatactcgtcatcccacttttctccagtccactcgatcatcaagcgatgtttttccggcccgtaaagaccaaacgtatagtcacaataggattcctcccataccgatggttttgttaacttcgaagaaatagataacgtgcgggttgtcaacccgtcatatcccggtttgaaataaccgttatccttgaaagtaaactgcagaatcacgtctccactgttcaatgaaggatctttcttcacaacaatgggaattttagttcccgttttacgggcgggaatcatgtaatatttcgccttcagttcttcattggtaaaagcgacataatgcacatcggccttcgcgtcatttttcccggtctgaatttgttccagttctaacggccggtcctcatccgacacgaatcccatggttgaaatttcaaaccaaaccgtgtcgatctccacttcgtccccggcatacacgaacgaataggaagcatatcgtatctcgtcggtaactttttccgtctccagtatggaaccgtcataattgtagtacacgaaattcaaccaacaatccggggtttcgtacactggcaaatctttctcgcaagaactcattccgaaaaggaacaggcacccgatcagtatatttattaactgtttcataaccatttactttatttgagagttaggattatattctgtttccgggagaggaacgatgtacacgttctcgtcgacattcccgttcccccaaagtattgtcgtcgccccggttcttttatacgtgtagaacatttgtccctcaccgtaaaactctcgacggtactcgttaaccatctccccggggacctcgctcaaggcggagaaacccgcttcgttcaacacaacggagtgagccagcatataatcgtggtaccattcgtttatttcgtccagatcggaagaggtttccatcgcgatcaaataaatctcggacatccgtaacaacgggataatctggtaatataacatctggttttcagcgtcatctgcaaaataatattttgtaagggctccatacaggttagccgacgcatctttcacgttccggttccaacaattcagatacctgttgtgcgaacccgtgttttgtcccgcgtagaggtcactcagcatggagctggaaatcacgaggtgtccggctccagcctgttggtctaccttgttgccgatcaggaaaacggacgagtatgttttcacgtcatatttactgagatagagcaaacattccgacgggcaagctttatatcccttggcaatatcagtttcgccgctcatagtcattaccagttccccgtcagcacctttggcttctataatttctttggccagcatgtacgccttgtctttctttcccaagtaaaggtacatacgggcttggatggctttcaccgcccaataattcatccgggactgacgatagtacatgtagctatcgcttaattcattcctgttcgctgaattcaactcggaaaaagtatattggaacaagggatcattgtctttcaacaaagattccgctttcgacaagtcgctttccaatttcacgacgtaatcatcaaaactataataagcgggcatctcgtcaatcgaggtcgtttcggaataaggtaattccacttgccgggaggcaccttgcggcatttgcccgaacaaacgcagcacgtccaactggcaaaaagcacgaatagcgtatgcctctcccgtgataacggcacgagccgcgggatcctcgataacctccccgttcttctcggcatatttaataatcatgttcgcttgggcgatcacgttgaacaatcccgcgtaaatggtcttcacggcagtcttggagtagtcgcccgtgtagtcatggttcatgaggtcgttgtcctcgtaacgtgtcgaattacggaactggtaccagagattggctaaagattcaatattcgacatcgttaatctttcaccgtaaatgtcctgactagctaaactcatgtaacaaccggagagggcatcttggaatcctttgtacgtggtaaacaaatctttgtctttctgttccgtgtccggccggacatccagccagtcattacaggaaacggacaacaaagccacgagtaccgttatgatatataatcttttcataaatacagtttttagttacgtgttagaataaaaacttgatatatccctgtatgttacgagcatacgggtagctggttccccgttccattttaatggatgataaatgcaggatgtcagacatattcacaccgaacgtgatcgacgtggcacgagtatatttctgaatccaaggggtatcccatcgatattgcacgccgatagacgagatctcgaacacgttgtcatccatcacgaaacgagaggttgcacgggtctgggtgttactcaattgcttgaaaaatgtcacgtcacccgcttggaaccaacgggatttcagcacacgggcatccacgttttgggaggataacgtattctttgttacctctaccttgttcaacaaagtctcgttgtacacctttcctccccagtaataggaacaggccacgttgaccgtcagtcctttccacataaacatgatgctgccatttcccctgtatttctgatcttttgatcctaaatatactttatcggagggtttccaagtatcggtgattttcccgtttttatccaagaagatctcgtttcccgtactcggatcaatacctaaagagcggacggcataaatggcattctgcggacgtccctcgtagaacagattgctcacatctacatcctcctgcaagtacaattcattctgggccttgatcgcatcggaaagtttggtgattttattcttgttgtaaaccaattgcccgctaaacatcaagttcatcctacgttccgagttccgaatggcataaccgctaaaagaggcttcccaacctttattctcgacttcccctacgttcgcgatataggaagaaaatcccattgacaggggtaggtccatgttggaaagaaggtttgccgtctttttcgtgtacacgttgatttctccttttacacgtcctgtccacaaaccgaactccatcccgacattaaattcgtccgtcttttgccaagtcagtttggggtttccccatccttgcaagatcgtcccgttccagttcatgtatttattgtctgtggaatacttgtaagttgtcgatgccccagtagaggaaccctgttgtgaaccggtttctccgtaagaggctttcaaccgtaaggtcgtaagcacgggatggccttgcaggaattgctcgttatgcaagttccaaccgataccggtactccagaaaggggcgtattttttgtcactcccaaacgtggagctaccatcaacacggtaagccaagtccacgtagtaacgcccgtcatagatgtagttcacgttcccggttaaaccaaagcgacgggtgcttgtcttcgtcccggtgggaatcccatccttcatgtactgacgggcatttcctaaaaaattcatatcctcgctcgaaaatccttccaactcgaaactatatgaacgggattttgtttcggccaatgaccagtcaacacccacggataaaagatgtttctctgcaaaagttttattataggtcaccgtaacattcccgctgtaactatattctttcccggttccgtaacgatacaagccacgacggaagaatccctcgtccgtggcatattccgcttttttatccccggaggtaaaataagaatgttctgccggcaagaaataatcactgctgttgtccgtgctggagattcccagctgtcctcttaatttcaatccttcgataatatcccattcaatcgaaaagttgttggtcaacgattggtatcccgatttatcgaaagagtttagtgaagcatcatataacggattctgcttatcaggattgatatactggaaaccgtcgaaataacgcacgagattacccttctcgtcatacggggcatcataaggttgttgctgcgcatacgtgctaaattccccataccgactttcacgtccccggttcatcccgtaagaggtgtaattcttgaatgtcaacttatccatcatgtacatcaaaacgatggaaccgttaaaattgcgccgggaagaacctttcatggctccaaccacgtttttgtaagccaaagcaccactccaacgaaattgctcacttcctccttctaaacgcaaattataatgggtaccgacacccgtgtgcaaaggtttactcaaccaatccgtgtccaccccggagagtacggctttcaaacgtttattatatctttcggaatatttcacgtcattccccggcagatcggaatcatatagcccggccatcttttccaattgcagtttttctgccgcattcagcaaatcataggaactcaagtccggagcctcaatatccattcctatttcggcattaaccctcaacttgcccgcttccggttgtctcgtgacgaccacgatcacaccattggacccgcgagaaccgtaaatggccgtggctgccgcatctttcaatatattgatggactcgatctcgtcgtcattgtagtccattaacttttccaacgtgatttcgaaaccatccatgatgatcaaaggagagttcacatcatttttgatactttcgttatattcctgcacgctcatgggtaaagaagaattacctcgaatgtttatttgaggtacattattcgggttactacccatggcattgtttaccatgaaattcaaggatgcgtcaatgtttttcaaggtttgcagaacattctgccccttgtacatttttaattgttcggaagagatgctggaaacagcccccgtgtaactttccttggcctttttgaaaataccggtaaccaccacgtcttccaacacggtattatcttcttccatcacaacacggacttcggctttgtctttgatggataccagttgtgtcttcatcccgacaaaaccgacttcaagtgtcatcacgtcttccggaacacgcaaagtgaaattaccgtcaacgtccgtggccgtcccgatcgtggcattcaccacccgaacagtggccccgataaccgtttcccctttactatccacgacttttcccttgatctctttcgtggtatcggattttttcttgggttgatatacaaccgagatatacttcccgctagccacatccgagaaaacaaaaggcttcccatcaagcactttttgcaaggcctcggtgatcgtcgcgtccttcaaagaggccgtgactttgtaggactgcacgtcgtcataagtaaagagaatcttgtaggtagaaagtttttccagttgttttaacacgttggataagggtgtatccttgaattccgccgtgattttcttctcttgcgcctgtgtcaaacccgccgataacaggcaacacatcaagaacacaactcggagtaacccggccagtcgaaaactgcccgaattgaattggagtttctggtgtttcataaatttgttcatttaatttatttttacatgactcaaatacgtattctttattctgatttcgttttgagatgtaaatcgggtaccagaaacgataaaaattttttattttaccgaaattttattgttttcgtaagtcgcttgtactttaccaagcatgttcaataattgtagtacttcttctattttctgatcgcgttcggcaaggaaatgcaagcggtaattcatcgctcgcaggttctcgaattcgacccgtatattataccaccgccctaattcacgcatgatctcaaccacggattcattatcaaaatagaaatatccttccgtccataaatagtaattgtccgtgtcaacttcccgcacgtcaaaagtcccgtctccttgtaaatgagcgtcttccccgggttgtattaccacttccgaggatgaatccgtgttcttcactttcacgcttccttttaacaaggtcacgtgtgaatcatcggggacgtaagtcctgacattaaactcggttcccaaaacttccgtcgtgatattgccggatttcacgataaaaggtctctgggaatcgggcgttaccttgaaataaccttctccctctagctcgactacccgctgttccccggtaaaacgactgggatatttcaggcggctctcggcatttaaccatacttgagtaccatctgccaagcgaagttgataggctccgcatctaggggttgtcaaggtatgtatctctgtttcccggatcgtttgctggtaatccaactcctcttctccccgggtgattcccgtctctcgcaataggctgtcggcctgaggtgcggacagtgataccatacgcccgtcacccgtggacaataggacttcttgagattgcgagctggcggtaaaagccacgatcggttggttaaccgggacaggggctgtccgatcgaacatctgccaactgaaaaataaaagcacagaggctgccacacctatcgagataccgatccacaattgttttcctttatttttaccggagattctactctgccggaagttattccattctttattcacatcaggtttcaaggacgcatgacaacgtacaaacgcctgcctataatcccctagcaagcgagcatcttccagttctttcggatcatccagaattgcatcaagctcctcctgactcaacgagccgggatcatccaaagcatccagcaaatcctttttatttttcatatcctgatcatccatgtttattaacgacctaatttatattaatacgtttagacctcattttcgggcaccccctccgagccattatttatatgaaattcttcccgcaataaacgcaaggctttcataacgtgcttttttaccgcactaggactgatgtttagcatctccgcaacctctgcatattttttccggttaaaataacattcttccatgatatgccttgtctgcggggttaaactatctaatactttatatatccgttcaatcttctcgttttcctcatccagccccgcatcctcttccgaaagcatacgggaatacaatgccacgtaattctcttccaccttattgtgacggaacgtgtctatacttttattccgcacgctctggaaaagaatcgccaccacattcatcttccgaaagttctcgtagtttttccacacgtactcgaacgcatcattcaccacatcccgactgacctccgcatcattcaaaaactgataagcatagtagtacagacgggaatagtttcccgtgtacagttcttcgaactcttttccatacctcaagcttttcagcatattcaatcctgtttatccgcctgctaagttaatagaaattcatggaacacgtactcttgatttgcatattctttaactttgtaactatatagcaacgatttatatttacttttattacatttgtcctactaaataatatcaccgtgatggacctgcaaatcattcaagataaaattcatgaaatccgaggacaaaaggtcatgcttgacttcgatctggctgaaatgtatcaagttgaaacccgggtattgaaccaagcagtaaaacgtaacgcagaacgtttccccgaagatttcatgtttcaactctcaattacagaatgggaaaacatgtcatcacaatttgtgatgacatctcgaaataaacgcccaaagtcagctctaccacttgcgttcaccgagcatggtgtggtaatgctatccagagtactacgaagtggcatcgctatacaaacaagtgttctaataacacgtgctttcgtggcgatgcgacaactattgctaaatcatcctatggatagagtttcactcctccagcaggaaatgaaagaactcaaagagtaccttgaagaagtttttaccgactataatgatattaacgatgatacccggatgcaactcgaattaataaaccaaaccctagcagagttacaagcaaaagaccggggctttaaggaaagaagaagaatcgggtatgagttaccgggatgtgaaaatgaaaaattataaagctcaaactcttttctatacctcaagcttttcagcatatttaatcctgtttatccgcctgcgaagttaatagaatttcatggaacacgtactcctgatttgcatattctttaactttgtggctatatagtgatgatt

SEQ ID NO: 103 - DNA, 11221 bp, Butyricimonas faecihominis
tattacttcttccttttgtgttaggaagatgttacgaggacaagggatcgtatgattataaagagatgaacaaaccgcaggttgccggcttggaaggttcctatgccgtgggcttgggagatgaactggacattcgtcccgagattacattcccgttaaataacgattccggcataaaatacgagtggaatgtagggggaaagattatttccactgaaaagaatctatatattccgcaatatagcggggagattggtacgacatattgtagttttaatattatcaatgaggcggaaaatgtgacctacatgaatacctttaatttgagggtatcaccgacttattccgtgggctggttgattctgtcggagaaagacgggaataccagtatttcttacattcgcccgaaagaacaggagaaagacgggaaagcggaatatacttttgaagagtttccagatgcttattttaaaaacacgggtgagattttgggaaaaagtccagtgaagctgatggagcattggtgttttaattattccgtgatgggcgaggtcttagtgctgaatggagagggggattgcgtggaattggatggaggggctttgactaaaaaagtagctgtgaaacaagagttcataggagaagcttacccgagaggttttaaggcaaaagatgcgacatttagttttaataatagttacttgatctctgaggatggaaagatgtacagtaggaaatccgaagacgtgggaaattatcacacggggttatatggacaagaacctgtttacgtggcggatagtttgagtatcaagtttgctattccggctaagttcatgaatgcgtaccacatgctggtgtatgatggttataaccgtcgtttgatatggattgcttatgatacatatcaacccggcaagattaatcctctagtttacgctgccgatccgaagttcacgaatctgggcgacatgggggataaggatttggtttattgtgggtattataaagtgagcgattttgctacctccgggtattttgccttgttgaagtcggatgctgggcaatattatgtacgtgattttaaactgtattcttacattttctcggctatggtgacagataattacgagatggaatttccgggggccagcttgattaagccggacagtaaattcctgtcgttaccattgcgaaagtatttcttcctttcttctggtgatgtgttgtattattacgacaaggcgactttggagaaagctcctaaaagatatgtcggatttgacggtgtgaggattacttcaattcagagcaacaaggataacaatcagattgcagttgggcttgaaaatggtaagttctatatctatgatattacggataagtcattggctggcggggaaccccaactggtgtacgaggctgaaacgaattttgggaaaattgtggatgtgatttataaatatggtactttgttgaattacatgtaattgtatgtgtgtaatagagtgtgaggtcggttaattgctagccggcctctttttgcgtgtagaaacttaataggtttgaaaatgttatagatggaggtagtaaattggaataatttgtaggttagcaggctttaaaaacgtcaataaatgctatatttacagcctctattttgtgtaaagtgtttaaattgtaaaagtgtttaaattgtaaaagtgtttattatgttattacgcggatgtttagttattttgttgttaggcgtgcaattcgcttttggacaacagaaacccaatccggattgggtaaatcagaagttttccatgtttattcactggggattgtattcggagttggggggagtttggaagggacaaccggttcgttccgggtatagtgagcagatacagtcttttgccaagatcccgaaggcggagtacgaggcggtggcgaaagaatttgatccggagaaatggaatgctgattccgtggtggctttggcaaaggcagcggggatgaagtccatcgtgttcacgtcgaaacatcatgacggtttttgtatgtatcattccaagtacacgaagtataatatcgtggatgcaacccctttcaagcgggacgtgatgaaagaattgtcggatgcttgccgtcggcagggggtgaagtttgcggtttattattcgttgattgattggaatttccccggaaatggcattacccctcataatgcggatgccatctcgaaggaacaccatgcgttcagtatgcatcaagtggaagagatcatgacaaattacggtctgatttctgaaatttggtttgacatggggtctttgagcgggcaacagagtaaagagttgtatgaccttgtgagtcgtctgcaaccgcagtgtatggtgagtgggcgtttgggaaatgaccggggagactttgccgtgatggcggataatgcttatccggattacaagattggagtgccttggcagacaccggcctcgtttttcgatgagacatggagttatcgctcttggcaggaacggggaagtttggataaaaagattgatgagaagttacgtagtttagtgaaggtggtaagccgtggcggtaactttttactgaacattggtccgagaggggatggttccgtggtagaattcgaacgagatgctttattagcaatggggaaatggatgaaacgttacggagaaggaatttataatacgacagctaatccttttgatcatgcagttaaatggggggacattacttgtaaggggagtaatctctacttgtttgttgagaagatcccggctaaccgggagattattttgaacgggttgatcgggaaagcgaaaaaagcaagtttgttagctgacgggaaggccttgaacttgaaacaggatgggcagtccgtgtcggtaaatattcccggggatgtgaaaccggaccggggtatgatcgtggtgaaactggaatttgccggagccttccgggttgttcccgaccagatccttgaaacgagtgaattgtcggctgtgaatgcaattcccgtgtatgcttattccagcatggattattattccagtttccggagtacggttgggtttagctggcatttcagaaaatccggaaagaccattaccccgacaattgtttacacggcaggagagcagggaaaagaactccgtttggtcattgacgggaaggagcaggatgtgactttggttggcggggaagtacagaagttgaataaccacccggaggggatcacgtggggtaaggtgtatatgttcgatcctcaagaggaacgctttaatggtacgattcttgatccgaaagtaaatgcggtagcttggcgtttgtgggatgattttaaaccgggaaaagccttaaatatcccaatgcaggagaaacagtcggtgcatatattacacgaattaacgagtgatcgggagcaggatgtactggttgaattaggggttgccgacggggtgcaggtagccttgaatggtaaggatgtgttgttgcgtacatatgttggcggaataccccggacaaatgaggtgataaaactacatttgaagaagggaaataatcagttggtcgtgaagttacacaatcgttacgggacagaagtaacctatttgatgaatccgaacgtgaaacaagaagagtataaacttcgtttgaaatcaatgaagctttactccgaggaaattcacgattgcagtcttggaatggctcatcctgccaacaagaatagcgatatgggattacgggatatacgagtagaattagaataataaaatatagatatgaaaaagagattacgtaagaaattacataggggagagttccgggaactgggattttcttttgatgccaaattcaaggcagatacggaaatgcaagtggttgaagcatggttacaggagttagcaagcttgttgaattctcattctttggaaatggggggaggttggaattccaatgtttgtgggggattcattacccgtgaacggggtagtgttactccggaagaacaggacatcgtacggaaatggtttgatgaacacgggcagaatttggaatccgttactgtcggtgagttgaaagatgcctggtacgggtggtaaaaaaacaccgatcagttttcatttcattataaaatattatatttttgtctgcgcttggggctgtatttacagccccaagtttgtaaggttctcgtgggttgtttatgctcaacttcttttcagggttaacatgaatcgtgtatgtgattttattggttgaaagaactttacgggtattttccgttatggcgagatgactagaaaactgattatatgagaacaaaattttatttaccttttattgctttagcattgatagctacaagttgcaatagtaaaaaagaggcgaccaaggaaagtggaatccgcctcgcgaatctggatcagacgattaatccgagaaatgatttttaccagtatgcctgtggaggctggatgaaagctaacccgctcacggatgagtattcaagtttcggttcattcgatcaattggccgaaaataatcgtacccagatcaaaggattgattgaggaattggccaagcaacaatcccagccgggcagtatcacccagaaaatcggggatttgtataatatcgccatggatagtgctaagttgaatgcggacggggttgccccgattaaagaatacttggataaattggcggcgatcaaagatagaaatggtttatctcaggagatagcaaccatgcaccgggatggtttcggacctttcttcggtttgtacgtgggggctgatgacatgaacagttctatgaatatggcccagttgtatcaaggaggtttaagcttgggggaacgtgaatattatttggatgatgatgaccatacaaaggaaattcgcacgaagtttgaagaacacgtgggtaagatgttccaattggccgggtttaccgcggaagaagctcaaaaagcggcaaagaatgtgatgacagtcgagactcgtttggctgaagcttctaagtctgccgtggaattgcgtgacccgtacgcgaattacaataaaattacagtggcacaattgaagaaagaagttccgtcaatagattgggatgcttatttcacgacgatcgggttgaaagatttgcaggaagtgaacgtgggacaaatggatgagatcaaaacggttgccgatttattgaaaaaagaagatttggatgtattgaaggcttatttacagtggaatgtgattaatacggcatcttcttatttgagtgataactttgttgcacagaactttgatttttatggaagaactctttccggaacgaaagaaatgcaacctcgatggaaacgtgccgttagcgctgtgaatggtgtgctgggagaggccgtcggacaaatgtattccgaaaaatatttccctgccgcggctaaagagcgtatgattaagttggttggaaacttgcagaaagctttgggagaacggattcaaggattggaatggatgagtgaagagacaaaagcgaaagctttggaaaaattggccgcattccatgtaaaagtgggttatcctgataaatggagagattattccaatctggaaataaagaatgattcttactgggcgaatattattcgttccaatcatttcgatcatgataaaatgattgccaaggcaggtaaaccagtcgataaggacgaatggttgatgaccccgcaaactgtaaatgcttattataatccgacgacgaacgaaatttgtttcccggcagctattcttcagtatccgttctttgacatgaatgcggatgatgcttgtaattatggtgctattggagttgttatcggtcacgaaatgactcatggttttgatgatcaagggcgtcaatatgataaggatggaaacttgaaagactggtggactccggaggatgccaagaacttcaaggaaagagcccaagtgttagtagactattttggaaatatcgaggtgttaccgggcttgaaagcgaatggagaactgacgttaggtgaaaatatcgctgaccatggtggtttgcaggtgtcattcttggcattacagaaagcgatggctgaaaacccgcttggaaaagacgagcatggtttcactccggaacaacgtttcttcttgtcatacgctaatgtttgggcagataacacccgtgatgaacaaatccgtttgcaaacgaaatccgatcctcactctttgggacggtggcgtgtgaatgcagcacttcctcacatcagtatgtggtatgacgcgtttggcgtgaaagaaggtgatgcattgtatttgccggttgaaaagagagcttctatctggtaataggtggtttttatgatattgattccccgggttggctatgctgattcggggaatgttttttaggggtatctcgcctgtattacagtatacttgcgtcggtgtctcgttagtaggttaacgaaaggttaacgaaaggtcaacgataggttaacggtgtggactatcaatttatgggcgatattttcttcatatatcatgtatatatacaggagacaccgaggagtgtacggcgagactactaagcgtgtctaaggaaggtataaatcgggaaggggctaggaactaggattgttgcctgcatggatttgtttttaaccaaaaaataatttatatttgcttgatactaaaattaaaagggttatggacatagttaagcgagatcagtttattgctctttggaagaaatatttcaatgatgcggaacttcctgttgcattttattattcaaaggaaaataataacgccacgatcgtgaagaaggcgatggggcatacttgtatcatagcccagcttgggcgagttcgtaaaggtgaatcgctttgttttttaccggattcggtgggatgtggcgggggaaagttttacttgggattcagtaaaagtatgagggagggattcgaatatttcctgtctcacggggaaaacacgcctcactgcgagcgctataaacggaccccagaacaggtgaatgctttcttgaagacgatccatgaacttccgagaaaaggtgattgtctggtgtttaaacgttgggatcacttgacggagcaagacgagccggaggctgtgtttttctttgccccggcggatgttatctctgggcttttcaccttagccggttttgacagttcgaaacaggaggcagtgatttctccttttggggccggctgtacctctattatttactatccttaccgggaacaaatagagggtacgaaaagagcggtgcttgggatgttcgacccgtcggcaaggttatgtacgggtagtaatctattgtcttttgccgtgccgatctcgaaattcatggagatgattgaccagatggaggagagtttcctgatcacgaacacgtggaagatgatgcaaaaacggatgtgatggatgtgaaacggggagcccggttatgcgtctcgttttatgagatgtttgcggcttccgctcttgccgtgtcctttgcctgcgggctgattatgttcatttaccggatgaaatcatcggccgtagtggcggtgatcattgtggctaccttttggttcaaggtagccacgatggtattcatccggtttactacaaaacggaaatcaggacgttttttctattattacaagaacgtggggatgtcgatccggtggctttggggtatggctttggtgtttgatttcctgacgtacgtggtctgtatgttaatcgcttatcaattgtaatcatgcatacgcttgatgtaagtaatctccacttggaatacgggtttaagcgtgtcctgtgggatacttgcctgcactgtgaaacggggcaggtcgtcggtattcttggccggaacgggggtggaaaaagttgtctgatgcaagttatttacgggggattgagattgaaggatcaatatgtggctattgacggaagggttttgttgacaagagaaaggcgcccggaggatatgcgttatcttttacaacagagtttcgtgctaccgggtttgtctgtaaaacaggtgtttgatgatttcggggtggcgttcgagagtttcgtggaggactttcccgattttgtagggacagcccgaaagcgaatgaagactttttccacgggggagcgaaggatgattgaggtgtacgcggttctggcctcggattcgaaattttgtttgttggatgagccgttctcttttatgatgcccctgcacgtgcagaaaatgaaagaggtgatccggcgggagaaagaacggaaagggattgtaattaccgaccactatttcgaggacgtgatagatattagtgacgagttatttatattgagaagtggtaaaacttggcgggtcaatggacgtgaggatctcgaattgttaggatatataaggaatacagatggaattcaagatagatgaacagacgttgaacgatctggagttgttcaatcaagctttggacgggaaaagtattttctcttgtttcaataccgcttgctctgacgggggtaaggcttgtataagaaagatgttagaaaggccgttgacagatgtcaataaaattcggggtcgagtcgaggcgattcgctatctggggcaattgccgttctttttggatattcgtcgggaagaattgagttttatcgaggtttacctgcaacaggaggatgtgcctcaacgcaatatatatcatttaacgagtcgggcggtgaaaggatggttgaaaccggataacgattgttatctgcgccaacgtgcagtcccgtatcttgggcggcttatccgtgagttggggacttttatggacgagttgccagcggggagagtgccggaggtggtaagggatatgcaacagagggtgaaagaaacgcttgcccgtgaagggatgcaatacttggtgaaccagaaaaaagattctttttggacacgagaaagtctggacctttattttcgagggaaggaacttgatggggttcgtgttgtgctggataccttatatatgctggatgctttacgatcgttggggattatgactaaagggaaggagttgacgtttccgattttcacggaaagtgggagaatggtgaggatcgagggattgtatcacttgtttttggagaatccggtaaagaatgatgttttgcttgacgaacggcaacatctatgtttcctgacagggccgaatatggcgggaaaatcaacttgcatgaaggctttcggggtggcggtttatctggctcattgcggctttcccgtaccggcagatcggatggaattgtccgtgtttaaagggttatttaccacgattaatttgtcggataatctgtcattgggatacagtcattattataatgaggttgcccgggtaaaatatatcgtggaacaggtgcgggatttacaggaagtggtggtggtttttgatgaactattccggggaactaacgtgaaggatgcgtatgatgcctcttgtgcggtgattggtggattggcccggttggcatatggggtgtttatgatttccacgcatattgtcgaggtggcggaatttttgaaaccgtttccttcggtatgtttccgtttctttgaaatagacatgacgacgggagaaccccgttacacctatcgcttgcgggaaggagtttccgacgaacggatcgggatgtatattttgaagaaagcgggggtggtggatttgatagaatcgttatgaacaagtgaatacagaaaaaaatcatgaattattctttacttgtttgttatcattagaattatttctatttttgtgtttgtaaaatgtttcttcggggcagggtgcaactccctaccggcggttatagtccgcgactccctttcgagggactgattcagtgaaattctgaaaccgacggttaaagtccggatgatagaggagatatttagttgtaattgatgttatattaatacaatataaatctatgccccgaatgtgtatgcattcggggcatttttgtttaaaggagattttgaacatggtgagacaggaagacattgaatacatgcgacgagcgatggagcttgccgaacggggagtaggattcacgaatccgaacccgatggtgggagccgtgatcgtgaagggaggaaaggtgatcggggaaggatggcacgagagatgcggagaatggcatgcggagaggaacgctttcaagaattgtacggttcctgcggagggtgccacgatgtacgtgacgttggaaccttgttgccattatggaaagaccccgccttgcacggaggccattattgaacatgggattgcccgggtggtggtcgggatggaagatccgaacccgttggtggcagggaaaggtattgctttgttaagagaggcggggatagaggtggtttgcggggtcgaggaagaggctttgcgggaacagaatcgagtatttttgaaatatatatcgacaaagttgccttgggtggcaatgaagaccgcgatgacgctggatgggaagatcgcgacccggacgggagattcgaaatggatcacgggagcggaagcgcgagcttacgtgcatgaattgcggcatcgttttatggcaatcgtagtgggaatcgggacggccgtggcggacgatcctttattgaattgccggattgagggccgtggtgtcagacagccgatacgagtggtggtagatagtaatgcccgtttgtctttggatagccagctcgtgaaaacggccggagagtatcgtaccatcgtggctcatacccgtttcgctccggaagagagtgtgaaagccttgcgggaagcgggtgtggagatgttactttgcaaggagaaggaaggacttgtggatgtcaggaacttgttggaattgttggggcagtctggaattgattccatcttgttagaaggaggaggaagtttgaattacacgtttttggcggaggggcttgcggatgaattgtatgcttttattgccccgaagatcgtggggggaatgaatgccaagactccggtagaaggtgcagggatggagaaaatggctgatgctattaaccttgaattggaaaacgtactgaacgtcggtcatgatgtccttttaaaactaaaagttaaaaactaaaagataatagatttcgtgattaaaaaagtgagggcattgagcgagga

SEQ ID NO: 104 - DNA, 11059 bp, Butyricimonas faecihominis
gtaaataataagattaagaatttcaaaatatttatcgaagtggacatttttgaaagagtaagacaacagaagggaaacattggtcaatatgccaaacaagctcatggctatttctctttcccgaaattagagggcgaaattggtccccgcatgaaattccgcggtaaggaagttttaaactggagtttaaataattatatcggtcttgcaaacgacccggaagtacgtaaagctgacgccgaggctgctgcaaaatacggtatggcttacccgatgggggcgcgtatgatgagtgggcaaacttctcgtcacgagtacttggaatctcaattggcagaatttgtgggaaaaccggacgctttcttattaaacttcggttaccagggaatggtttctatcattgatgccatgaccagccgtcacgattgtatcgtgtacgatgctgaagaccatgcttgtatcatggacggtcttcgtttgtctccggcaaaaagatatgtgtaccagcataatgacatggaaagcttgcgtaaacaactggaaagagcaaccaaatgggtggaaaacaccggtggtggtattttggtgattacggaaggtttattcggtatggcaggtgaccttggtaaattggacgagattgtagctttaaagaaagacttcaatttccgtttactcgtggatgacgctcacggattcggaaccatgggaccccacggagccggaacaggagatcatttcggtgtaatggacggtatcgacctttactttgcaacttttgctaaagcaatggcaggtatcggtgcattcatcgcttgtgatgaagatatttgtatgtatttgagatataacatgcgttctcagaccttcgcaaaatcactcccgatgcctatggttgaaggtgcgatcaaacgcttggagctattgagaaccaaaccggaattgcgtgagaaattatggacgatcgtaagagctctccaagccggattgaaagctgacggattgaatattggaagaaccaattctccggttactcctgtctatttgtccggtagtgtggctgaaggaacacaggttgccatggatttaagagagaactataacttgttctgttctatcgtggtttatccggttatcccgaaaggccaattattactccgcttgatcccgacggctatgcacaccttggaagacgtggaatacacggtaaaagcattcaagaatgttgcccaaaagttagctaacggagaatacaacaaagacgtagttgttgatgcaaacgctctttagtatttactaagaaactcataaaaaacatacctatcagccccgaaaatcacattttgaactttcggggctggttattaaagaaatgcttcaccattccctgtatcacactcttcttgtttcagtacaacccgaagacctaaagcattcttttttttaattctcatcttctgtacttgatacccctccttgaagaaccaaagccaccgacgtctcttcaaacagaactcgaatgttcctccatctattgtagtacactctggaaaatttttcccttttcgtttacgataaatcacaactcccgataaaggttctccattctcatcctcgacacaaccttcaactcgaaaccaaccttggggtaccaaaatattatcccctttagcgaaagttgtcatcattcctgctatgaatgaatgtttcgtactattaaaataaccatttacccccacctcatccagtgcaaaaatcccctgactcaacacaaccattaggttggacgctcccccccttggaacccagacttctttgctttcatacccgataaacgagacccgtaacggtaacacaccagatactcccaaagagaaatacccgtcttgattactacacgttcccattgtcattcccttttccacgatatgtgcattcgccaatggatttcccacactatccaccactcttcctcgtacaagaatctctcccacacctaaacagaccgtatcctgttcaacagccacttcctcccccatagtatatgccgcagtaggaactcccatcaagcctatcgatattcccatcaacgaaacaacctttcctgccaaacgcctgtgttccaaagcctgtgtcagataacgaacttctgcctcacacttgggacaagttcccaaacaatcgcctttatactggcactctgaaacaacatactcgatatcattcgcccgggcaacttgcttgcgaatctctttcagtattttacaagtttgtttcccttgcatcataacactaattcatcttatacgtgaaaagatcaaaatactttatccccatcatctccaattgcctgcaacttttcccccggtctttatcggtattataaccgggaataagaggtacacgcacaagcatatcctcccctcggcctcgttccaccaacaaacgaagattgcaaacaacggcctcgttatctctacccgtatattgcttataaatatccgggttcatatccttgatatcaataataaaacgatcgacaaccgggagtaatcgctcaacatactcctgccccacgttcaaagatgtctccactgtcagcaaccattctttcccacaaagttcccggaatttcccaataaattcactctgcaaacacggttcccctcccccgaaagtcaccccacctccggtagccaaaaaataaagctcgtccaccttaacctcctcgtacaatgtcctgcaatcatatcgtttccagtacctcccattgttcaacgattgtggattcaagcaatacctacaatgcaacggacaaccatgaaacgccaccaacgtagaaaccccttgcccgtctgtttgtaagcgatgacgagctattcctataacttttggagaaacttccacgcacctcatcttcaaggttatattttcacatccacgtacccgctaaacatcaattcccggtctcccctttcctgcaaagtttttgccaagcatcccatcgttctctccaccttcccctcaaacaacgtccttccttgataagtaacctttaccggcttatccatatccaccatcttatcattcagataaactcttaatttcggataatcactcttcacgattttcacttcattcccggcaagttctgccaccacggtcattcccggacgagcatctgccggatttactcccaaccagtacatggacggacgaaccacctcttcctgacgccagacaatctctttcggcaaagcatttcttttatatttagccatccacgcgatcgctaccgtatctgcccgatccatccaatgacccttgcctttcacaatatgcgtttcgtgtatatacccttccggctccacttgctgtaaagaatccaacacgttccctttcgctaccgccaacttattccggtcgtatgccccgtcattttctcccatccagatcataaaaggaacgtgacgcaaattcacctgcgaagcttctcccggatgcccggccatcatcgaggctgccgcccagcgatcggccatacggggggccattctccacacaccatctccaccggcagaataccccaacagatataccttatccggattcacacccatctccacgatagccgtttgaatcaacgcctcgaagaactcgtccaatcccggtttaaaccacatgttccaatcatcccaaggcgccctcggggctacataaactccttccgccggctcgtacaaacgaatctgattctgccattgctgggtgtttaatgcctccggagcattaccccctccatgcatggatatgtacaggctacgcccatccgccggtttttcaccaaatacccggtaatcaaacttcatctgtaacccctcccggttaaaagttttcaatccccaagaacgatgatatttctctttaatctctttttcccatgcctcaaccagtacaatcccggcatcacgggcccctgttgcagtcaattttttctcaacaaacccctgtcccgccacactttccaacttattcttttccaaatagtttttcaactttcccacgttttgagcaaaggctctaccagcaattaatgtcactaaaaataaagccaacccgaattttatcattttcatacaataacgcttatatacattttttctattgcaagtttaccattaatttcaaaaaaaacaaaaaacagcaacatccatgtaacactatgctagctaagaacaaacacgactatcgcaaaacccggtatttcaacaaatgcgtcccgtcactcccggcgaacaaataaaatcctgcatttcccttatccccgaaagtgatcgaaaacggggaatttccacgtataggaaaacctttggaaacatctttcatatccaacaagaaaagacgttcccctttaccatccataactccaattctcgaatcccgagccgagaaacgataaacatacgggaaactcagctcggcattttcccagcatttctccaacagcaatttaccttgaacatcatacacgcaaagcatatctttccgggaataaacaaactcatcctgcccgtcaccattaatatcttccacgttgagtattccaccaccgaccattttctctcccttgactcgctcgacacggccccggaaatcaaccaatacgatctccccgttaacatccgagaaagcgatcttcatctgaccgttctgcctcgtcaggtacaaaggcgtattaccggataaattcaacagggtagacaccttcacccgttcttttcccttacgatccaaaatatacaatcgatactggtctgcatacacgagataatcctttccatccacccggaaatgatagattttagatacaatatcattgtcactctttggcacatcccaacctttcacgaaattacccgacaactcgtacaaatacacgtgatgatccaccccgggagcaaacacccgataattcttgttattctcgtaatcagccaccgagataccctgtttgcaaggagacttgaacgccagtgggaatcgaggtaaataattaccattccggtcaatcaaataaagatggcttggtgtagaaaataaatattgtaacttcccgtttttaaacatatctacttgataaacctcactattgatcctcccctcgatcggcaatttccacaagatacgtcccacgtcattaatcaagtaaatcgtgtttccctcgtcctgcacgaaaagttcacgttctcccgtgttatgattcaccacgattgccggtttcatactcattctggcatccaatcgtgtctgccacatgatctgagcctgtttctgctccacctcttctgtacttaaaaacaacgtgtgatacagcatatcaccctcacacacccattgtaacccgagagaagaaaatacctccattccctctttatttcgctctaacaactcacgcaaagtccctttagtcacctgttcgtaataaggtaacatcgaaaccatctcggacaaatacatccagttaaacttcgaggacaatttcgttctcaacttctggtaccattcctgatctctcacgctcaaacgacgcatgtaatcactcgcaaacgcttgaagacctttttcagaagaagcaaacaccacgtaattatcctccaccaacacataattcgttgctattcctcccaatacgtatccccacatcactccggcaaaatcgggaacaggcatcttgaagtaactcacttttttatctttatccaaggcaaatgaacgatataacgaaatttcagaagtcccggacttcgaggcatacgttttcaacatcttttccagtaatcctctagctagactcccggctttcacgtgaaccaccacgatcccttcctcctgtttccggctcgcatcataagaaagcgtcccttttccccattcacctttcaacaaagcctgccactcttcatccaatttatccccgaaaagacgggcaaactcctgttttcttttccgaacattctcgatctgtcccgccccataacgataagtctcaagagatgccagataattcttcacgtcattcaaagccagaatgctaacacttttcacgtcggcaggcataacggcatccagtttggaatcctgaggaaattgtcccttaaacgcaacggggaaagcggctttcaacccgtcataatgcacaaaaccgttaaaactgatgccactcggttttatttcaccatctaacgctccccacttgaaccacttggcaatattcgtctgtttagcaataaaatccttctgcaataacaaaggaagtagatcggaaaaacaagtcgtgttcaagaacacgtttagaccggcccccgcggagaaataacgattcacgtttttaaaacggggcgccccgtctttctcatcttcaccgggattactcaactggttcacggcatcctccacgtatagctcggaattagaaaccagcaccataccaccgacaacagcgtaacacacctcatcctttccccgacttgccaagtatatcttctggttattatattttcgctctttcacctgcaccccggcaaacattttctgcaaaaaagcatgtacatcccctctggaaaacaaaccactccggtttaacacgtacaaaaaccgaatcgattgttttccctccacccgaatcgccatcacgtaggaagaagtatctacctgagacgcctgtttcaacgtatccaccacccgacacaacatactttcccggaacgtcttgatctcccggtcaaaagcaatagcaattttcgatgacaaatttacgttcgcattcacattaaccacaacagctgaattatagggaataaacgattccttcggaacatcaacctcccgttcccgctcgttcacccaccatagcgcaaatcctattcctccgagaaggacaactccaaaaacgattaatgcaattttcttcaccacgttctaattttagattttaaattttagattgaagattagagatcattcgattaaaagaaacgctcgcctcgtgcggctggaatctaaaatctagaatcatcaattctaaaattgataagctttttttcattggaacaaatttagtaaaatcgagcctttttcctacttttgtaaaaaggaaaatcgcatgaaaaaaatatatacgctgccggaattggaaaacatgctgacttgtcagggagaagaagaaaaccggctttactcggaatcgaaaagaataaagaacgaaaccatcggtaacaacgtctacctccggggattaattgaaatctccaatatctgtaccaaagattgtttttattgcggcatccggaaatccaacacggaaacagcccgatatgcactttcggacaaggagattcttgatgccgccgacttcgcctacacgcatcatttcggctccatcgtattacagggtggcgaacgttccgataaagcatttgtagatcgaattacccgtttattgcaagaaatcaaaaagaacagtaacaacgagctaggcgtcaccctttcgctgggagaacaaacggaagactcttacaagcgctggaaagatgccggagcacatcgttatttgttgcgcatcgaaacatccaatcccgaattatacgccaagattcacccgaacaacccgctccattctcacgctacccggttgaggtgcttggaaagcctgcaacgctgcgggtatcagacaggaaccggcgtgatgatcgggttgccctttcaaacaatcaccgacctagcaaatgacttactgttcctacaatccatggacatcgacatggtaggtatggggccttacctagaacaccatgccacccccttgtacgagtaccgtcacctactcctttcccttcaagaaagactgcgtctgtccattcacatggtcgccgccctccggattctcatgccggacattaacatcgctgccaccacggccctccaggccattgaacctgccgggagagaaaaagcactggaaatcggggcaaacgtggtgatgccaaacatcactcccacaacgaaccgcaccctttataaactttacgagaataaaccggggacccacgagggtgccgcagaatccatgcgcaaactggaagaaagtatcctgaaaagcggctgtaaagtagcctacggggtctggggggactcccggcatttccaatcaagaacggaaaattaaaatcaaaaatccgaaccgggtaatcaatgaatcaccagatttttaaaaggagcgaaagcggctaaaataaccagcgcccccaaaatcgtgatgactaacccggaaacccggttaatcgtgattaacacgcgtaaccggaacttcttacgaaagatatttaccaaagtcgagagcgtgtaccaccacacgccaccgcctaacaacaccccgatcaccaccaacaactcacccagcatagaagaagattccccgaaaacggacattccggcaaaaacagccataaaaacgaccaccgtgatcggattggaaactgtcaagaaaaacaatgaaagataatctcccaacaacccggtcttactcacccggccttgacgtcgttgacggatctggcgaatcgggttatcaaaatagatttttaaccctatacacagaagaaaaatcccaccgataatttgtaataatagctcatgagtctgcacggtatttatcacgtaccccaacccgaatgccgccaccgaagcgtaaaaaaaatccgcagaggcagctcccattccggcaataaaacctgatagcgcacccttatgcaaggttttctggataattaatacacccatcggacctaatggtattgacaccattaaaccaaccaacattcccttgaaaagatacaaaatatcgtacatgctattctatcggaaatttacagttccacactatccgaggaaaatcgactcaatatcgtgtcatcatttatctcttttgacaacgactcgatcgtcttcatcggcacgtcaaaaatatctaaaataagtaaaccatccaagcacatattaaacttaggatcgatattaaaaccgataatcttggcattcaacgaaatatatttcttcagtaagaccggtaacttatcgctcgatggctcgatatccccgatcatcttgtccagcacggatatatccttttgggcagcatccaacattacctgtaccccgggttcttccgaatgtacttgatacttggaacgagggatcacgtatttcgccagttcatgactataatgattttcctgaataaaacgcataatcagctctttcgatacttccgtatactttccgctgatggtcaccgggccgatcagataacgatactccggattcttcaataagaaataaagaatacctttccacaacatgaacaagggaagcggtttacgctggtactcctccgtaataaaagaacgtcccagctcgatcgactcgtacaacacgggtaacatctctttccgcatcttaaacaacgaattgatataaaatcccttcatcccgtaacggtcaataatctcctttcctttccccacgcgataagccccgacaattttttcctcttcccggtcccaaataaacaggtgatagtaataaagatcatattcatccaggtcaatactacgattcgtaccttcacccaccgcacggaaagtaacttcccgcaaacgcccgatctcgttcaacacgttcggaatcttcacggaaggagaacaatatatatcgtaatttttcatgttaaacaacaagtaatcttcagcgataccctcgatttctttcttcaataccgcactctctgtctctgctgcaaccggttctgctttaggcattgctttttgtgatttaataaaaaacttctttacttctaacgcagatcccaacaaataggttttcgcccgcaaaaatttgccatactgggctatatcgtggaaagtattctgagtttccacgctgatcggattcccaattcttaacttcaccacccggtttttcttattcaataactcggaaggcaatttaatcgttttcaataccgggtgaatcattcccagcaaataaaacaacaaactgttagaccctttaaaataaatcgggatgaccggcactttcgccatcttcaccagcttcaacaccgaagaatcccactccttatcttccacgtgattcgaatcagcctgataagaagaaacctccccggcagggaatatccccaaaggttttccgtcaatgacatgacgtattgcctctttaatcactcgcatattcgaatccttcttgctctcctccgggtccaaccccaagatataatcctgtaacggaactatttttttcaaaaggaaattagacatgatcttgtaatccggacgcaacttacacagcaaacgcaccagcacgataccatccaatcccccgaacgggtgattggaaaccgtgataaaagtaccctctttgggaatcttctccaaatcttccttgctcacgtcgatcgtcacccccagagcctcgatcaaactatccaaaagaacttccggatcgtcatcattcaccttcacgttcaacttatccagtttatgcaaccgcaaaatatacatcaccaacttggataccagactttcccgaaaccggttcaacccatgagagccaagcaaaaaatcattcgtatcaattaatttcatctatatccttattaaatgttccatccctagaacaccacaatatctttcacaacatgatccccgacccggtcattcaaggcttttattagtccctctttcaccatcagaatctcgttctttaccacagaagaagtgaaactcacgaacactttcccctctgaaatccgtaaacttttcgtccgggaagcaatcattccccccacgacatccggccaaacctgacacacctccctctctttgaactgacgggataaccccatctgctccaagtaaagatttaccagttcatccattgtcaatgtcttaccctgcttcaaaatattcctatttattatgat

SEQ ID NO: 105 - DNA, 11019 bp, Butyricimonas faecihominis
ctatgttagcttattgttaaattttttataatgtttttttcacggccacttcttcgaaactttcgacaaaatctcctgtctgaatatcgttgtaattattgatgttcaaaccacactcgaatcctttggaaacttctttcacgtcgtccttgaaacgtttcaatgatcccaattctccggtgaagatcacgataccatcccgaatcacgcgcacttttgaagaacgggtaatctttccgtctctcacgatacatccggcaatcgttcccaccttggaaatcttgaatgtttcaagcacttccacggtcgaggtgatctcttccttgaattccggggataacataccttccatggcggatttgatttcctcgatcgccgtgtagataatagagtaaagtcgaatgtcgatttcctctttctctgccagctttctggcacccatcgaaggacgaacttggaatccgatgatgatagcgttcgatgcggcagccaacataacatcgccttcggaaatttgtcccacggctttgtggatcacgttcacttggatttccggggtcgacaacttgatcagagagtcggacaaagcctcgatagaaccgtccacgtctcctttcacgatgatgttcaactcttggaagtttccgatggcaatacgtctgccaatttcgtccagcgtgatatgtttctgggtacgcaatccctgctcgcgttgtaactgttcccgtttgttagccaaggcacgggcgtctttctcgttacccatgacgttgaatttgtctccggcctgtggagccccgttcaaaccgagaatcaatgccgggcaggatggtccggcctcttccattttacttccgcgttcgttgaacatggctttcacgtgtccgaaatattgtccggcgagtaccacgtctcctacgcgtaacgttccgctttgtacgagtacggttgccacgtaaccccgtcctttatccagcgaggactcgatgattgaaccgatcgctttccgtttcgggttagcctttaactctaggatttctgcctcaagtaatactttctccagaagttcttctacattcaagcctttcttggctgagatttcctgacattggtatttaccaccccattcttctacgaggtagttcatggcggccagttcttcccggatcttgtcggggttagctcccggtttatcaattttgtttatcgcgaatacaatgggtactccggcagcactggcatgattgatggcctcaacggtttgcggcatgacgttatcatcggctgcaataatgatgatggcaatatccgttacttgggcacctctggcacgcatggccgtaaacgcctcgtgtcccggggtatctaggaaggtcacggttctaccgtcagcaagtttcacgctgtaagcaccgatgtgctgggtgattcctcctgcctctccggcaatcacgtttgctttacggatatagtccagtaaagatgttttaccgtggtcaacgtgtcccataacagtcacgatcggcggacgggattccacgtgttcttcctgttcgtcttcatcctcgtcaatggcctcctgaatatccacgctcacgaattcgacatcgaatccgaattcttctgccacgatattaatggtttcagcatctagacgttggttgatggacacgaacaagcccaaagacatacaagtcgagataatatctgccacggaaatatccatcatggttgctaactcgctaaccgtaacgaattccgtgagtttaaggatactcttttctaactctgcctgctccatttcagcctgcatcttctggtgtacggcatctcgcttgtctctccggtgcttggaactcttggtttttcccttgttccccaaacgggcaaacgtgtctttgatttgtttttgtacgtcttcttcagaaatttcagccttgctggctttctttttctttatcttctttattttcttcttgctctcttcctgtttggcggttttagaagcttcaatgttgattttctcgtcttttttcagaatacgtttcctttttttacgagtttccgattcttcagaatcatcctcgacctcgtttattacgacgtttttcttgatcacgatgtcatccgtattcttgggaggaaccaaagattttttcttgagttcccgtttgtccctttctctttcctgtttactcttcttcgggggccgggtacgctggttgatcgcatccagatcgattgtcccgacaaccttcacgtctttaatcgccggagtcggtgatttgtagctcacttctctgtcggctctgttggaatgatcttcagacggggctttttcctcttgacgggtttcaactttcggttgtttgatgattgttttcggaggtctggcaacaggagcctgtgtttcttcccgttcttgcttttgtgcaattacgggagtttcttttacctgaggttctgccggtttctcttctttcttttcttcgatcttcacctcttttacctcttcaaccttctcttccggtttctgttgcttattcagtctgttcaggtcgatgtgatctacgaccttaattttattttccagtttaatctcgtcctttatagatataaattccggagcgtgttcctccgtaccattgttcatattatcaatggtaaccgtttctttttttaaccgtgtattttttaaatctacccgattggattcttttttagcctcgctatcggtagaaaactctttcgctaccaaagcgtactggtcatctgttaatttcgcatttggatcagatgaaatcttaatccccttttcctgcaggtaatccactatcgtggacaaacctacgttaaattctctagcaactttacttagtctaactgccatattaagattttattttacaagcattataaccttgagcgttccttattcaaattcggctcttaatattttgagaacatccctgatggtctctatctcaagatcagtcctgctctctaattctgattcacttaactctaacacgctctttgccgtgtcacaacccacgcgtttcagttcctcgattacccatggttcgatctcgtcggagaattcttctaggttaacgtcttcttcctctgcggtttcaagttcacgataaacatcgatctcgtagcccgtgagctggctggccagtttgatgttcaaaccgcctttaccgatagccaaggaaacttcctccgggttcaggtaaacgttcgctctcttgttttcctcgtccatttcgatcttgttgatcttggccgggttcaacgcacgggtgatgtatagttggatgttattcgtgtagttaatcacgtctatattttcgtttctcagttcccgaacgataccgtgaatacgtgaacctttcattccgacacaagctcccactgggtcgatacggtcatcgtatgattccacggccactttggcgcgttctcccgggacacgtaccacgtttttaatcgtgatcaagccatcgaatatttccggtacctcgttctcgaacaatctttcaaggaatacgggggatgttctggaaagaataatgtacggggaagcgtttctcatttctacgcgaataacgactgcccggatggtatctcctttcttgaagaaatcgctaggtatttgctcttgtttcgggagaatcagttcgttgccttcgtcatccagaaccagaatctcttttttccatacctgataaacctctccggtcacgatctggcccactttctctttgtatttggtgaagatgtgatctttctccagttcaagaatccgggctgaaaggttttgtcttaaagccagcacggaacggcgtccgaaatccttgaatttcacctcgtcggtcacctcttctcccacctcgtagtcggcatcgattttctttgcctccgtcagcgaaatttgggtattcgggttttcgaaggcgtcatcctctaccacgatgcggtttctccagatttccaagtcacccttgtcgatatttataatgatgtcaaaattctcgtccgtcccgtaacgcttgataagcatgttcctgaaaatatcttccaacactctcatcaaggttgccctgtcaatatttttaagctctttaaattctgcgaatgaatctatcaaattaatggcttccatttttattttatgtatttagaaaacaacaatatctttaacctcctttatgtctgtaaaatgaatctctttctccactttgacgatgcttttcttcttctttccttccacggtcactttttcttcacattcgatcacgattcccgtgttggaatgggattttaatattccctgtagttttcccccgttttgcagtttcacctccacttgattacccaggttcttttcgtattgctgggttactttgaagggataaccgattccggcactcgaaacggttaactcgaaatcctcggtatctcgatccagttttgcgtccaattgtttgctgagggttacgcaggaatccacgttaatgcccttcagggagtcgatgtagacctcgatcgagttgtccggagatactttcaagtccaccagaaacaaatctgtcccctgcagtattgtttcgataatgtcttttatttcctctgtacttttcattctactctttaatctaagataacagaagaggggactaatcgccccctcgtttgttaataaccgagtgcaaagatacaattaattatttttaatccaaagagttccagtggaaaataggtgatggcggaatatttttttcggtgcgaacgtttccgggaaaggggtttcatggcaatggaaatcgtgttggagacaagcctttaggccttgatatgtatgcttttaaataatgggattgaaacatatttgtcacattttctatatagttccaaataaaatttgtaagtttgccgaaattttttgaattatggagtttaaagcaaaggacatagcagctctattaagcggggttgtcgatggagaccccgagatttctgtaaataacgtatctaaaatagaggaaggaaagccgggaacgttggcttttttagctaatcctaaatacgaacattatatctacacgacgcaagcatcgatcgtgttagtgaataaaacattcgaacccacgcacgagtattcctgtactttgatccgggtggaatcggcttatgatgccattgcaacattgctgcaaatgtatgatgatatgaagccgaaaccagtaggaattgaacaaccttcttatatcagtgatagtgccacgatcggggaaaaaccttacatcggggcatttgcatatatagggagaggtgcgaaaatcgggaataacgtgaaaatatatcctcaggcctatatcggtgacggtgtggttatcggggataacacgattatttatgccggggtaaagatttacacgggatgcgtggtcgggaaatcctgtatccttcatgccggagtggtactgggagctgacggtttcggattcgctccggaaggtgatcattacaagaaaatcccgcagatcggtaacgtgttgctggaagacgacgtggagatcggtgcgaatacttgtatcgaccgggctaccatgggatctacgattattaaaaaaggagttaaactcgataatttagtccagattgcacataacgtggtagtgggaggtaacacggttatcgctgcccagtctgggattgccgggactacaaaagtcggtgagaactgcgtgttcggcgggcaggtgggaattgtcggtcacttgaatatcgggtcggggacgcagattgcagcccagagtggtatcacttccaacataccggaaaaatctgtcctgcgcggatcgcctgcattcgattatccgaaataccagaaatgttatgtcatgttccgtaaattaccggagctatacgggcaaataaaagatttagagaaagaagtaaataaattaaaatcagaataaaatgtcagtaaagcaaagaactttaaagagtgaattttctttgaatggaaaaggtttgcataccgggaaacaggtgaccgcgacctttaagccagctgaagagaactttggctatcgaatacgtcgaatggatttggagggatctcctgaaattccagctttggctgaatatgtaaaattaatggatcgtgccagttgtcttgaaaaagacggcgtgtgcgtgttcaccatggagcatgcgatggcagctctttacgggagcggaattgacaactgcctgatcgagttgagcggggaagaattcccgatcttggacggtagtgctaaatattacgtggaagagatagagaaagtaggttttgaagaacaaaaagcggatagacgctactttacagtgaaagagcaaatggaattttgtagcgaggacgggcagacgaaaatcacgttattgccggataccgactataatataaatttggtcgttgcttacgattctccttatttgcaaatgcagtatgctacttattctgaaaaagtaaccgattttgcgaaagaaattgccccgtgccggacattcgtgttcctgcgcgagttggaaatgcttttgcagcacaatctgattaaaggtggggatttggataacgcgatcgtgatcgttgatcgtgaaatttctcaagaagaggtgaaccgtctggctaaactgttcaaccacgattctatcgaggtgaagcagggtattttgaataatttggacctgtactttgacaatgaaccggctcgtcataaattgctggatgttatcggggatttgtccttatgtgggcgttttatcaaaggacgtgttatcgcggagagaccgggtcacaaagcaaacaccagtttggccaagaaaatgtgtaaggccatcacgcaggcggagagagaagatgttcgtcccgacgtggacacgacggccgaaccgttgatggatgtgaataaggtgagagccttgttgcctcatcgtcctcctttcctgttggttgacaagatttacgaggtgacggatgacatcgtgatcggttgcaagaacgttaccatgaacgagcctttcttcgtgggacacttcccggaagaaccggtaatgccgggtgtgctgatcgtggaggcgatggcgcagtgcggggggattctggtgttgaatcaggtggaagacccggagaattactccacgtatttcgtgaaaatagatggtatcaaattccgtcataaagttgttccgggcgatacgctggttttcaagctggtaaagattgctcccatccgtcgtgggatcgtgacgatgagagggtacgcttttgtcggtaaaacgttagtttgtgaagtgggtgaattcatggcccaagttgcaaaaacgaaaaaatagtgataagcttgtacttaaaatgtaactattatattgtaattaaataaaaaaaacgaatgaaacaaccgttagcttatgttcatcctgaagctcagatcgcggataacgtggtgattgagcctttcgtgacaattgataagaatgttgtcattgaggagggaacaagaattggttcgaatgtcactatcctggagggagcgcatatcgggaaaaattgtaagatttttccgggggctgttatttctgccattcctcaggatcttaaattcaagggagagaagacaatcgtcgagattggtgataacacgaccatccgggagtgtgcgactataaatagaggtactgccgctaaaggcgtaactaaagtcgggagcaattgtttgatcatggcctacgtgcatatcgcgcatgactgcgagatcggggataattgcattatcacgaatgcttgtcagttagccggagaggtcgttgtggatgatttcgctattatcggtggaatgtctgccgtgcatcagttcgtacatatcggtcgtcacgtgatgattcaaggtggctctttaattggtaaggacgtacctccttacgtgaaagccgggagattacctttgtcctacgcgggagtgaattcgatcggtttgcgccgtcgcggattcgtgaacgagaagatcaacgagattcaggatatataccggatacttttccaatccgggttgaacaactctgatgcggtggaacgaatcgaggccgagatgccggcatccaaagaacgtgacgagatcattatgttcgtgcgtaacagcaaacggggtgtcatgaaaggctatatgggataaaaatccaaagcattaaatatctatttcagagcccggccactcaaggtcgggctttgtttatgataatatttcatactcaaactcctccgtcacttcgtgccacctcctctataaacagaggaggagctggtgaatcttgctgaagatagagagtatttcaactctccctctgccagagaaaactaaaaactaaaagttgaaagtagaaaattaagaagcgtcggccttgtgtggtggaaatctaaaatctacaatcattaaatctagaattagtaaggggagtaccccgaaggggggagggagttcgtttactgtaaactcgtgtataagtcctaaaaaaaagcactccttgcgaagtgcttttttgctgttctaatcctagaattataatttcggacctgcggcaaccaatgcctttccggcctcgtttccttcgaacttcttgaagtttttgatgaaacgttctgataagtcttttgctttcgtttcccagtcatttgcgttactgtatgtatcgcgaggatcaaggatcttcggatcaactcccggtaatgcggtcggaacctcgaaattgaagaacgggattgttttggtcggggctttgtcgatagagccatccaaaatagcatcgatgattccgcgagtatctttaatggagatacgtttaccggttccgttccatccggtatttaccaagtatgcttttgctcctgttctctccattttcttaaccagttcttctgcatattttgtcgggtgtaatgacaagaatgcagcaccgaaacaagcagagaaagtcggagtcggttcagtgataccgcgttccgttcctgccaattttgcagtgaatccggacaagaaatagtatttcgtttgttccggggtcaggattgataccggaggtaatactccgaacgcatcagctgataagaagataacttgttgtgcagccggacctttagagatcggtttcacgatgttcttgatatgatagatcgggtaagaaacacgagtgttctcggtaactgatttatcattgaagtcgatttttccgttagcgtccacggtaacattctccaacaaagcgtcacgtttgatggcgttatagatgtccggttcggcttccttgctcaagttgataactttagcatagcatccaccttcgtagttgaacacgccttcatcatcccatccgtgttcgtcgtcaccgatcaaaagacgtttggggtcagttgacaatgtggttttacctgttcctgacaaaccgaagaagatagcggtgttcttaccttccatatccgtgttggcagaacagtgcatagatgcgattccgcgtaacgggttcagatagttcatgatagagaagatacctttcttcatctcaccaccgtaccaagtgttcaagattacttgctctttggttttcaagttgaaaacggtagctgtttcggagttcaagcctaattctttgaagttttcaactttagcttttgcagcgttgaaagaaacgaaatccggttccccgtagttcgctagttcttcttctgtcgggcggatgaacatattcttcacgaagtgagcttgccatgcaacttccatgatgaaacgaactttcaaacgggtacccgcgttggccccgcagaacgtgtcaaccacgtacagttttttgccggacaattgtttcacggcttttgccttcaaatctgcccatgcttcttccgaacaaggtttgttgtcgttcttgtattcgtcagaagtccaccatacagaatcctcgctggcctcgttctttacaaagaatttatctttcggtgaacgtccggtgtagattccggtcatcacgttaactgcgccaagctcggtcaaatatcctttttcgtacccttccagtttcgggtctgtttctgccttgtacaattcttcatatgagggattgtgaaggatctctttcacatccgtgattccataaatacttaaatctaattttgccatagcaataaatttatgttagaaattaattaattctttttttctttaattcggcacaaaagtaggaaacattttgatataaaagaaccaatttctcctttcccttgtccgtttatgttttattaacacgttcttgtttttctattctctcaagcatatgcttacacgatcgtataccttttgtacgttcgtgtccgtgaacttgttacgatctatgtttagaatgtaactatcggtaaatggggagtttagttttcgatcaatccggctcctgccgatggcggttagtgccgcaacttgaagattgggatgatcggaatttaaatattcatttaccatttgttccacgttttcccgtttcgaaagaaccaatgtcccgaaatattccgcgatctcgaagttgtaacagaattgtaataattgagtaattttttctgtaatcaactcgtgaaccgggaataaaaaacaggcaacgatttgttcttctcgtttctttgttccccacaatagttgtgccaatcttaaatcgggttggtattgtccggccagatttttgagagagaggtaacttgccccgatctgtccccgcgtgtcggctcctatccgttccatgctgtcaagacttcttccgttttgtaaccggaatattcttcggctgacttctttaaagagttgctctacttttttatcaatcgggaaaacttctatcaccttgtcctgtttatttaaagtaaatgaaaatattagcatgtttatacacgtgcaaaaatagctataaaaaatgaaatcgtggcgtcagagg

SEQ ID NO: 106 - DNA, 11000 bp, Butyricimonas faecihominis
attaaaacatgactttaaagaaattgacactaccggaactcttgaaaaatagttgttccaagttttcaaaaaatttatctttaaattttgtcgcaagcggaaaaaaaacttaccaagatttatataacgaggtcgtatctattgctaaccacttacttcatttaggtgtaaagaaaggagacaaggttgccattttaagtgcgaatatgccgaactggggaatcacccaattcgccatcgcaaacattggagccattgccgtaccgatcttaccgggattctgttctacagaactccagaatatattggaacatgcggaggtaaaagtgatcttcgtttcccgcctactggcaaaatgtttggaaggagtaaaaacaccattccttgagcataaaatcctgatcaataactttgccaccatgccggaaggatgctaccaaccggaagacttggataaattggtcccggatattaatttgaataatacaacccctcttcccgaagtttcaattgaagaagaggacattgcatcaatcatttacacctccggtacaacaggattttcgaaaggagtagtcttaacacacaaaaacttggtatgggatgcacgtcagtgtcgtactatccaacctgtagacgaaacctaccgtttcctaagtattctgcccatggcacatacttacgaaaacacactgggacttttgttacctttgatgttcggagcacaagtatattacctggatcgagtaccgaccccaaaattacttgttccggcaatgcagaaaatccgtcccacggtagttttatccgtacccttgattatagagaaaatttacaagtcgcaagtgttgcctaaattcaccagttcgaaattgatgagcaagctctaccgattcgctccggctcgtaaattattcaaccgattggcaggaaagaaactaatggaaacctttggtggggaactaaaattcttcggaatcggtggttctaaactggatggtaccgtagagcaattccttcgggaagctaaatttccctatgctatcggttacggacttacggaaacagctcctatggctgcaggttccaacccatcacagacattccttcaaggagtaggtcccgtcatggaaggtgtacaaattaaaatcaacgatcccgacaagagcggacaaggtgaaatctggatcaaaggtcctaacgtgatgaaaggatactacaaacgtccggaacttaccgcagaaaccttcacagaagacggttggtttaaaaccggagacttgggttctttcgacaagaaaaatagattagctatccgcggaagaatcaaaaccatgattctcggtgcatccggagaaaacatctacccggaagaaatcgaatctatcattaacaatttccgtttcgtgaacgaatccctcgtagtggaaaatagcggcaaactggttgccatggttcattttaacatggaagaacttgaaaaacagtaccagaaattgaaagaccaagccggaaactataaggaaaaaatcaacgactacattgaagaacaaaaacaagaactacgggattacgtgaacgcccgggtaaacaacttctcaaaactacaacttgtactcgtacaacatgaaccttttgaaaagacacccactcacaagatcaaacgtttcttgtattgcaaataataaaaaaaatcgggtttttaggaacccgattttttatttctatcattttacctgaaagtccagcaaacattccccgtctaaaagcacccgaaggtgatctcctattgataaattcctttgtcgaaaaacacccccacaaaacaagaagtctcctattttcaacatataatactcagacattgctgcaagtgtcttctccggtttttgcgaaatctcacaaactttacgtgtgagaacgctctcaccgttcaattcaaataaaaagatcatatctcccagcgagacgtccaccaatgatttcatcggtgaaattgccgccgaagaatcaaaagccattgccgccgtaggagacaaagaagccgccaacaattctctttccagattatccgcatagaaacggattccgactcccacctcctcgtaataccgtccggcaaaacgttcggccacgtgttttccgatcttcccaacccgtaatactatttgcggtacacaactcaactcggtggcaaaagccggaatatagaaatcatcattgtttcgcaggagggcattatcgccaatgacattataggcaacctcacccgcctcattatactccacacaaagtaatttcatttttacaatcccaaatttagaatcaaaccttcaatgatcatagaatcaccaattcgtccaaagcccgtttcggcacgtggtgcgatccgtccgtttcccgccagtacttgtaatcaccgtctttcatctcttccaacaccaccgtttcctttggtctacccaaagcgataacatacataatcttcaaatgctccggcaattgcaacacctctcgcaacgactcgttcttgaaagccttgataatacaaccgccatatcctttctccacggctcccaacaatatagtctgtgcttgaatcccgtcatcacacaaacagttctccacgatagaagtatccaacaattggatcaaataagctgccgggcgttctccctctttcggaccgtcccaatcttttagatagccagcccatgctaaattaggaaacaccttaccacacaaatcggcatccgccaccaccttgtatttcaacgcctgtgcgtttcttcccgaagcacaataccgagtcagtccgaccaattccgccaattcctcccgtgtgatccgaacgttctgaacaaaacgacggtaacttctattttttaataacagttctttcagcataaatctatattgaatctaatgattaaattgtaaatttgttccgaaacaaaaatagtaataaaatatgaattcgtttcttcatctcctggcaaaagatctgattcagaaatatggccacaattttgacaacctgagcattctgttcccgaacaaacgagccggactattcttagctcaagaactggcccaactgattgatcgtcccgtgtggatgccggagattctgacgttgagcgaattcatagaacgccagaccggactgaaaaaagccgaagaactgactcttatcatcaaactttacaagacctatcaagaatatgccggaacgaccgaacgttttgacgatttctatttttggggcaatatgttacttggggatttcgatgacatagacaaatatctcgtggacgccaaagacctcttttccaacatcacggcattgagggaaattgaatccgccttcccctaccttaccccggaacaggtggagtttattcaaagtttctggcggagtttcaactcggaaaaatacagtcgggaacaacaggaatttctaaacgtatgggataaactctacccgacctacactcgttttaaggcaaaactactcgatgaaaacttgtgctacgaaggtatgggacaacgtctattctgcgaacaactctcccaacatcacacggatcgtcaactgatatttgccggattcaatgccttaaaccaatgcgagaaacggatattttcctattttcgggacaaccgacaagccctcttctactgggattacgacttgtactattcggcaaacgacaaccacgaggcaggcctttatatccgggagaacatgaaactgttccccaatgccctgggactggaacatttcaacaacttcaggtacaacgataaagccatcgagtacatctctgttccctcaaccatcggacaggccaaactgatcccgacactgattgaacaaatccatccggaacggcaggattcatacacggacacggccatcgtcctttgcgacgaaagcctactcaccccggtcattcattctattcccgacacgatcgacaaaatcaacatcacgatggggtatccggcacagaacacgtctattgccgccttgattgccatgctgggagatttaaagcattatgccaagaaagagggagaaatgacccattattactacaaaccagtcatcgccctgttgaaccataaactaataaaaagttcctgttcggaagatattcccaagatcacgaattacattaacacgaacaatatcgtgtacgtggcagaaaaaagtcttcaattcagcgaaatcacacgaaccatattctcctcgtcggaagagaacttactcgattacctgttgcgcattttgaaacaactgattgcttccatacagcccgaaagccatgaaggactagccatcgaaaaggaatttctattcacgattttcacgacgattcaaggcattaaaaatacctttatcgaagaaaatattatcccggacaataagttttacctgcaaattattcacaagatattacaaggtgtgtccatcccattctccggagagccgctagaaggaatgcagatcatgggattgatggaaacccgtatgctggatttcaaaaacctgattatcctgtccgccaacgagggaattctaccgaaaggcggacacgcctcgtcatttatcccctacaacctgcgactgggattcggattaccaactccggaacacatggatgcccttttcgcctattacttttaccgcctcttgcaacgggctaaaaacatcaaactattgtacactgatgtcacgaaaggcatgagtagcggcgagatgagtcgtttcctttaccagataaaatacgaatcgggactacccatccgagaagtccatttccaaaacaaaatatcggttcaggacaacccgaccatttccatccctaaaaatccgtcgattttaaagcaactgaaaagctacacggatgaaaacgaacggggcatctcgccatccgcgctcaacacgtacatggagtgtcacctgaaattttatttcaaatatatcgcccggatcaaggagaaagaagagatggccgaagagttggatcaccgcctgttagggactattttccatcaaagtacacaatctctctaccaaactttccccgacggggagatcacggcagaaggtctcgatgccttgacgaaaaacgattcactgatagaacaacacattcagactgcctacgaaaagttatacgacacgactgtgtccaaaatgctggaaagcggggccaatgaccttgtactatctgtcgtgaaaaaatacgtgaagaaggttttcgaatttgataaaacgttatgtcctttccacatcatttccatggaaagaaaatatcgtatgcccgtcacgatttccgcttttgaccagcccaccgtgatctacgtggaaggagacatcgaccgggttgaccgggtcgcccaaggaacccgtgtcatagactacaaaaccggagccgacaaaaccgatcttaaagacctgccgtccatctttgattcaaacaataaacagcgaaataaagcggctttccaaaccttgctctattgcatgatgtacgagtacgaaaatccgggtacagacccgattcttccgggaatatacagcacgaagttgcttttcacaccgaattacagctatctgttgaagtgtaacaaagaaccgattcatcgctttaaaccatacgaaccggaatttcaagatctactcgtgcaattattggaaaaactcttttcacccgaagtaccgttcacgcaaacggaattaccggaaaagtgccgtacttgctcgtacaacgaaatctgtaaacggaaataaaagaaagttgggatcattccgaaaagagttcggcgggaaataagtcgggatggacgtttctctctccattttcctccgtttcaaagccacttgagctgatcgaatatgatgggtagggtacacgtctttagttgccacgtacgggcttatttcccaataaacacgccccgaactctcacgtgacacaggttctatatctgttcttttgctttcaaataaaaaggaagccgggattccagatgttcccggacaaaaaactccaactcattatcggaatacatcgccaacaaaggccgattagagcgttgccgtttcaaacgatcgacaataacaagagatgacgtgttcaagaaaacagtcgttccctcttggttcatatagtccatattgtcaaagaaacaaggtgttccccctcccgtggccagcacaaattcatccgtctcgttacatatctcatgcaagatctcccgttccctcttccggaaatactcctccccctccttggcaaaaatctccgaaatcgaccgtccctctctgctctcgacactctcgtccagatccagaaaaggaagtcctttatctttggccaattccttcccgaacgtggacttgccactcgccatatatcccacgataaagtacttcatacttttcacttccggcatttattcaaaatccaacttcatctgcgtctcgtcactcagcatatccgggttcgtaatctcgaaatcaatgtcggtcgaagccgtttcctcgctttcctcctcaccgctatccaaaggctcgatctcgctgatctgttttacctcgtaagtcgtcacccgctttccgcgagccttgtacgatttctcggcaataaactcatctgcaacaatcacctcagccggacgactttcgtaacgtccaccaaacacaacctcgaaccgaggccgcttttcaccactcaaggctacaagatacgaaccttccgtttccccgataaacagcgtgtgacgtgccacattctcgaaacggaaacgcttcaagtaatagaattgctgttccgcatcaaagaaaacagccgaccagactttctccggttcatatttctcaagcaccgagaatccctcctcgtagtgattactcaaatcataatccgtcgtgtagtaagtaccgtttttattcaccaccagaatccggtcctctccctggaattctcccaagtaacgaccacgcccgtcagtattcaaccgcaatacatcctcgtcaatccatattttccgaccacccaacgtagatgctcctttctgtaccagcgaaattttgtgaatatcattcttactcaacacgtttccctgcgagtcgcgtcccttaatcgccaaacctgcaaaatcatactcgaacaccagtttcttcatgcccggttttggtttcaagcataccttgatcacctcggcctccccgttcgggtttgcactgaaatacagcacccgtgatccctgcgtacctttcgtcaagttatattgcttatcgcgggtcgttcccgtcacgaagaaacgtttcacgtaagacggtcccaccttaccatcccggtaggccacgttatatatcgtgcgcttatcattcttcttgaacacattcacgtacagcacgtcttttcccacgaacaacttatccgccaccttggtcacgtaatacgtaccatccttccggaacacgatcacgtcgtcaatatccgaacactcgcagataaactcatccttcttcaaggccgtaccgataaaaccttcctcccggttgatgtacaacttttcgtttgccaccacaaccttcgtcgcctcgatattctcgaaattccgaatttccgtgagtcgttcccgccctttaccgtactttttcttgatattttcgtaataattgatcgagtaaggaatgatatgctcgatgtcaaatttcacccgcgcaatctcctcttccaatcccttaatataattctcagcctgttccgagttgaacttcaagattcgtttcatcttgatctccaacaagagctttatatcgtcatccgtcaccggacgaatcaattctggcaagaacggttccaggcgtttccgcacgtgaaccaccacctgatcaatcgactcgctctcctcgaattctttatccttgtaaatacgttcttcaataaatatcttttccagagatgaatattgccaatccgtctccaactcgcccagcttgatcttcaactccaacaacaacaaggccaccgtttcgtccaccgatttccgtaaaatatcggtaatcggcatgaaaatcggcttatcattctcgatcacgcacgagttcggagaaaccgacaactcgcaatccgtacaggcatacaaagcatctatcgtcttgtcggaagaaacacccgcagccagatataccaaaatctcggccgttgctgccgtgttatcatcaattttcttgatcttgatctttcccttctcgttcgccttcagaatcgaatcgatcaaagccgaagtcgtccgcccgaatgggatctccgtgattcgcaagatcttattcccggcgtctttctctatcttggcccgaattttcaccactcccccgcgcaacccgtcattatatttcgacacgtcgatcattccccccgtcggaaaatccggatataaaacaaaatcttcatttttcaaataagcgatacaggcatccagcaactcgttgaaattgtgcggcaagatcttcgaggccaatcccacggcaataccttccaccccttgcgccaacaacaacgggaacttcacgggcaacgtcaccggctctcttttccgaccgtcgtacgacagcttccagttcgttgtcttcgggttaaaagccacctccaaagcgaatttcgaaagacgtgcctcgatataacgtccggcagccgcatcatctcctgtcaggatatttccccagtttccctgacaatccaccaacaggttcttctgtcccaactgcaccaacgcatccttgattgaggcatctccatgcgggtgataagccatcgtactccccacgatattggccaccttgttaaaccgcccgtcatccatctccttcatcgcgtgtaatatacgacgctgcacaggttttaacccgtcgttcacgtaaggcaccgcacgttccagaatcacataggaagcataatccaagaaccacttctcgaacattcccgacaaatgctgaatcgaccgcacccggccgttttcttcctgttgctccggctccacattctctacttccccgttctctatttcctcgctcatattaattgaaaattgaaaattgcaatctaaaacctaaaatttaaaatctaaaatcataaaatggttagatttcatccttctccacgtacaaattatctataataaaatcctgccgctcgttcgtgttctttcccatgtaataggataggatcgtaccaatcgggtcttgctttgtcatgcgtaccggttctaaacggatgtctttcccgataaacccaccgaactcgtccggggaaatctctcccaaacctttaaatcgcgtgatctccggtttcggccccaactgcttgatcgctttttcccgttctgcatcagagtaacaatagcgtgtctccttcttattccgcacccggaacaacggggtctgcaaaatatacaaatgtcctgaccgtaccacatccgggaaaaactgtaaaaagaatgtcaacaacaacaatcgtatgtgcatcccgtccacatccgcatccgtggcaataatgatattattataacgtaattcttctattccattctcgatattcaacgctgcctgcaaaagattgaactcctcgttttcgtacacgatcttcttggtcaacccgtaggaatttaacggtttaccccgcaaactgaacacggcctgcgtgttcacgtcccgcgactttgtgatagacccactggcagaatccccctcggtaatgaatatcgacgattcagtcttccgttcatggttggaattgaaatgcacccgacaatcccgcaacttccggttgtgcaagcttacctgcttggctcgttctctcgcgatcttctggataccggacatcgctttccgctccttttccgtctcgacaatcttgcgcaataacaactctgccgtgtccggattccggtgcaggtaattatccagctccttcgtcacgaaatcaaaaataaaattacgcaccgaaggcccctccggggctatatctttagaacctaactttgtcttcgtctgcgactcgaacatcggttcctgtacttttatgctgatcgctgcgataatcgaagtacgaatatcggccaaatcaaaatctttcttgtaaaaatcacggatcgtcttcaccacggcctcccggaaagcaatcaagtgcgtacctccctgcgtcgtgtgctgaccgttcacgaaagagtagtactcctccccgtactgccgtccgtgtgtcattgccatctcaatatcatttcccctcaaatgaatgatcgggtacaacccctccccactcatattctctgacaacaagtcatacaaccctctcttggaatgtaatttctgaccgttgaaattgatagtcaacccggaattcaggaacacgtaattcttgaacatggcctccaggtaatccatgatgtaatgataattaccgaacagctccttgtccgcaatgaaagtcaccagcgtaccattcggttccgtggtcgggaccacctcctgatcttccacgatcagcgctttgttgaatcgcacccgtttcgtctccccgtcccggaaggactggatgataaaactctcggaaagagcgttcacggcttttataccgacaccgttcaatcccacggattttttgaaagcctcggaatcatacttggcacccgtgttcatcttcgatgccacgtcaatcaatttacccaacggaattcctcgtccgaaatcccgtaccgaaactgtccgttcctctaccttgataataatctcgctccccgctcccatcgcgaactcgtcaatactattatccaccacctctttaaccagtatgtatattccatcgtccattgccgctccgtcccccaattttccgatatacataccggggcgcaagcgtatatgttccctccagtccagcgtccgaatagaatcttccgaatagttctctaccataagt

SEQ ID NO: 107 - DNA, 10985 bp, Butyricimonas faecihominis
ttacaaaggtagattaaattttaagaggttggttataaaattgatagaaatggagagatgtatgaattaaattcattaataaatgctcggaataattgtttccgtgatgagttgtgaaattcataatctcttttacctttgtaggaaataaaaaagaggaaaggcattttttaacaaaaatgttgtagaaaacgtagaagttggtaatggagataaagaatcaacatatagaagtagaaaagcatccgttagagccgttcttgccggtaaatgccaagttgttgatgctgggaagttttccaccgccaagagcgaggtggtctatggagttttattacccgaatctgcaaaatgatatgtggaggatatatggggtgttatttttcggtgataaagattattttttagaaaaggggaagaaagcgtttagccgggaacggttagttgcttttttggaagaaactggggttgccttgtttgacacggcaatggaggtgattcgtcaacggggaaatgcgtccgatcagtttttggagattgttactcccgtggatttggatgccgtgctgaaacgaattcccgaatgtaaggcaatcgtaaccacgggacagaaagcgacagatactttgctggccttggtcggggctgaggctcctaaagtgggaggtttcagtgattttggatataaagggagggctttacggttgtaccggatgccttcgtcttcacgggcttacccgaagcctttagaggataaagcggcagaatatcgggtgatgtttcatgatttaggaatgttgtaagaagatgaagacagtattgttggtagtggatatgcaaaatgatttttgtttgccttcgggttcgctttacgtgccgggggcagagaaagacgtggagaggttaagtcggttgatcaaggagaaaatgactgttattgataagattattctcacggcagatgaacatcatgtgatggacatcgctcatccgtcctattggaagaacaagcggggagagcatccggctccttttacaactatttcatggtgggaggtattgtcgggagagtggattcctttcggggatagagaagaggtaattgattatttacgtcgattgattgaaaacgaggaatataaacacatgatttggccggaacattgtctgtacgggagtgaaggggctgccataacccccgtgttgatggaggccgtgacgtgctgggccagagaaggaaagtattacgaggtggtggagaagggcttgaatccttcaaccgagtttttcggtgcttttcgggcaaatattcctttggattatgctgctgatacaaagtttaatatgaaactgaaggacgagctagagtcgtatgacgtgatctggttggccggagaggcaaaaagtcactgtgtggcaaacacgttgaggcagttgtttgattatcctgaggtagttcagcgactggtaatactggaagattgtatgggtaatattttgggatgcgaggatttagctattccaatttacgagaaggccgcccgaatgggggctcgttttgagacgtcggaatctttattgttttcataaaaagggggtaatatgatcatccatgattttttggataatgatttgtataagttcacggcaatgaatgccatacaaaagaagtttccggattcggaagtggtttatcgtttcgtgaacaggggaaatacgagtttccctcccggttttgctgatgctttgaaaaaagaggtggaggctatggcgggagtggtactttcaaaggaaaacgagaagtttatgcgagcaaaatgttattattttgattcggtgtttttcgaccttttgaaaggttttcgttttaatcctgctgaggtgaaggtgagtcaggagggaggaaagctagacgtggaaattcggggcttgtggtaccggaccgtgttgtgggaagttcctttaatggcgatgatctccgaattgtattttcggatgacgggacaggttgcccgtgatttggaacggaatgcaacggagaaagcaagagccttcgcggatataaaagcggaaatttccgaattcggtacccggagaagatactcctttgacgtgcaggatcgagtgatcggcatattgaaagagaatatgaagggcttgttgaacgggacaagtaatgtttattttgccatgaaatacgacttgattccgatgggtactcatccccacgaatggttcatgtatcacggggcgcatttcggttatcggtcggcaaatgccttggcgttggaaaattgggtggatgtttatgacggttatttgggtatagccttgactgacacgtatacttccgatgatttctttaatagttttgacacgaagtatgccaagttgtttgatggtttacgttgggatagtggtgatccttttgaattcacggagaaagcattggagcattaccggaaacatcgggtggacccgaaaagtaagacgatcgtgtacagtgatgcattggatctggagggagtgaaaaagatcaaggctttcgtgaacggacgtctgcatgacgtgtatggaatcggaacgtatctcacgaatgatgtgggggtcacaccattaaatatggtaatcaagttatttgaatgtcgtccgaaagggagcgaggtgtttttgcctgccgtgaaattgtcggatgtagagggaaaacatacgggttacccggacgaggtcgatttatgtttgagaatgttaagattaaaataatgaaaggatatttatttttggagtacccggcgtgtggtacttgccggaagacgaaaaagtggttagacgagcaaaaggtggattacacgaatcggcatatcgtggaagaacgcccgacacgggaggagttgaaaatatggttcgagagaagtggtttgccgttgcggaagttctttaacacgagcgggttgttgtataaatccatgcagttgagagagaaactggacgggatgagcgaggaggaacaattggagttattggcgtctgacgggaagttggtgaaacgtcctttggtcatcggggaggatttcgtgttggtgggattcaagccggaagagtgggaaaaagtattgttaaaataataggtagttttttatgttagttacgtacgaggatatacgaaatgacgagagtataaagtgttatatcacggaggccgacaaggccttgtccgctttaggatatacagaacattcattcccccacgtggtgaaagcggcgacgatggcggagatgattttattaactttgaattacccgaagcggacggccgaactggccaagattgccgggtatatgcacgatattggcaatatcgtgaaccggattgaccatgcacagagtggtgcggtaatggcattccgattgctggaccggatggggatggacccggcggagattgcaatggtcatcagcgctatcggtaatcatgacgagagtacggctgctgccgtgaatccgatagctgccgccttgattttggctgacaaaacggatgtacggagaagtcgggtgcgtaatcaggattttgcgagttttgatattcatgaccgggtgaattatgccgtggaagaatccaagatttattttaatgaagatcattcggctattattttggatttgaagattgatacttctatttcggccgtgatggattatttcgaaatctttttggggcggatgatgttaagtcggaaggctgccgagtttttgaatatcagttttgaactggtgattaatggtcaaaggttgttgtaaataaaccttgtgatatttttcaaaactttttgcgagcgaagtaacggaataagcaattgtggtcgtgtggaatattattataaaatgtttatatttgcgaaagaacaatgcttttcattatggctatcgtatcgcataaagagtttaaggctttcttcgagactttttttattcccgtttacacgttgatgcaacgctacacgggagagcgtgaattgtcaagagatttcacgcaggaagcatttgtgagagtgttcgagcatcggggtgagttcgagacggaagagaatgccaaagctttcttgtacaccgtagcccgtcgtatctatctggatcattgtaagcatcaaaaaatagaaaatcagtaccagaatcgggtaaacgaggaagatcccgaagaatatgattttttgaaggaggttactcaacaggaggtgtcccgaatattgtacgatgctgttgataagctaccttcacagacacgttcgatcattttattgaacttgaaaggatttaacaacacggaagtggcagaacggctaggtgtttccgtgaatacaattaaatcattgaaaaagagtgcttacgtgacgttgagaaccttgctgtcaaaggatcttttgatgattttgttcgttttagtcgataaataatttatttttacactcacccacttttttttctcaatcgtcttcttaataaacgctaaatttaaatcgtatgaatttgctaagaagacgttttaaaattgctcattggattgcggaagagtttgccggggtgattatgaaagagaatcaagcccggttggagcaatggcgtgtagaaagccctgcccatgcgaaagaatatgatgagatccggacatatatcatgacggaaaacgagcgtagggagaaagaaaaacaaacagtaaagaatgagtggcggaaatttgagcgtgttcatttcagaaagtatgttatttggagaagaataggccgatgtgcggctattatggtgatgcctttattggtgtgcgggtatttcgtgtcttccgagtggaaatccccggaagtcatgattgctgacaatgtggaaattgttccggggacaggaagagcccagttaattatggctgacgggagattcttgaaattggaacaaaaagaagatatgaaattggatttacccggggtaaaagtagttgcgacgggaaagaaaattgtttaccgggcaatagaagaagaagcgagtaccccgaaggtggaggagtacaacacgttggttgtacctcgcgggggagagtatatgctggaattgtcggatgggacgaaggtgtggttgaattccgattccgagttgcgctttcctgttacgtttgtcggggataggcgaagcgtggagattgaaggggaggcttattttgaagtagcaaaggatgaggggaaaccttttcacgtgttggcgaacgggtcggatataaaagtggtgggaacaagttttaatgtgatgacttatcggggacgtacggttacaactcttgtcgagggtaaagtttgcttgacatataaggatgaatcggtacttatggtaccggaccgacaggccgaggtgatcacggagaccggaaagattttgatgagagaggtggatgcaaggaatttcacgttatggaaagatggtgtgttttatttcgaaaatgcggctttggagacgattgccgagcgtttgtcacaatggtatgatgttaatataatttttaatgatgaggcattgaaacagttgagatattcggttgaaatgaaacgctataataatattcaggatttactaactaaaattgaaaagacacaaaaagtaaagtttctaattcaaggaaaaagtatttatatccgtaaatggatggaagcctacgatttgctagagtgaactttggaaagaaaatccctataataggggatttagagaacagatttcaaaggttacttttgtcaaaatttactagcataatcgaattcgaaaaattgtaatgtaactttaaaatgatgcaagcaggtaatgtagccccattacctgcctactaagctcatcattaaatgaaatgtgaaacctaaaagcaaaagtatgaaaaaaaatgacaaccccaacagcttgaggagatttaagttgtggagaaaattgttaatcgtgaagttgctatgcgtgtgcttgttcttgcaaaacactgctttatcggcaagtgtttactcgcaagagttaaaattaacgttgaaagggaatgatattagtctgaccaatatcttttcccagattcgggaaagtagtgattacacgtttgtatataatctggatgacattcaagatgtacgggtgaagtctctagatgtgaaagatgcgtctatccgggaggttttggacaagtgcctgaaaggaacaggattttcttacgagatcgaggatcacgtggtgattatacgtccggatcgtccggccaagcaagaggtgaaaaaggtgaccttgagtggtttggtaatggatcaagattccgtgccgatagcgggagtaactgtcctgttgaaaggtacttacgtgggtgtaaccacggatgtcacgggaagatttcaaatggctatcccagaacaaaaagaggtgtttttattgttttcgtttgtaggaatggagacacgggaagtcaaagtaattgattttaagaaacagattcgggtggtaatgaaagagaaggttggacaattggatgaggtcgttattacgggatacgggcagacaacaactcgtagttcaacggggtcaacagctagtttggggcaagaggtttttgctaacaaagcgacgccgactgttgacatgttattacaaggacaggttgccggggtgagtgtaatggcaatttccggtcgtccgggagaggctgccaaggtcagaatacgaggaacgaacacaatcagtggggatgcggaacctttatgggtggtggatggcgtccctttgcaacagaacgttccgaatatctcgacggggcagattaaatcgggtaatctgaacgagatttttgttacaggaatagccggaattaatccgaatgatattgagaacgtgacgatattaaaagatgcttcagctgcagcaatttacggatcaagggctgcgggaggtgtgattgtgattacgacaaagaaaggaaaagcgggaaagatgagggtcaactattcgaccactctttctattggactaaaaccgcaacgagatccggggttaatgaattcttccgagaaaatggcttgggaacaggaattatgggatgaattttcttcggaatctttcgtgtataatcaagcgcaaacggatccacggaagaaaatacatagtccggtggttggtattgtaggaatgctccggtcggagaaacttggtaaagacgataaactttggcacgaggatgattttgtgccaatgagcaaggaagaacaggatgcttatattgcaaatttggcaaaacattcgacggattggtttgacgtgttgtttcgtaattccttctcgatgaatcatcatctttctttttccgggggatcgaatcaatatacctattatgtttctttgggggttacggatgatcgaggattagtaaaagaaacagattatcaacgttataacctgaatgcaaaggttgatttgaatccatctgatcgtttgaatctcggttttggtatcgatttatcaaaacaaaaatcagatagctattctatgacggtaagtccttttgaatatgcctattttgcaaatccttacgaaacattatataacccggacgggagttatcggtcagatcggacttatttcaatctggcaggtattaatgatggtaatttgagtgatggggtacagcctcctagcgggtttaatattatgcgggagatgaaggaaacatcgagttcggctgataatacaagtgcttccgtgcggatgaatcttggttatgatatcatagaaaaactgagaatttcaggattggtatcatacacgtattataacaataaggtagatgatgtaaaaggacgggatacttatgccgcttttttagatagactttattttgatgagaataatagcgagtggattccttatggttctatcacgcagacttcatcagatggttcaagctacaatgttcggggacaattggaatatcgggatgtgttcggggatgctcatcaggtaactttgttgggaggagccgagttgaggggggataagagcgatcggacttatgcgaagcgtttcgggtatgatgacgtgacgggtaattcggctatgccggtgcatccgaatcctcaagtggaagatgtgaaacgttatgctgatttgattgaccagttgtccggagaagtgagttctgaaagtcgttttgcttcattctatgcttctttggattatagctatttgaagcgttatttgttgagtgttaccttccggacagatggttcgaataattttggtagtgacgaacagtttaatccgacttggtccttagggcttgcatggcatttggatgaggaacggtttatgcatggtttgtatcctatcgtgagccgtttgacattacgagctgccatgggatataccgggaatgttgtgaaatctgtcaataaagatctggtgttgaattactcgacaacttattgggatggattgagaacggggaatattagtgccgctcctaatcctaaagtgcgttgggaaaagacaaaagacatgaagattgcattggatttcgggttattcgacgaaagagtcagtgggttggttgaggcgtattatcggaagagttccgatgtcgtgtcaacagtagatgttttgtctacaaccggattttccggacagggatttaatacttcagagataaaaaataaaggaatagaaggaaccttgcgggtgaaagtattgaatggtaaggattttaaattcactctagccggaaacatagcatggaaccgtaatattttgtcgaagtatagcaaaaagcgtgtaataacggacggacgatatgaaggttttccattggagtctgtttttgccggacgttacacgggaattgatgcgcgtgatggtgtgtacacgtatgagctgagaccggatgctcagatttataaagggacggatttacaggccgtggataattaccggtattatttaggaacttctgtttctccggttactggtggttttaacgtggatttttcttataggaatttacgtttgaatgttggtggtgttgtttcttcgggggcaaaattgctgaacatggtgaattctccggcaagctacgagataatcacctctaaccggacgggagaaacccctcagaccgtgtatagtgatctgtaccgtaatcatttgaatgtttcgaaagatatggtgaatcgttggacagaggaaaagggaaccggggtaaagtatccaagaataatagattttatgggagagcgattattattggatcaatacaacgtgcattcacaagaaatcacgaagggggtctatctggaaaatgtttcttttctgagaataaagaatatttcgttgttctacgatctaccacaacatatcgtgaaatctttgggattgaatacggtagggttctcttttaccatgaataatttcatcacgtttacgaattattccggtattgatccggaaacaccgggtacgacttacccgatcacccgctctataacgttaggaataaacgtgggattttaaatgaaagaaataggatatttaaattttaaggatatgagaaagtcaagtttatatattatcatctcgctccttttctgcaatctttcttgtacggaatatttggacgtgaaaaataagggagaggttattccggaaacggcagaggagttttcagccttactacataggcatttatacagtattgacggggctggagagtatgcttttttcggagctccttcgacggctgcttcttacgaggcttataccgataactgggatgcggatttgacaaccaagttggatttgccgatttacgtggggagtgatattagtagtttgtcgttccgttttaaatcgttgtacgaggttattcgtgattgtaatatcgtgatcggggagttgaaagagcgtgatacggagttcggtaaaaagttattggcaacggctcacacgattcgtgccgtgtgctactacactttgatgcgcaattattgtgaaccgtatgacaagagtaatgcaactgagatgttaggggtacctatcgtgaaagagtttgatatggaagggaagcctgaacgttcggatttgaaggaaacagctgattttattgttgaagatttgaagcaagcaattagtctgaaccagactgacgagcattatcgtttttacgtggatgtttctaaagcgtatttggcgagagtatatttctggatgcaagagtgggcattggcggcaagtatggctaaagaagtgttggataagtatccgttaattagcggggaagcctataaggagatgattcaaagtgaggtgaaacagttaggaaacgtgttgatacgttccggaatatccaaatcagaaggatacgtgtacaccgatatgcagaagacgaaagggcgtccattatctttggagtttgtgaatttgtttgtagagaaggaacgggacatacgttataccttttcttttaacacggaatttgtgaacaccaaaatgttaaagacctccttgcgaacggcggaaatgtgtctgatcatggctgagagttacgttcattccggagatacggagaatggtttgaagtatttaaatcatctgcgagagaaccggattaccggatatactccatacacggaatcaaatttaccggctgtcgatcccgccgcgttagtccaagtggatgcagaagggaaacctctgacacctttgatggctgcaatattgaatgaacgacggaaggagctttatttggaaggtgatcgttggtacgagttgaaacggaacgggcgaccggaaagatggtgtgggcatagcggggtgaaatatgttacggctaaattcctgtacacgttccctataccgaaggaagatatagcattgaactccgggttaatacagaatccgggatatgaaacttattaatgtgttgtatttaaatc

SEQ ID NO: 108 - DNA, 10960 bp, Butyricimonas faecihominis
attataaatggattattaacgcgagcgtaaaatttcaaattctgcatcttaattttttgcatcaatcgttgaggcatattgtatgccaattcaattgatgtacaacgcaagaaactacattcacgcataaaataggtactttttcgaacttcctttgatgccgcccaattttcctgaggattatgaacatttatggactgagtagaaagacgaggccagaaagggtgttctttcatgttatcttcactccagtggtcattataaatctctttcaacattgccctatctcccacaaaaggattgatttgcatcggatccataaaaaatcctcgtttacccgatccttgaaaagcaaaattaaattcgaaatttttataattaataaaaccactaaatccataaatcactcgtggtgtttcaggaaaccctatatacgttgcatctcgaacgtctatcacaccatcctcatttaaatctctataacgaatatctcctggcattatatctccaccttgaaccggtgaattatcaatttccgcttgatcttgaaataatccctccgcaatataacctattgattgtgatatttcctttccctttttacgttgccaagatggtttatctatagcttcttctatttccagataaactgctttactatacgtaaaagttccgtttaatattatccaaaaatcattactaaaagcgtgttgaattttacctgataaatctattcccctcgaacgagctttccctacatttgctaattgatatttttccaatccaactgtcgctggcattgttattctatagtcaataatattatgacgtatttcctggtaaatatcagcatttacctcaaacaacccattaaataattttgtttcaatacctaaattcacttgttctgcaatttcccacttgatcttactattaggataagacactaacctatctctatcaaaattacccctattgggacggggatctgttacagtttcaagagaaagcgttggtaaatgtgtaaaacgaggagaagagataattccatcgttccccacttccccccaagaaagtctaaacttcaaaaaggataaccatttagaagcccctgctaaaaaattttcttttgatgcaatccatgccattcctacagctggaaaaaatccccattgatgccctttgtcaaaacgttctgatccattatatccaaaactagcttctaaaaaataacgatcacgaaaaccataagtccctcgcatagccaatcccatatttcggtgaggaattgcctctaaaacacctgccacaggagaacccgttgattcttgcatattaaaaacacctgtcaaacttgtctgatgctctccccatgccgctgtatgtaatcctcgaatctcgtatgtagtttgcgttgcttgagtatcatctcctctcacggcacttaatgttctctctgcagtccctgcatttaatggataaagtttatgcttccctgtttcaaaatcatacgaatctaaacgataaagaaaaggtttcgtttggaaaggtgttgtataatatcccgtcctatttaaagaaacactagcacgaacttctaaacctttaagcaactgtgacaaattttgaatatattctgcacgaactgtagctgaataccgactacgatccatatatcctttatgaagattcatgtaaggattatttcctcccgctgctgacataccaaaacgaatatgcggccaattataagtttcatcagcaggataaattacggcaaaattaacaggacttgccgtaaaagcttgataataaatatcctgaacattttgcaatggaccatgatatttatcaagagaagcagaagaagaaagcaataacctaattcccgcacttaaatcaatatttaagtttgccctgaatgtcattgtattattcttcacattacaatcaaattgatttaatttttctgttttcaacatcccttcgtcacgaatataattaagggaagcataatactgaataaccctcgaaccaccacgaatattcaaacccatatgatgatttatagaataatctttaaaaagaatcttataccaatcattggcaggataaacaaatgatggatagttaggattattcgttctctctatacgctctacactatattctggagttgcattaggattacgagtcataattgcctgattatacattttcatataagtaacaggatctaccacctctatttcacgtgttggcatagatgcaatagcctcataacgtaatgaagtatacactgatccctcttcaccttttttcgttgtaaccaaaatcacaccattagctccacgagccccatacatcgctgtagcagaagcatctttcatgacactaaaagattctatatcttcaggtgcgatacgagctaaatccaatttagaagattctactccatcaatcaaaattagaggatctatatttgcccttgactgaaaagatgttataccacgaatgtaaaacttcgtattcatttcttcttctgtcaaagctcctggaagaccacctgtctgccatgcaatcataccgggaattttaccagcaaattgagttgtaagatcgctactcgatgatctcaacgcctctgggttcactgttgtaatagctgcaaccacactctcttttttctgttccccaaaggcaacgactgtcacttcctcaatattttcagcagtcggatttaaccgtatatttatctttgttttccctttaatttcaaccacttccgtcttataaccaataaaagaaaccctcaatgcatcatcaggacgaacattaatcgtatatgcaccctcaacatctgttgccactccttgtgttgttccttgaattaaaacggttgctccaggaatcggattccctttttcatcaacaacacgaccagttatcgttattaacttcacttgaggtttttccgtcgcttttctttctttcagtgttactacccctttgttatactcaaacgtaagaggagttcctgttaacacttctgtcaaaacatccttcaccttcttgtttttcacatcaacgcttaccttaggaacttctttcatctgttccgcattataaagaaaacgtaaccccgtctgttttcgaattgcatcaaacaattcgtacagattcacatccgtcaattttaacgtaacggtttgatcttgtgccatggttggtaaagaggtcaaacctacgagaaaaatgatcaaaaccattcgtaatttcatcatttgccaaactttttctcgtgctttcccaaagaaatagcacgatcctttcttttttttcataactttgtttacaaattttgtgttaaacatggtaacgaccttttgcaagaaggcggttactggttattacaatctccggagagtcgccacaactctccgttttttatttattgctaacaataatcgttcgatctttcacgctgaaatgcacatccgatgtcttctccaagaagaacaacaaatcccgaatatcagcatagcgctgcacgttcccgtagaacctgacatctttcaatgaatcattctggaaaaagacgctcacatcataccagcgttcaattttttccatgatggattccagcctttcgttcacgaacaccacatcctgattcttccaagcaatataggaatatacatccacatctttaatttcaacctcccccgtgatctcgttggcctctcccagttgattcggtttcagcctccgctccggggtcgaagcatttgcccggaagccaacagccccgtttaccagcaccacttgaatccgttctttatggtaggtattcatattgaactcggtaccatatacccgtaaacgataggccccggaagtgacaaagaaaggttttgtagtatccttctttacactaaaataagcctctccttttaatttcacatgacgctctcccgaagtgaactttaccggatattccaattctgactccgcgttcaaccacacccctgtcccgtcagaaagcgtcaggaagaactcccccccacgaggaacgataaccttgttatatatcggtttctcggtttccacgtttcccgattgattatacacgagtgccttattcgtgtcgatcgccaccacggaaccatccttttccacgatattatctgtatttttcgtcagatcaataacttctccggtagaaaggaccaatcgagcctgtggataattcgctcgtatgatcggtgtattttccgccagcatattctctttagccggagttgacataaacagatacacgccacccaatgccaccagaacagccacggaggccgccacccgaaacccgattttccgaatctttgcccggcgaatctgtcgaaatagcattgcttctctatcctccacgtgaactttctgttcccgattcgcccaacgaataaataaggcatctttttccagttgatgatagaccttcttattttccggactatcgttcaaccattgctccacggcaaaacgcccttcctcatccaactccccgttgaaataagccagcaagcgctcttccgtttcttgatctaataaaccatttcgcataaatcatactatttttcatcaatagtaccggaaacattaaaaaaggtctaatagatttttgaaaaatttttaaattttattttcgagtacagaaaaataacaggaatcctgcgaataactcctcattcaatcgctctctcaatttcttaaccgagagacccagcaatgtttttaccgtggaaactgagatcccgtaacgctcggccacttcccggtatttcaatccctcgacaaacaccccgttcacgacatcccgacttctttcgggtaataacgcaatctcgtccaacaccttcgacacgatggcgtcatgattctcattatactcttcgaaagctaaatccacgtggtccaagtccacagcatgatgaaaaacatcttgcttatccatccggttcagacaacggttacgcacagacacgtaaagcaaagaggccaaagtagaagggaagaaattcaagtaaactttattattccaaatggaaaagaaaaaatcctgcacgacatcttctgccatgttcacgtcccgtaaaaacgtatcagcccacacgaccaagggtttataataggcatcaaataacaactccatccccttttgatttccggaacgaagtaaattacatatttcttgattcctatttttctcagaatcgttcaccttatacatcctaaaaattaatgatcacgactaccaatcacaaaggtaacggaattttttataaattcgtccctcaaatactcaaacacaaattttataaaaatgagaaaactattcctacttctatctttaggtgttttcttgttctcttgtaaagaggccaagaaagaaacgaagccaagcccctaccaagcgcttgcagatcagtatgctgaattcccgttaacaacggatttgagccaattgaccgacaacgagaagaaaatgattcccatacttatcgaagtcgccgatataatggaaaacattttctggcaaaacgcttatggagataagagtgcattgatggcacaattcgctcaggattctgccgctctgaaatatctttccataaactatggtccttgggatagattaaacgacaacaaacctttcatcgacggcgtgggagcaaaacctcttggagcaaacttctacccggctgacatgacgaaagaagaattcgacgcgctggatgatcctcgcaaaacggactggtatagcgttatccgtcgggatgcagtcggaaagcttatcgtgctttcattccacgaagcttacccggaagaagtggcaaaagcatccaaattactggaagaagctgccgcactagctgaagacccgggattgaaaaactacttggcattaagagcaaaagcccttctggatgatgattacctagccagtgatttagcatggatggacatgcagaacaacacgttggatttcgtggttggtcccatcgagacttacgaagatcaactctacgggtataaagcttctcactccggacaaatcctcgtgaaagataaagagtggagtaaacgcttgtctgaatacgctcaatacttgcccaaattacaggaaaatttaccggttcctgccaaatacaaaaaggaaaaagcaaatgctaacccagacatgaacgcttacgacgtgatttattacgccggagattgcaatgccggaagtaaaaatatcgctatcaacctgccgaacgacccgagagtacacgcggcgaaaggaagtcgtaaactacaattgaaaaactccatgcaggccaaattcgagaaaatggttgtgccgatttccaaattgttaattacgcccgatcaacaaaaacatattagttttgatgctttcttcgaaaacgtgatgttccacgaagtcgctcacgggctaggaattaaatacacgctgaatggcaaacaagacgttcgttccgccctgcaaaactactacacctctatcgaggaaggtaaagcggacatccttgggttattctgcgtgaccaaacttgcagaatggggtgtattggaaaacaaagacctcatggataattacgtgacttttatcgccggaatcttccgttccgttcgtttcggtgctgccagcgcccacggaaaagctaacatgatgcaattcgcccatttcatggaaagcggagctatcagcaaagatgaaaccacgggatactacaccgtagatttcgaaaagatgaaaaaagacatcgaagtgattgccggagaatatatcacgatcgaaggagacggagacatccaaaaagcgactaaattggttgcagaaaagggtatcgttcccccgaccttacagaaagacttagatcgtatcgcgggagctaacatcccgaaggatattttcttcaaacaaggaaccaaagttctagggttataatccggaatgatattatacaaaatacccaagttcaaaatcaacatgaacttgggtatttttattatttcaaatattcacgaaagaaagattctatcttgtcaaaaggaataacatttgcctgattatcgtacaaatccacgtggcttgcaccgggaataatcaaaagttccttgttgtcacctttcaattttttgaatgcatcttcactaaaatagcgagaatgagccttttcaccatgaatcataagcacggcattccgtatttcatcgctgtaagccaacaagggcatattaataaatgaaagtgacgatgtcttattccagccattattggaattaagtgaacgtttgtggtaaccacgcggcgttttgtagtaagcgtaataatccttcacgaactgcggggcatcatccggtaatggatcgaccactcccccggctagttcatacgtgccattcttggcatcaagtgtacgctgggcattgagttgccgacgaagctcataccgttggtcggcatccatcgcgtcaaaatacccgttggcattcacgcgactcatgtcatacatcgtggaagtaaccgtagctttaatacgcgtatccatcgcggcagcgttaagagccataccaccccacccgcaaatacctaaaattccaatacgttcaggatcaacatcatcgcgagtcgaaagaaaatcaacggcagcactgaagtcttccgtgttaatgtccggcgaggccacgtaccggggttggcctccactttcacccgtgtaagaaggatcgaaagcgatcgtcagaaaaccacgttccgccagcgtttgcgcgtaaagcccggacgattgttccttgacagccccgaaaggaccgctcaccgcaatggctgccaatttcccctccacattttgggggatatacatatccgcggcaagcgtgataccgtaccgattacggaatgtcactttctcgtgaactaccttgctgctctgtggaaataccttatcccattctttcactaattctaacttttccatattcttctcttttacttgatttgtacttgtttggccgcttacgattgttccggcaaggagcaacattcctgttactacaattgtctttatactcatactatttcaattttaaatgtcatacccattacttctaattttatgatgtaaaggtatgagattcaagccgtacaagttgtatacaaattaccgtaaagattaccacttttacggtttctattcaggaacgattaccctcaaacatattaatagttagaaatcaccttccgccaagaaacgcggcatatcacgaattccatcaagaaaacgagaaacgacatcaccacgatagctccccagattccaaaccacgacaaccgcatagccagcgtatgcgctcccccgacaagaaccagcataaacatcagtacaataacccgcaacatattccgcccggaatccatggaacttttctctttcgagaatggaaaaagcatcccagaaaaccatagataaatgtaactcaccaacgtactcacgaccagaataaacaacaagtccggaagaatcacccagtccagcatcgtaacaaaaatcccgcagagcaacacgtaaaccggaagataatatttcacgaacaaagccttgaaacacccgaggatcaaggcccccggacgctccaacggcttggaacgataaagccaaagtaaatcccccttatccgtaattgacatattcatctggattccgatactaatcatcgccatcatgtaaagaggcatataataagcaatgccgccagcttcctcctgtcgtccctgatataaaaagaaaacggccaagaacatcgtgtaaatcatcatgggcaaaacgccttgtctgaacttcaaattatcacgggtcatacgccatcccaagacaaacccggtcacctgcatcgggttccgaccaaacacccgtgctaaaccgtaaagccatccctcctttccccccttacgtttcttgctcacgggtgagtacgaattcaacacccccgcttttgccgcaaaataaggagcaagataagccaccgtgatataaccaagcacgacaacaagccctaccccgatcaacgccagcaacaaggcgggtcccgtcggttgctttaccatcaccgtcaaggacataaaataacaaggtggcgtaaaatacatccaagtccccggccgaaacatatccaattgaatattatgaattaactgcccgaccaactggtagctcaaagccaccccggcaatcaatactacctgaacataactcatcacccgctgaaacctctccacggaaataaagcgcatcaccccaagataaataacattagcaaaaagcaacgtgaaaatcgtgttcagaaacacggaaataatgaaaaaagccccggacatcacccctttccaaaaacagacaatcaccagtgggatcaccgacatacaaccggaaagaaaaaacatgtacaccagcatcgacacgagacgagcaaccagtatcgttttagaattcacgggcaaacgctgcaatatatgattatcgttcccgtcaaaaagaattcgggaatattccatcataaaactcatcatcaacatcagaaacaggtacgactggaataacaaaagcgacaccccgaaagctcccgacgctattcccgtcaagaaaaagatcggcccacagattccgagtaaaatcccctgcctcatcaacgcattcgatgcgtttttcttgttccgtccactccggtcaatccggttatccaccgtcagtttcaccgtcacgatggccagcatccggtcgaaatcaacgcccatacgggtaaacaccccttgaaagagccgcagaatttgtgccaccaccttaatcatgactccctgttttcaaaagcgtttacaatctgttccgctttctccgactgccccgtggctcctattaacttcgtgaacaatccctccaaagaactcgtttcggcctcctccatcaactcccgaaccgaaccgttagcgataatcgtaccttcattaatcaaaatcacccgactggctattttctccaccacatccatcaaatgtgagcaataaaagatcgttttcccctctttcgccaagcgagcaatgacctccttcacgataatcaccgcattagcatccaacccgttcaaaggttcatccatgaaaatcacttccgggttatgcagcaatcccgaaataatatgcaccttctgtttcatccccttcgagaaattcaccattctctcgtcccggttctccctcatctcgaacaacgagagcaactcgtcagccttccggttcacctccttctggtccagcccgtacatggctccaataaactccaaatactccatcggggtcaaatgctcgtacatcacggcattctccgggatatacccgatccgtttctttacctctatatcattttcccgaacatcataccccaacacgtccaccttcccttcaaaatcctccagtaacccgcacataatcttcacagtcgtggacttccccgccccgttactcccaaggtaaccgatcacctctcccggccggatctccatattgatacccttcaacacgtgtaaaacctctttccccttgggaaaactctttttcagaccggtcacccggatcacgcaatcatctgccatatactgacgttattaattattctctgaacacatcatgacaaagataaaggataatttaagaaatgagcatacaaggactcagaaagaattagaagaggtaatcgtggggaaataatctggtattaagtccgatttaatacacaagatgagaattaattcatgattacatccgtatcactaccgtgtaaaacgctattaaaaccctattaaaacgctatatataatagcgttttataagtgttttaaaagc

SEQ ID NO: 109 - DNA, 10930 bp, Butyricimonas faecihominis
atctataacaataactaggacgtgaaatcaatcagagaaatatttagaatcgggtacgggccttcttccagtcacacgatgggaccgggacgggcggcgtattatttcaaggaaaagaatccggatgccgagcgctaccgggtgaccttgtacgggagtctggcattgacgggagtgggacacggaacggatgttgccatccagaagatgatcaatcggccggacgacacggaaattatatgggagtccacgaaatccctgccccatcatccgaacgggatgttgttcgaggctttaagaaacggggaagtcgtggatcgttgggaggtatatagtgtgggaggtggcgccctgtgggatgaactgggaaccttcaaggaggaagatgtctatcccgacacgaaaatgacggatatactggactggtgcaaggccgaggggcgctctttcgtggagtacgtggaactgcacgagggaccggaaatcttcgactatctcgaagaggtttggaaagtgatggttacaagtattcataacggcttggaaaacgagggtgtgttacccggtaacctgcggttggcacgcaaggcttgttcctaccacgtgcgggcccagcaatcggcaggtaccctgcgccatatgggaatggtatttgctgccgctttggcagttgccgaagagaatgcggcaggaggtaagatcgtgacggctcccacgtgcgggtcggccggggtcgtaccttccgtgttgttctttttgaaacacgatcaggagattagtgataaacgaattataaaaggtttggccacggctggattgattggtaacatcgtgaagaccaacggttctatttccggtgccgaggtaggatgtcagggagaactgggaacggcttgcgcaatggcagccggtgcggcggcccagattttgggaggttccccgatgcagatcgagtacgctgcggaaatgggattcgagcataacttaggtttgacttgcgatcccgtgggcggttatgtgcaaattccctgcatcgagcgaaatgcctttatctcgcagaaagcgcgggagtgtgcaatctattctttgttctcggatggccggcacaaggtgtctttcgatgacgtggtggagaccatgatgcagacgggttgcgatatgcaggccaagtatcgcgagacaagcctcggaggtctggctcgtatatacagggctcccttgaaaaaatcgtagcgtcgaatccggtgttggtgagccggaatggtacattaattgtaacaactaagaatagaaaatcgtagacctaaagttatacaaggcttatggacaggattaagttaaaagttttcgggttatcctatcagagtatgtcacaaaccggggcgtacgcgctgattctggcggaagagaatgatgccttccgcatccccatcattatagggatcgcggaggctcaatccattgccatacagatggaacacctgcactcacagcgtcccttgacgcacgatttgatgaagagtctggcggatagtctgggtgtggttctggaagaggtttatatatatcgttgggaatccggtatcttttactcagaactgcgtttcaggaatggcgaggaactgctgaagattgattcgcgtacttccgatgccatcgccttggccttgcgctataattgtccgatttatattgcggccagcgtgattgccaagacagctatcccgatctccgatctggccacgggagaatttagcgggcaaaagcctgttgaaccggagaaatccgaaacaaccgagtataacttcacgatagaagaattaacccgtttactggatgaggccgtgaagaacgaggattacgagagtgcctctcgcttcagggatatgctgaaagctaggaaagaggaataatatataaaacatgaaaacaatggatcgcataaaacttgactactcgaaggtgttatcgtttgtaggggaagaagagatcgccgtgcaacgagaaaaagcaacaaaggctctaaagggcttggaagacggaacttgtaaagggagtgactttttgggttggctcgatctacccgtccacatcacggatgatgaattgaatcgtatttccgcttgtgccaacaagttaagggagcaaaccgatgttgttgtcatcgtgggcatcgggggatcttacttgggagccaaagcggtgatcgaggccatgtccggtagttttgatgcttattccggtacgaaagttgttttcgcgggaaataacgtgagcgaggactatctatacgagttacaggcgttcctcaaagataagaaattcggtatatgtgtgatttccaaatcgggaaccacgaccgaacctgccgtggctttccgtttactgaaggatcaactgatcgagcaagagggagttaccgtggcaagggagagaatcgtggccattaccgacgagaaaaagggagccttgcgaacgatgtcggaccgggaagggtacgagactttcgttattccggacaatgtcgggggacgctactccgtgctgacccccgtgggattgctccccgtggctattgccgggtttgacgtccgggctttagttaaaggtgccgtggatatgcgggcgtatggcaaggaaaatggggcagagctttccgccacatacgctgccgttcggaatgcgctctacgagaaggggtacgtgatcgagatcacggtgaacttcaacccgaaattgcattatgttgccgaatggtggaaacagctttacggggaaagcgagggaaaggagaataagggtatattccccgccagcgttgacttcacgacagatttgcactccatggggcaatacatacaggaaggacgtcgcaatttgttcgagacggttctttccattgataaaacgaaatacagcttgcaagtgccttgcgatgcccatgaccttgataaactgaattatctggccggtaagcgcgtcgatgaggtaaacaagatggccgaactgggaacccaactcgcccacgtggatggtggggtaccgaatatccgggtcattatcccggaactgacggagtactacttgggtcagctattctatttctacgaactggcttgtggtatctccggtggtatactcggggtgaatactttcgaccagccgggcgtggaggcctataagaacaatatgttcatgttgctgggtaagccggggtacgagagaaaataaaaagtgaactggcaatgccagttcactttttatttaaatagagattcctcccctcgttccttctttcggatggcaaaagtaaggtacgtgttattcaatatatcaatagtcagtaatttcccggaaagtacgccgggtttctccagtatgattttaattgcctcgttcgcttgaagggaaccgacaattcccggtaatgccccgatgacacccagcggttgcgagaaattctcgatctcgtcattgtactcgaaaagatcccggtaagtggggccgttctggtaattgaacacggacacttgcccgctgaactcgcaaatgctgccgtaaacgaacggttttcccagcttcacgcaagcgtcattaatcaggtaacgggcgtggagattatctgtcgcgtccatgacaatatcgtattcgggaatgatttccagtgcgttatccagtgataaccgggtaaaatatggtgtaatccgggtgaatggatttaattgttttaatttcgtggcggcgacggtgactttcggggttcccacgtgagtcgtgtcgtataatatttggcgttgcaggttggattctgaaacaacatcgtcgtccatgatgccgatatggccgattcctgctgccgtgaggtaatataatataggtgagcctaatcccccggctcctacgaccagtatgctcgtttctttaattttttcttgtccttgaattctaatgtcgtgtaggataatgtgtcgattataacgttcttgttcttgattggtcagtggcatcggtaatgaaaattctaatttgttctactcttgttacttgctttcgttaatgtgttgtttgacaaatcggttgacggtgcagatggatactttgtatttcttggctattttcttgtaaggtacgctgttatccatgagttcgataatcttctccttgttttgtatcaacacgttcaactgcggacaactgccatacgggcgccctagtttttttccctcggcctttcttaccgcgagagcctctcttgtccggatggatataagattacgttcgatttccgcgactaacccgaatgcgaatcccaggattttactgttcaggttattctcgaaagtgtacccttctttcgtgctatgaagaacaattttacgttgaatacaggtattgatgatattcatgatgtcaatcaatgtcctgctcaatcgcgaaacttccgtgacgataaggcaatcaccttcctgcaaagattctagaagatcacctagttttcggtcattactatgtacttttccactgacaacgtcatgataccacttgtcaatatcaagtccccggtgggctgcaaatttcttgatctcctcctgctggttttccaaatgttgtttgtttgtgctgactcgcaaatatgcaactaccataattaaaatgattttagagtattaaaaagacaaacgtaacaaaaggagaagaatatttattgtttttcaaaagttaaaagaagttagcaaacatataataataaggtttggcggctaccaaaccctattattattaactacatccaagcgtcccaatctttccacacgggttcatacccttgtgctttgatggcctcgaccatctcttgtggggtacggttatcgttgatggcaaattgttccagttccttgtggggaacgacgtacccgcccggctccgtgcttgatccggcactcatggacgtggctcctaggtgcatcacgtgatcccggaactcccggctttcccgcgtggacacggagatttcggcctgctggtcgagcaaacggtaggcgcatatcagttgcaccatctgcttgtcgttgatcgggtctttcggcatgaaggccccggcgtgtggccgcaggcggggaagagagatcgagtacttggagcgccagtaggtcctttccaggtatttcaagtgcagggccgtgaagaacgagtcggtgcgccagtcttccagaccgagcaatgccccgattcccattttctgaaccccggccgtgcataccctgtcgggagtttccaaacggtagcggtaatttgccttccgtcccttggggtggtacttgggatattgttgttcgttatacgtttcttggtacacgcatacgaagctcaacccggcctcgtgtaaccgggcgtagtcgtccgtgtcgagaggttgcacttcaagggcgatttgcgagaacttgtcccgtaccgcacggatcactttctcgtagtagtccaccgtggtcacggcaggcgcctcgcccgacacgagcagcaggtgcttgaatccccacccggtaatgacgtcggtttccgcctgtacctcttcgagagtaagcattttccggtgaatatcgttatcgtggttgaaaccgcagtacacgcagaaattcgtgcagtaattggaaacgtacaggggaatgtacaactggatcgtgttcccgaatctttccagagtcagacggttagcttccacggccatgtcctccagtaacggtgttgctgccggggagatcaatgccataaaatcatctaacgtgcgatgcgggttattgattgccgcgatagcatcgtttttcgacttatccatgatgttctgtttcacatcgtcccagtcgtaggttttcaaggtatcgtaaaatgaagtcatttacttgatgttttaatagtttgtaaggtttgtaaaccttatgaactcatttaatccaaaaatgccgttaacggggagctggcctgtgcgtggcggtattgtttggcaagttttgcctcgaatgccatgcgtccggcctccacggccagtttaaatgcccgtcccatttctaccgggttaggcgatacggcgatagcggtattcaccagcactgcggcagcacccatttccatggcagcggcggcgtgggagggagccccgattccggcatccacgattaccgggacgttactctgttcaatgatgatctccagcaggtcgcgggtcaccagccctttgttcgtgccgatcggtgcacctaacggcatcacggtggcggccccggcattttcaaggtgtttgcaaagtaccggatcggcttgaatgtagggtaacaccacgaatcccagctttgccaattcctcggtcgctttcagggtttcaatcgggtccggcaacaggtacttgggatcgggatgtatttccagttttagccagttcgtgccgagagcttctctcgccagttgtgcggcgaacacggcctctttggcggttctcacgccggaagtattgggtaacaaggtgatatgaggtgctttcagatgagccagaatatcatcatccttaccgtccatgttcacgcgtttcagcgcgacggttacgagttgtgattcggatgccaagatggcatcttccatcagttgattcgatgcgaatttaccggttccggtaaataagcgtgaggtaaattctttgtctgctatttttaaagccatactaattttagattttaaattttagattgaactcctccgtcagcttcgctgccacctcctctataaacagaggaggagctggtgactcttcccaaaaatgaagagtaactcaactctccctctgtttatagagggagtaccccgaaggggggagggagttcttttatattcaattgttctaccgtttctctcgtctttcccgttatatcctcgctatttttcagcaaggaggagagggcgatgcccgttactcccgtgcttaatatcggttgaatgtcatcctcccggatgcctccgatggcgtggacggggagatagatgccctcttcccggcaggcttccatgatctttcggtaaccttcgagaccgaggaccgggctgagacgctttttcgtcgaggtgtacgtgaacgggcccagaccgatatagtctacctgttgacgaaaacgggtcaccacgtcttcaaacgtgttgcacgttcccccgatgatcttcgagtaaccgagaatccggcgggcttcaaggggattcatgtcctcttttcccaagtgtaccccgtcggcatccagctcaagggcgatgtccacgttgtcattgacaaggaacaaggccccgtgacgtttgcaaatctctttcacggtgcgtccgacacggataaactcttcccggtcagcctctttcatccgtagttgcacccatcgacaccctcccttgcacacggcctccacctgttcgggaatagaaactccttccttgtagtcggtgatgtattgcaagggaatccggtacaagtcaacttccggggcggtgctttccacgcggttatgcatccctaggttcgtgtcgttagagcggataaatcccgccacgtagtgctgccccagccgacaagcgtcggggaggggatagccgagcgtgagatacgaggcgatggccgaggaaagaacgcatcccgtcccgtgtttcccgtgtcttgcccgtgtcaccgagaaggtgtacaccttgtctggggtgaccagtcggtcggaggccagcgccccgtcgttatgaccgcctttccagaggatgttgagtttcaggctgcgggccagcgcttgcaggctttccacgtccgggtgattcccgaaaagtgttttcagctcgtccgtgttcggggtaatcaggtatatctttcgaagtatatcctgcaactgagttagattctccccgtcatggaactggaatccggcgctggctttcagtatcgggtcccagataatccttaccttggggagagccgtccggagatagttcaccacttgttccagcgtgtcgaaactttcgatcaacccgatcttgacgtaagtggggctgaactcccggaacaggacttcgcattgccggatgatctcgtccggcgtgagccacttcgtcccgaggtacgtgttttgattctggaaggtgatggaactgctcgttccaagtccatatacccggcaactttcgaacgttttgatgtcagccgtcaccccggccccggaactttggtcaaatccggcaatacttagcacctcgtcgggcaagatgttggtgaaacgggcaacggcctccgacggctgttcccacacgtgtcccagcaaggcgaccccgcggaatcccattttccggcattccgcgactttttccgcggtgatacctcccaaagcgattacgggtacgcgtctcttttgtaagttttccttcaggtatttcggggcgaaggccgacgggtatccctgtttggaaatgctgtcaaataccgggctgagaaagacgtagttcggctcgaaaggcaaggcgtcgatttcctcgaaggagtgacacgacacgctcacgtgggcgagtcgatcccgtccggtgaacgtccgtgcctcgttgtatttcaggtgaatccctcttaacccgtactcttctgccagttcgaagtggtcgtgcaggacgacacgttcccggaaacgcggccggatgccccggatgtagcgttccagcgtgtcccggtctgctcccggctttcgcaggtgcagcaagtgcaatccgctttcaaagagcttgttcacgatatgctcttcgtcaggcagggtgcggggaggggtgatgattacgatcatgtgtatgtggtttgaactctatccttcttgttcatttatctttttcctcaacttctcgctggcacgcatggagcagaaatgttccccgcacatggagcagaaatgagcctctttgtgtccctcggcgggtaacgtctcgtcgtggaaacgcaaggctttttcagaatccagcgcgagatggaactggtctttccatcggaactcgaaacgggccttgctcatggcgtaatcccggtagtaagcggcggggtgtcccttggcaaggtcggcggcgtgggcggcgagtttgaaggtaatcacgccttctttcacgtcgtcccggttcggcagtccgaggtgttccttctgggtcacgtagcagagcatggatgtcccgaaccagccgatcatggcaccaccgatggcggaggtgatgtggtcgtagccgggggcgatgtccgtcacgagcggtccgagggtgtagaacggggcttcgtcacaccattcttgctctagccgcatattttcccggattttctgcatcggcacgtgtcccggtccctcgatgatcacttgcacgtcatgcttggaagccacccgggccagttctcccagcgttttcaactcggcaagctgtgcctcgtcgttcgagtcggcgatgcaaccgggacgcaacccgtcaccgatggataccccgacgtcgtatttggcaagaatctcgcagatgtcctcgaaatgctcgtacaagaaactttcttgtttgtgggtcgtacaccagtgtgccatgatggctcccccgcgggacacgattcccgtgaggcgtttcagcgtcagcggcacgtgatgccagcgtagcccggcatggatcgtgaagtagtccacgccttgctcggcttgctcgatgagcgtgtcgcggtaaatctcccacgtgaggtcttccaccttgccccgcaccttttccagtgcttggtacaatggcacggttcccacgggtacgggcgagttacggatgatccactcgcgtgtctcgtggatgtttttcccggttgacaggtccatgatcgtgtcggctccccagcggaaggcccacacggctttttccacttcctcggaaatagacgaggtgatgggggagttcccgatgttggcgttgatcttcacgaggaagttacgcccgatgatcatcggctcgctctccgggtggttgatattcgcggggatgatggcccgcccggcggccacttcctgacgcacgaattccggggtgatatattccgggaagttcgcgcccagcggctcgcctttctctttcttgtaggtctcccggatcttgtcgaccatctggttctcgcggatggcgatgtattccatttccggggtgatgattccctgacgggcgtagtacatctgcgacacgcggtgtcccggtttcgccactctcggcgtggtgttcacgtgttcgaagcgcaaggcatcgagcgagcgatcattttggcgtgcccggccgtactcggaactcagtccttccagtttcacggtgtcattccggtcggcaatccattgttcccggatcttgggcagtcccttgtgcaagtccaccgtgtagttcgggtccgtgtaaggtcccgatgtatcgtaaaccacgacaggctcattctcgatcttcgtcccgtccgtgtcaaccgtgggcgtgaggttaatccggcgcatcggcacctcgatgtcaaacatctcgcccttcacgtaaatcttttccgacccgggtagcgggccgcttgaaatggtaaattcttggctcatatcttatttaattgaaaattgacaattgacaattgaaaattacagtggacgtgcttgaaaacggggaatttcattttccattttcaattttccattttcaattgattcatcctccctgtactgccttgatgatgataattttgctaccatcttgaagcacggttttaccccagtcgggacggggaatgacgttgaaatccacggcgatggcaatgttgcccgtcgggatggcgttggcttccagtacttcggggagtgtcgtgccgggggcgcattcgaaggatttgtcgtttataaatacttgcattgtatataaa

SEQ ID NO: 110 - DNA, 10916 bp, Butyricimonas faecihominis
aaacaatactttcataattttttaattttaatccattaaaaatccccagcctgggttctgctcaatgtcattgtactgcaactcctcattcaaaggtatcggcatacagaaacgatagtcaccgtcctccagcgtataggttgcctcctcctcatctccatacgaattgcgggtccatccctcctgcgtacgaatcaaatcacaccagcgcatgtcatactcaaaacagaattcgcgtctccgctcgttcaggatttcctgcaagacatcattacccttatagccatcataatcgcagatacgacaccgttggaaatcctccaaccattttttcgcctgtgcatcccctttccgggcataactttcggccacaattagatgcatttctgcataagagaaaaatgtgtatacagtgaattgtagataactgccgataggatttacattcgcatacttcagaatattaccggattcgtcgaaaaaattttccttccgcacatctttctcatcatacatcttcaccagactctcggccgcagccatcttcacgtatggcagcattccacagatattttgcaaaacccgatcgctccggttgtcatataacaatccctgaggataatcctttttcacaccctccttttctgggaatacgggaaaatgcacatactctgaaagcgattgtaatttccgtccttccatcgccgcctgtgcatgccggatagcatgatcatagtccgtaatctcaccagcaccggaaccacctttgaacagatagatttcagccaacaaggcatttactatcttcttatcgtaaaatacattatacgtttcccgtggactcgtctcgcactccagcacctccgtcagttcgtcgatcaaaataccataaacttccttttggcttttgcgtcttgcatcataatcacctactagttgggcatccaaattgaccggaatccccagtttgtccgagtggtagggagagaaatattgtaagagtttgaataaatgccaagcacgcaacaccattgcctcacagcgtacgatatctgcctgctctcgagaagcatccacccgtcctaattcatccaatatggtgttgaaaaaaccgatgttcagatacagagtctgccagatgatacccggtgtttccgaattcttccagtccaacgtatttacgaaaagtgtcttgttattattcccataagacgactgtatgtatttgtccgtatccacatcatccgtcagcagatgcaggaaagtccaaaagtcattttcttgataaggaaccaccgttccctgcaaagttgtggaagtcgggtctgcatacattcttagatacccgcctaataaggctttcacatcgtcgtaattggcaaccgctagtacattagacggctccaccttcaaataatcagtacaggaacacaagcctgccattacagctatcaatactattatctttctcatacattctctcatttaaaggctgaaattcaaggttatcgtatattttcgggaattcggatagccgaactcacccatcagcaatggatcaattcctcggtagggcgtcaaggtaaataagtcttttgccgtaaagctcaaacgcgccgtactgaacctgagctttttaaggaaagcaggaggaatattataccctaaagtcatataaccacacttcaagtaatttcctttctccaaccgattgtcaaacatatagtaattatacgtctttgtggactgagacaaacgcggtacattcgtcacatctcctgcttggcgccagcggttgatatcattcacgtgacggttctgtccggtaagctcactaaaagtcgtaaacgacataattttatgtcctgctttgaactcgaaattcgcactgaaaacaaattgtttcacattaatcgaagttgaaaaaccacccacataaggagggaatttctgtccaagatacttaaccatcgaattaggcacctcaatattcaggcccatatccaacgtagcgtccccattgccggtgtacaccaacaccatacccgtcatcgggtttacacctgccatctggtagccaaaccaactccctgcagcatacccctccacgtaattattggaagtggcagccgttatccgctctggcaaatcctcaattttcttatagaaagtgtttttcacggtattcttattataggccagattcattttagcaaaccactggatattctttcgcttcaagagggtcacacccaaatccacctcgacaccgttgttatgtaggttggcaacattggtcgttgcctcaagccgaccagaagaggtagccaaacgctttttatccaatacgttccgggtaatattgtgatagtagtttacgctcaactctactcgatagtcccaaagtgatgcttccaaaccgatattcatatcttgctttttctgccatttgatgttcgggttcggtaattcgtaactcgtcggaacattctgtccgtcataattgatactttgacctaaggtatacaccaaaaacggaagggcatttttatctatacttccggtgtaaccaaaaccaccacgtaatgacaagagattcacccaaggtaaagactccataaatttctcccgatgcatattccaacgcaaggccacattccacagaggtgtaaactgattgcggtttccaataatatccgaaccgtcataacggatggcgcccgtcagaatatacctgtcttcataagaataggaagcattggcaaagaaagaagacatcttcatgcgttccttccctgtattccccaaacgaccaaaattaatattattgggattcacgcccgttaaatcaggaaaaccaataatgttatgtacttcgtcgtaaattggcgagtaattaaaggaactctgtgttgtacgatcagatatttcctgtccgaaaaacacgctaataaaatggcgatcttttatgtccttcgtatattgcagagtattcttgaacgtataggcattactgtaagcagtcgcctctctcaatgaaccttttactaaagcgaggtccaaatcctccccgtagctgatgtaatcataccagttgtttttgaaattcgtgtaggtattcgctccttccacaatccggttatggttcgaattgatgttataaacaccgtgagtggtaaacatcaatcccttgataatctcccactccatcttcaattgaagttcggcatcaatatacctgttcttattcgtattgttgtttaggtcgtgcaggatattgaaattctcccagtccaatccaggacgaatactactctgtttggcattataggtgatatcactggcatacgaaccgtcctcattgtaaggcctctcgtaaggattggcatacatagcgtagttcaggggcgaaatgatactggcggtcgcccggtcattttttagggtcgtcccgatgcttcctgtaatccgtaaggcttccactggtatgtgtgtgattttggaagacatcccgaacttgctgtacttgttgttcggttccgttcctacctcactttggaagttcagggaggtgtaatgttgtgttttttccgtaccgccggacatactgaaactgtattgttggtttactgccgtacggaagatttccttgaaccaatccgtattgatggtcgaaagccttgcgatttcactctccgcagcctctttcgaaatcacaccgtaacttgactgacgcaacaaatccattacccgccccggctgaaaaacccaggccgtttcatccgcaaaaatctcccgctcaaactgtatcttctgcgccgtattcatcatctcaatattgttccgcggccgctccttgataccgtagttcagcgaaaagttgaaacgggtcttccccaccagtccgctcttcgtctccaccacaatcacaccgtttgccgcccgcgcaccgtaaatagccgtcgcagcggcatccttcaaaaccgtgatagacttgatatcgtctggagcgatattcccgattccagacgtaaaaatggtagactgcaaatccgttgaacccaccttgatatttggaatctcaccctgcatcggcattccgtctacaatccagataggctccgtactcccgttgatggagttgattccacggatctgaatctgcgaatccgcacccggacgcccgctactcaccatattcaaacccgatatcgtactgctcaacacctcattgatattagtcagaccccgcccctcgatttcccgggcagtaacggtcttgctactacccgtcatacgctcgcgacgcaccgactggtagcccaccacaaccacctcgtccatctcactcacctcctcttgcaaagtgatcgtgataaacttatcaggatacgcggtcacctcttgcatacccataccgataaaacgaacctgcaacacgaatttctcacctgacaagttattcatttcgaactttccatccacatccgtagccactcccacagtcgtccctttgataaccaaggtagctcccacaatcggttccccgtttttgtcaaccactttaccgattagcttcactgcctgcttttgctccgctggccgatcatctataatatagattccattctccaaccgacaccgcagacgggtatccgccagcaactcatccagaattttcttcaaatcctgattttcaaacacagcgcccttacaacggatggcagaagcgacatccgtattatacaccaattgcgcatcgctttgtttgataatctgttgaaaggcttgatccaaagatcccggctctatccggatacttatccgttgagccatcgcctccgtatgcatcacacacgaaagcaacaaggtaatcaataatgataatcgcataagctttttctcgattttttgtggaactttccacaccaaatacgaactttttttcataattttaaagcgttaagtttataaaaaaggcttcaacacataaaatccggttccggggtcgtagctgtggatcggattttttgtatctcaccggttatttcctcgatataaaaacctgcctgccctcaatctcgaaacgcaagccggcaattccctcatacgttttcaacaacacctgtatattctggtaacggttcagccgtcccgacaaacgcacctgtttcaaatcctccgaagcgaacacacaatccaagtcgtaccaacgcgacaaggtttccataatctcgcccaagggctgtcccttaaacacaaacatcttgtttatccacgacatatataaagtagtatccacctgctccaccttcaacacaccctctgccgcttcatacgtcaaacggtcggcaggcttcaggcgaacctcctctccccccgttgtcgtaaacccgatgctcccgcgggtcaatacagcggacatcggcttattcccataatccgtgatgcagaagcgcgtaccgtacaccttgatatccccttccggcaaagccaccacaaactgcttcccgctgtccttcaccacgtcaaaaaacgcctcccccttcaagtacacccgccgttcatctccggcaaacgaagtcggaaaacgcaattccgaatccgaattcaaccacaccttcgtcccgtccgccagtacatattgaaactctcctccggcaggcacagacaaagtgtggtatgcctcaggatgttccttagccatccgctccgcaggaatcacccgctctcccctttgcctcgtggccgccttctccgtctcctcctgcttcaaatcgattcgttcaccgcttgccaaagtcaacaccgttcccactctttgtatcgacagcgaatcctccactaccgcaaccacctccggcaaagacctcccttcctctcccgtccacatccaaagtcccaccaccagcacaaccaccgcagcagcactccccaccgctgcaagcactatccgcctcaacgaacgtctcttcccgcctctacatctctccgcaaaagccgcagccatctgctccccatatccctcctgctccaactgcacaaactgccgtaccccacgcaaactccttacctcctccaaaaggtccttgttggcctgctcctcccccaaccaatcatccaactcccttttctcctcttccgtcaactcctgaccgagcatccgggcggaaatcaattgcgcaattctttctgttctttccattttaattaaattttgcctaatagacggcaagtgcatccaaaaaggatgacaccatctaaaaattttttttaatattcccgaaaatcttacctttcctcctctcttccccaccctcaaaacaacagcagtaataaaaaatcttcacgcgaaagcagggttgccaaccgtttcaaagccctgtacttgattgtctttaccgtattgacactcacatccaaagccgtagcaatatcggccagactcatctcatccagcgtcatctgcatcacctgccgactctgtggcgacaactgcatgatggcctccccaatcatccggatactctgcgcctctattatattgcgcaacaaaagcccaccatccgaaacatccgcaggcaccagctccttccgaccttttgggaaatagtctcgcttatccgcaatcgtattttttataatagaaaagaaataattgcgaggcgatttcacagaacctattttcgaacgatttatccacaatttcatgtaagactcctgcaatacatcatccaccgcctcctcatcctgcaaatacctgaaagcaaacacacggaacatcgaagcattttctcgaataaacgcctgcatacacttatcatcccatgtcgaaatatccatcggtatctccatagagcctcccataaataaaaatacgaatccgctgcaagttactactttttatgaaacaaactaaaattaacactaaacttttacacacaaagagaaactaaaacggggctgtctaacaataaaaaagttagacagccccgttctttaataggtaacaataaattctattctagttcgctttgaacatttcatctatatgtttagcagcccgacgaccgtcacccatagccaaaatcaccgttgctccacctctcacaatatctccccccgcaaagaactctgacaagttagactgcattgtttcgtcgttcaccacaattgtacccttacgtgaaatttccaatcctttcacggagttcggaacgatcgggttaggagaaactcccacggctacaaccaccacgtcggcatcaatcgtgtactcggaaccttccatcggtacagggctacgacgtccgctggcatccggttcgcccaaagccatcttctgcacccgtacctgtttcacacgtccccgttcgtcggcaatatattccaccggattagtcaacgtgataaactcacatccttcttccttagcatgttttacctcttccaaacgggcaggcatttcctcctcgctccgacgataaacgatcatggcacgttccgcacccaaacgttttgccgtacgcacggagtccattgccgtgttaccaccacccacgactaccacgttctttccgcgatataccggggtatcggaatcttcactatcggcacccatcagatttacccgggtcaagtactcgttggaagaaaggataccgttatagttttctccgggaatattcataaaccggggaagtccggcacccgaagccacgtagaaagccttaaagccttccgccttcaaatcctccacggaatccgtcatacccacgataaagttggtaacgaatttcacaccgatcttctttaagttctcgatctccacgtctaccacgctattcggcaaacggaattcaggaataccatatttcaatacaccgccgatttcatgcaacgcctcgaacacggtcacatcgtaacccaattttgccaagtcacccgcacacgataacccggaaggtccggaaccgataacggcaactttaattccattggcatgggccacttccggcacggtaatatgcccggattctctctcgaaatccgatgcaaaacgttccagataaccgatagcaaccgacggtttcttcaatttttgcaaataaaaacacttggattcacattgtttttcctgaggacaaacccgaccgcaaactgcgggtaaagcactcgtacgtttcagcacggcagcagcctgcaagaactcccctctctcgatgtttttcacgaatccgggaatatcaatacccacgggacaaccttccatacaagtcggggtcacgcaatccatacaacgggtagcctcccgcatagccatatcggccgtcagaccctgattcacctcaatacgctgactcttgatacgttcttccggtgcggtttcgggcatatggacacgctcaatagaagtacgttccttccctgccaccttctgacgcaattcctgacgccaaggttcgttccggtcactcacgccatgagtatgttcggattcctcttgttttacctcaacatcatgcaatttggccacctcggcatccttgaatccacctaaccgagacaaaatctcgtcaaaatcaatcaagtgtgcatcaaactccggtccgtcaacgcaagtgaagcgggtctttccccccacggtcacccggcaagctccacacattccggttccatcgaccatcagcgcattcaaactggccactgtcggaatatcatacttacgagtcagtttctcacagaatttcatcatgatcgccggcccgatggtcacggccaaatctactttctcacgtttgatcacctcttccataccttccgtgatcagacctttttttccatagcttccgtcatccgtcatgataatcacttcatccgaagaagcccgtatttcatcttccagaatcaccaaatccttattacgtccggcaattactgaaatgaccctgtttcctgcttccttgaaagctcgcacgatgggcagtaaaggagcaacaccaacaccaccaccgcaagccaacacggttcccaccttctcgatgtgagtcggttttccgagggggcccactaaatccgtgatataatcccctgcttccaaagcacacaatttccgggaagagactcccatcacttgtaccactaatgtaatacttcctctttccaaattagcatcagcaatggtcaacggcatccgctcgcccttctctcccacgcgtacaatcacgaaattacccggtttacgggcctttgctatcaatggtgcctcaacttccagctttacaactttttctgaaaaataagtcttacttaaaattttattcatagtctctaggttaatctattctacttatttcaaccccgctatcgttttcgatttcaagccgcaaagataacgaaccccttggaaaaaacaatttttatttcgattaatggcaagagaagttagaagtaagcatgaagtcagacacgccccaaatcacatcggcatatctcctagatagtaaagttagtcactaaacgactataaaacgaagggggaacgtctatcattcgcttatcgttccttatctcccgcttaactcgccccaaactgaacacacaaagtaaagtaatttcctacaatctgtcatatcggaaaactcacgccatttcgtgacaatctgagtaatattgctatttttgttcccgaaaacaaattatacagacatcatgggcaataaaaacaataaaaaagagcggattaacgtggtctattccacgaacccgaattaccaatacgaatacaaccaggaagaggaacaggaaacactggccccggaaaagcaaaacctgcgggtaactctcgattccaaacagcgcaaaggcaaaatcgtcaccctcgtacaaggtttcgtgggtacggaagagaatctgaaagaactggccaagctactgaaaaacaaatgtggcgtgggcggctccgtgaaagatggagaaattatcatccaaggggaagtaaaagaaaaagtgttgactattctccgggacaataagtaccgggcaaaatagattatagatcagacaatctagtctgatctataattattctatcagcgttttatattatcacgagaagaagtctttacttttgcaagactaaatttcacgggacaaaagtataacacactaacaggtcttccgggagcttgcattgccggtttatcaaatttaatcaagcgaataactcttaaagtctcttgatctaaatcaaatcgtacccctcgtaaaacccaatgatttttcgttattccattggtatctacaataaatgcaatgtaaacagtcccttcaagagaatcaagaactgccgaacgtggataactcaaattcgaggtgatcacttctcgtaatgaacctcggaaatgcacaggcatattctgtaaacaaagtaccaaatcatccgatccatcttttaacaaacgaaaatcaacaggtagtacgtacatacgacattttgacgggatgcccattttgtgtagctgtttttttgaagcttacaagctgacttacccgtaaagcttcacgaatgagatcgggatgttttccccatataacatgatgtccgtgcgtttttcctaaagtatctacatcaaatctaacatacacgatctcttcaatagaatccattcgtgcctgtaaaggataattcaagtgtgtttttacaaaatcattaatatccccgtcaaaaacggggtaagttcctactttatgaacggaagtactatcgtccaccccagcattaactcccccttgaagtacaaatccttgtttattcaccaagaaagtcaagaatataaatacaaaacatcttattatcatcttcttgaaattatatacatgaaatcagatatataaatcatgaattttcaaatacc

SEQ ID NO: 111 - DNA, 10874 bp, Butyricimonas faecihominis
taaatattgtatcttcattgtgaataattttagaatgaaacatttaacctcaacgaatatccccgctgcggaggaacggtacccgatcccatcgtcacttgttctggatcgcgtcctttcaaatccttactcttgataacaaaaggattgctcacgtcgaaacttagacttgctgccgtaatataaaatttacgcaaccattccggagcaatgtcatagcgaagacttaaagaacgacaacgaaggaaatcacccgatacgactcgtaagtcactcttattatacatatcccacctattattggcgatcggatatttcctatcataaggtccaaatgtcatggcatcatccgaaagagcgggaatgacagtatcatctcccggttcacgccagcgatcaacaaactcgctggacatattttgttgtgggaatggcaatgcctgacccgattcataataaagattgttcaaccgaatcttattccccaaagcaaaagaaaaatttgcattcattgtcaaacgtttaaatcgcacgttagtagagaaacctcccgacaatgtcggttcacgccgccccgcatacacgaatgccgcatcaaaagcttcctcttgagtcgtaataatggccactccatcctcatccttttccgattccccgtagaacgtgggcagcccctcatcattcaaccctttgaaacgataagcataaaaactgtttatagatcgcccgttacgcactaacgttccgttcacgtaatcactccaagtcacggacaactcttctcccgcattcttcactttattgtagttctttgccgtattaaatgaaatcccccaattccaatcttttccacgaatagggttcacgttcacactcaattcccatccgctattattcacatcaccgtcatttatcgccacataattggcacctgtcgatggcgccaacgttttttgaatcacctggtcctctcccactttcttgtatatttccaatgtaccggacaaccaagattggaagaaagaaaaatcaatacccaaattatacgatttggtcttttcccatttcaaatcattattaggcaacttatacaacgtagattcatattctttagatatattatccatggaccccatctgcacaatcaaattgggcgtttgatccgggtgtacattcccctgtataccataagacatacgaattgcaaactcgtccatccattccacaggcttcataaatacttctttgtgcaaattccacttggcagaagcagaccaaaccggtaaaaaacgaacgcttttatcttgcccgaatttgttagaaccatccgtccgaatattgaaattcgcaatataccgatcggcataggaataagtgaatgtaccataccaagatacgatattcgttaaattatccgtaattacatccggtgtcatgctcaccatctccgcatagcccttccaagtttccagatcaatgttcacaaactttttccctcgatccggaaggtatccccattgtgtcgatttcaaagcatcatatttcgaggaagatatctcacttcccaccatggctgcaagttggtgatgtccccaaaccttctgataagcaaaactattacgtatcgtgtaacgcatattccgggtatcctcttttactaattctcctcccataggaattttgctctttgttgccaactcgtcatctacaaccgtgggcagaggagttccataaggggtcccccgttgctgggaaatatagtaagacttctcgctcgcccaatacgtctggtaattgttattcgttgtcaaaccaataatagaactaaacttcaggctaggaagaatatcccaatccaacgaaatatcaaatctcaaagcctgattcttcaccgttgaaccactctctttcaattcgtttaaaatattgaaaggaagattttctgtaatcccgaatgcattgtcataatagaataactctccctcctcgtcatacacgggaattgcccttgacgtctgagcagcatattgataaacatcaatggagttatgcggtcgtttcgtgtctgtcaaagctccactcatattcattcctatttttaaattaggagtaaaacgggtattaaccttaatcaatgcattaaagcgatccaaatcctcctttttattcacaccttgatcattagcatacccgacagaaaaataataatcagtattatctgatgctccagatactgctatactatgttggtgactgacagatgcccggaacaataaatcataccaatccgtattcatttctttcaaatcttttaccttctgacgaaactcatcatacgacagctctttattccacaaatccatcaaagctccctcgtatcccatacttgtcggttgatacgtgtaaaactgtaatccttttttatgcatttcttctgataattccacccgctccgctgaattcatcagacgcatcacttcatatgaaggaggtgtcattaccgaaatacttccggcataattaatacgaggtttccccgttcttcctttcttcgtggttaccacaatcacaccattcgccgctttcacaccataaatagcagtagcacttgcatctttcaaaatatcaatccgttctatatcattcggatttaaactggaaatcgcatttccaattaaattcacccggtccatactatttaattcctccgtggaaagttgtaccggctcatccagcacaataccatctaccacccataccggctcccgatttcccgtgatagaagatgatcccctgatccggatttttggagctgcacccggtgttgaggtttggtttaaaacagccacccccgccaaacggccttgtaacatctggtcaacggaaatagcatttccaccaattaaatcttcaccctttatagaggcaacagaactggataatacccgtttatcaatcttctggtaaccggtcaccaccacctcgtccacttgttctaccgattccttcaaaacaactttcataaatgaagtatccgcttttatctcttttgtctccatcccgataaaagaaaataccaacatgattcccccttcagcagggacctccaatttaaaagcgccctctatatctgttaccgtacccattccggttcctttaatcaaaatactgactcccggtaatttaatgcccttttcgtctgtgactagtccccggacctcctttttctttgctttcgtatccgttactgttttcggacgagccacaatcaacacatatccttccgtcacctcaaagccgtaaggtaaatgttcaaatattctttccaatgcagtctccagagacaccttatccagttcgagattcaccctctgtcgaacatcgacctcccggctattgtacatgaaataaaaaccggtttgcgttttgatttcacgaaacacctctttcagtgtttggtccgaaaacttagcactcaccatcttttgtgccacactctctgccgaaagatgcaaagcaaatacaagcattaacaagcaagttaatttcataattctcatgaacttatttgcacatttttctcgtgcgaattcataccatttactcctttttttcataattttgttgtttacatttaagtcaattcctatttagccgataggattttttgtaaaggagtgttagccgcactcctttactttttataaatcgtaatcacgtcatttttcacctcaaagcgtactcctgaaagtttttctatcattttcaaaacgacatccaacgggcgatgacgctctgcagctcccgtaaaagtaatttcccgtaacaacggatcgtcataaacaaatgtcatatcataccaacgccccaattgttctgtaatttgccctaaggacatttcttcaaactcaaacacacctaatgtccaagcgatataaaaactcacatctactttctttacatcgataccatccgtcccggatacagcctgttctcccggagttaacattaaagaatccctacccgtggcaactcgcactcttccatccaccaaagtagtcaccacatttccctgtcccttataagccataacattaaatttcgtccctaataccgtaatcttggaatcctcacattctacccgaaaagggtgtttttcatctctcgcaacctcgaaataagcctcgcctttcaaatacacatttctagcattttctagcgaggaaacaggataagtcaattccgactcagaattcaaccaaaccttcgtcccatccgataaacacaaatagtattcccctccccggggcacccgtattgtattaaacactgtttcatttttcccctctcctgccaaataacgaatcccaccttcctcatcttgcattataaccaccccgttaatctctgccaatgataataccgaatcgttagatagaggcacaatgcgtccgtccgataattgtaacatagctttggcagaaccggaaggaatatcacgtaaagaattttcggttgtaaccgatccattttttatatacaagaataatgaaaacgacacaaataataaaagagaggccgcatacaaagaatactgtacaaaacgattctttttgcttatactagcacgctttatttttcgagccaactgattccaagcccgttgttcatccacggtatcataaaatgcaatctgtctagcttttctataccttttcaaataatcgcaaaaaatcccccgattttgttcattcactttcagccaaatttccaacttcgaagcttctgaagttgtcaattcatctttactatacaaaataactaattcgataattctcttttcatccatgaatacttactttataacctaaagcctaaagcaataaaaatgggtgaacgaaaaagcaaaaaaataacatctttttttatcgtaccacaactaaaacaatgatacctaaagaactacgcaattgtttcattgcccgagcaaggtgcgttttcacggtatttacagaaagatcaagttgcaccgcagcctctttatacctcatatccttcaagacaactgcttcaaacacttttcgacattgctccggcaatttctctatttccgcatacaacctctctcgttcttcctccatcccgttggaagtatatttatcttcaaggaaatcctcgtaattttcaatttcatcaaaatgatacttccttttacttttcaatatctttatacaattatgctgtacggaagaaaacaaataagcacgcaaagccccttgaaacactgtatttcctcgtcgttcccaaaatttcacgaagagatcttgtatcacatcttcagcttcttcataagaatctaaaaaattcaaggcaaatacacacaaaggcttataatataagtcgaataatccttgcaatccggattcatcaccccgattgatcttctccagtatttccttttcatcaggaataatcatgcataaatataatctaaacaaccgataggaaacaaatatagaaaaatagttttaccagacaaaaagaatagcaagattttcccccggtaaaacggctcacatgaaaaaatagttaactgttttttctcattcgttaagcaaaatggttttccttcaagtcaaaagattttcttttctctattatttcataaaaagagttcgagtagctgtttctttttcataggctttgtcaaaaaggcattacacccgactcccatagcgttcaccctatctgaatcgaaagcattggtcgtaaacacgataatcccaatttccgttacgacccgcatcaacagcctccacaccattctttgtccgtgtaaaatcataatccttaagcacatgaaggaacaatacataattactatcattgccttcagccaccaagatcttttttcctagtttttaattcaccggacctagcacacggaggcatagaaggcaagtccggagatgacagaactccgcacgcagatatctcgcaacggatgttgaccgcatgatgttacaatttcctaccatgaaataaaaactattcataatttcacgtttatagcatctgcgtcgctttatccacggtaacttcaaataccctagtaaggaatgggaatttctttttcatatattcatattcatcaccagaactgatatatcgagccgttcccgtgacaataaaacccgttccttgataatccttatagcctaaaacttctctactacctaatgccagttttattttgttgttcacattaacattcttttcagtcttcctaaaaccgtaggccgggatgagaaggcgtccgtcgtctgtaaccacgatataagaattccatgtattaacaatatgaggttcaacaccccatgacataacagttacaacaccttcatgttttaatacatcgaagaatttttcgggtaatcttttgttttcgttcatattcttttcaacttaattattttgtctggatatatttacttattctaatatgtacgtatcaaaaggctttttgttactttgcccatgtaaaatttaacttcgttgttcaagatgggattcctcctattctccccaagtcaacatcaatccggtatcttcactttctttggttcttcgtgctgaaaccgctcaaattcccgcaatactaataccatatcattaacgaattcatcactacatcccttttcaatcgcagtctgcaagtacgtctttaatgtcgctatcgcacacacgtcttttcccgtcaaaacaaatgccggaacatcctccgttaagcatttatgcagaacttgatgttgatctttcattttatttcaatttattatttactatatgcgaagatacgacatctttaagttgttatcgccatccgacaccataaaaacagtattttataaaacatcattattcttttccccgtaaaaaagtaataaaacataaagcatcatgaaacatataactacactcatcgcattagccctagtgctaggctctctagcccctcttgccgctcaaactaaaatgacggcaaaggaaaaacgtacacaaaccagacaagagcgtaaaatcgctcaacagaaagtaaaagaacaattgtaccaagacgccgttcgtgctttagaaaacaacacgttcgtactggaggccaatcgactgatctttaaacgaggtcgatcagcaaacgtcagttccatcaagaatttcatttccatggaaaacaaaaaagccaccgtacaagtgagttttgatacccctcgcccacttcaaaacggattgggaggttttaccgttgaaggcaacgtttcagacatccggatgaaaaaggataaaaaaggaagtatcatttatagctttctcgtccaaggtgtcagcatttccgcacaagtgagcctcacccttcaccggggttcaaataatgtttcggcaaatatctcgccttcattccattccaacacgctcaccatgatcggagaactattaacgcaagaaaaagcccgtgtctttgaaggatttaaacgctaactctttggagggaattaaggagtagaaaagtcataatacctgtaaatgaatttacgacacggggccaatagtggagtacctttcaaaagtcaggtgaaaacttttaaaaggtactttaactatccgcaaagactttttcacattggaagtatccaatcactttacttgttttacaaaaggcatactaccccattcttcatatctctgtgccaaatttcctcttaacatcacggcatatagcaaatatacctccaattttcctttaggggtaaaagaaaatgtatttgaagctggaattgcttttaaatgttcgaactccacgccagtacattttaattcttcaaacaacattttgcagatttcgacttttcccccggcattggcaaacctaattttaaaatcatcctttaaaatggttccatagcgcaagaacaccccggccagataagaatatctttgtttatctgtcttaaaaacatctttattcaattttgcaccagtaaacgaatctttttcagccttttccccttcaatcccaaaatattcattcaccttatatgccaattccttggaatacaaattcatgtgcccagacggctccacattacattttaaatccggatactcagtcttgaaaagagaatcaagtaccctcaccacaaacccctcgtgaggataatacgcatccacgaaaacatctttcggctcccgtattcgacgccccagatattcatcaagcgtacccaacaagaaaaaatctttatctaagtcaattttactaatttgtgtcgaatcagaaaacatccccgagacaaataacataacaaacaaaaatagtttcataacttcaaaattaatagtgaataatttatctatagatgcactcgtcatctaatttccataaatattcctatccttttagggtactaaaaaagccggactgaataccagtccgacttttctttcaaataacaacaattttaaatattataaaacgtggtgaaagcttttatcacgtaagcatgatccaataccccgcccgtttcccgaacggaatgcattgcccacatgggattaccgatatccactccacgcatttccatttgcgataataatatatttcccaaggttgaacctccggccatgtctgaatggtttacaaattcctgacaaggtacccccgccatcttgcagatcgttttaaacacggcggcagaatccccgtccgtgatgtatttctgattcgcattgatcttgatcacgggcccaccgtttattaccggatgatttgtgggatcatgtttctccacgtagttcgggtgaagagcatgggccatatccgcggaaatcatgaacgaattatgaattgctcgatacaaatcttccggtttacctcccaatccgaaaacgatacgttcaataattgttctcaaaattggagaaccggcaccctgtttcgttccacttcccacttcttcattatcaaaaatagcaagaatttttgtcttacgacatttctcggaagccacgaaagcttttaacccggcatgagccatggctaaatcatccagtttgccacttgaaatgaactcctcgttcgccccgaacaaacagcctttctcgtattcatatagagtcaggtcaaaatcaagtatgtcttcctgacttactcccatctcttccgcgataagtttaaccaaataattatctttttcgaaagtctcattaatcatggcaatcacgggaagcatatctttctgtttgctcaacgggtttccctgatcgttcacggcgcggttaaaatggatggcaatatgaggaataaccatcaacggtcgcttgaaattcacgaactgggtagcgggcttcaacgggttcaaactacgcaacataacccgtccggccatggacaatggtctatcgaaccacgtgtacataatgggtcctccatacacttccgtgttcaacttcaaatactttcctgcaacaggcatcgcagcattcggtttgattttaaacgtcggagaatcactatgggcacaaataatcttgaacccttcttcagcaatctctccgctaccaatctcgaaagcaaaaagtgaagagtgatttttcgtcacgaaatatttacctcctttttctatttgccatgcttcaccggagaaaagttgcttataaccattaccaagtaattcttttttggcatttgccacggcatgaaagtttgtcggactctcatgtataaactctactaattctttcgcgtattgtttttccattatatcttgtttttttatttcatttcttcgagccccaaggtaatcattttttactacactttttgccttgaaatctaaaaaagtcttgtttccttctttaatttcgtcgtaaacacgtttaccaaacataacaaagggagggcttatcatattctctttattataccgaacctcccctccagtctccgcattcaccacataaccaccagttgcttcgacaagcacttgtcctgccgctacatcccattccgagcatttcccgaatttgggacatatatccacctctcctttagcaaggaggcaatgttttgacgatgcccccaacgggacaagttcaacctcatggcccagagatttcaaataatcaacataccgtagttcccattccgttacatgaaaacgactgacggccactctcaactttgattgttttcccccgattcccgacaaagcttcttcctttccctttttcaccattcccttctccccgctcgcaaaagcccataaaatctcaccatcacacacgctattaatcatcccgaatatgggttttcccttttcgacaagagcaatattaatacaaaaacgcccattccgatatataaattcctttgtaccatccagtggatcaataatccaagcgtacgcccatttctctctttcttcataagccggtaatgatgcctcttcgctaatcaccggaatctccgggtataactttttcaaggcacttgtgatatactcactcgagattttatccgcttctgtcacgggtgtattatctctctttagctctacattaaagtttctcttattatacacctcttttatcaactctcccgctcgttcaataatacactgaatatctgttacttttatccaacttaccatattaattaattcatcttaaacgatttgttaaacttacaaataaaattcattttataggccatgcactaacaagaaattaacaaaaatacatctgcattcacacgacaaaaataccatcatcactatgaattaattagttacaatgaaatactgctataatcattcaaa

SEQ ID NO: 112 - DNA, 10821 bp, Butyricimonas faecihominis
tcattaaacgaactattaatgagatatgaaagaaattcaacaattagaaattttcattcgcacatactattccttcatgtgtgccacggcatttcactttattggctcacaagatcttgcacaagatatcacacaagaggttatcatcaaattctggcaaaacaaagaagacttggaaataagatttattgaaaatttcctttacacaatgattaaaaacgaagcattgaactatttgcgaggtgtggaacgggaaaacaaaagaatatcgaaactagaaatcgaaacaagtgaagattcccatgttctcaacctactaatcgcagaagaaaccaatcaactacttatccaagccattaaccagcttcccacacagagtgctaggatcatgcgtcttgtcctgtcaggatacgaaaacaaggaaatctctcaagtcatgggagtttccgtgaacacgataaagactcttaaatatgccgctattcgcaaattgagagaatatttcgattcccatccagaacttgttacaatcctttaggataaatgaaaagcgccgatcggcgcttttcatttatcctaaataagtttttaatagcttactcctagaagagtgtcgtagacgacgaatagccttttccttgatttggcgaacacgttcacgggttaacccgaacttctctccaatttcttccaatgtcatttcttggcaattgataccgaaaaacaaacgaataatatcacgttctctttcggtcaatgtagccaatgctctctctacttccgttgacaaggactcgttaattaacgtcttgtccgcaacaggagaatcatcgtttaccaacacatcgagcaagctgttgtcttccccctcaacgaaaggtgcatccacggaaatatgacggccggacactctcaaagtatcggcaactttttcagccggtaaatccaaagtctctgccaactcttccggtgacggacgacgctcatgctcttgttcgaaacgagaaaatgctttattgattttattcaaagatccaacttgattcaatggcaaacgtacaatacgcgattgttctgccaatgcttgcaggatagattggcgaatccaccatacggcataagaaataaatttgaatcccctcgtttcgtcaaacttctctgctgctttaatcaaacccaaattcccctcgttgataaggtccggaaggcttaatccctgattctggtattgttttgcaacagataccacgaaacgaaggtttgcccgagtcagtttctccaaagcccgttgatcccctttccggattcgctgggcaagctcaacttcctcttcaaccgtaatcaaatcctccttaccaatctcttgcaagtacttgtcaagagaagcactctctctgttcgttatagattttgttatctttagctgtctcatagtcttctaatattctcccccaaatatgtcgcaaaggtagaacaatttatccataaaccaatatgttaaaatcgacacctttccaatattaacgttttttaattctgtaaagataaagcgtagtactcgacacgtcctcgcggcgagatagttgtcacaagaacaccctcattttctgccgctttcagcgcccgtaccaaatcgtctttatcataaatcaccgtgttattaattttcacgataatgtatccttcatccagaccaatcgctttaaaagggccattctttatatctataattttcacacccccgttcaagcgatagcgataacggtcctcccgactcaacggctccaccgtggctcccagtattccggtataattcttatccaccaaggcaacatcaccatacgtgttctggagtaccacatccaaatcctttaattttcctccacggctcacagtcacggaaatagtcgctcccgggtgatatttagccaactgtccttggaactccggtcttgtctttatctcgataccatttatgcgtttgattacatctcctttctttattccggctttagctgccgccccgttaggtatcacctcatatacatatattccgctcacttcatccgttcccagctctttcgccacagcaggcgtcaactcgtctctccacatggatattcccatcatcgctctctgaaccgtaccaaactccttcaaatccccgacaattttacgggcaatattcgaaggtacggcaaacgagtaacccgagtaagagcctgtcggggattcaattgccgtattgatcccaatcaactcacccttggcattcaccaacgctcccccactattaccggggttcactgcggcatctgtctgcaagaatgactccagactcatctggctccggtttatccccaactctctcgctttggcactgataattcctgctgtaaccgttgaggttaaattatacgggttacccacggccaaaacccactctcccaactccacgtcatccgaattcgcgtactccagataaggaagtccgtttgcttctacttttaataaagcaatatccgtgctaggatctgtcccgattaccttggcctcgtattccgtcttgttatctaaggtcaccgtaatcttgtcgctcttgtcgatcacgtgattattcgtgataatatacccgtcctcagagacaattacacccgacccaatacccattttttgcggggtttcccgtgtacgcggggcataaccgtaaaaaaactccaatagtgggttacctatatattcccgtcccatttgtactgttttgacatgaacaacagccggaactgtctttttggcagcctccctcaaatccacgctacccgctcccccaacaggaagagccgtgttagacgcaagtgaaacaggacgaaccgccgctggagatgcaatttccaattgtgaaaccggtgcagcactttcccctcgaatggcatctatcgccacgaaagcaaggcaaccgccaacaacccccagtcctaaatttaaaaatgattttctcattgccatatctttatctcctttatagattaaacgtaaagtatccacattttgtttgtatattacaatattagcaatatccttgccaactgactattaagaaattcttaattaacataccttaactatgttttgagacgtgccaaaatcttttcattccaaatcctaaattctaaattttacattttgtatatttgtacctgcgatttcgataatttcaatttacatgataacacgtataaacaataaaaagagtggtaaaacacgtaccccctattcctttaattttctgaaggatccccggacacgtgtagttgttgggctgatttttatgctattttccatttacctgctggtgtccctcgtcggtttctttttcaccggtggcatggaccagagtctgatcgataaagagacccgggaattaatgaccaacccggatattgttgtcggaaacccgggacgcaaactaggagcgtttctttccgatttgctcataaaccggtggttcggagtttcgtcattcatattctgctacttgctatttatcatcgggctgcgtattgccggacgggatatcaagaaattcgggaaaaagatcatcatcagctttgttctaatcatctggtgttccttgttattgggatatattttcacgttcttacccacaggatacgtattcccgggcggggctcacggttatttcgtgtgtttttggcttaactcgtttatcggagagattggctcattcttcctgttgattgtttcgtttgctgccattcttttctttggtttcgaaaacgctttcaacaaatgcgtgaccatgatcaagaattacttcgctcgtcgggctcaactcaaggaagaaagggccttggcacgagaagccgctcttgcccggaaacgagaagaaatggcaaaaacagaagagccggaagacctgcaagaaaaagaagaggacattgataccgaagaaaaagagaaattggatatcgaaacggttccgcctgttgaagatgaacttttcccccgtcacgagtttgacacgaccgatccggatgaatcagaaaaacaggaattgcatgatccggaagaggaattcacgacagaacatcacttcgatttatccgtggacaagaaccccgaaaatcaagatgaacacagagaagatactctcccgctcaccaatgacgatatcgaattgaccgttatggcagacaagctggaagagcaattaaccaaaaacttgatgccggacacggagtacgacccgactctcgatttatcgaattatcaatatcccccgctggaattactggaagaacactcttccggttcacaaaaagtaacagcggaagaactcgaagagaataaaaacacgattatcgagacattgcgccattataaaatagagatcaccaaaatcaaagcgaccatcgggccgacagtcacgttatacgaaattgtccccgctcccggtataaaaatttcgaaaatcaagaatctcgaagatgacatcgcgttaagcctatcagccttgggcatacgtatcatcgccccgatccccggagccggaaccatcggtattgaagtgccaaaccagaatccggaagtcgtttccatgcggggaatcatcgcatccaagaaattccaagaatccaaatatgcccttccggtggcactgggacgaaccatctcgaatgaaccttacacgttcgatctggcaaaaatgccccacttgctggtagccggagccacgggacaaggtaaatccgtgggcttgaatgccattatcacatcgctcttgtacaaaaaacacccgtcacaattgaaattcgtgatggtagacccgaaaaaggtggagttaagcatctattccgtcatcgaaaaacatttcttggcgaagttaccggatgcagaggaagctatcattaccgataatgacaaagtagtagccacgctcaattctctctgcatcgagatggatagccgctacgatctgttgaaacaagctcacgtgagaaacatcaaagaatataacgagaagttcgtgaaacggcaactgaacccgaacaacggtcaccgttatctaccttatattgtagtagtggtggacgagtttgccgacttgatcatgactgcgggaaaagaagtagaacaaccgattgctcgtatcgcacagctggcccgtgccgtcgggattcacatgatcattgccacgcaacgaccttccacgaacatcatcaccggagtgatcaaggccaacttcccggcacgaatagccttcaaggtggcctccatgatcgactcccgcactattctggactcaccgggagccaaccagttgatcggccgcggggatatgttgatttccaaggatagcgagatggtacgtgtacaatgtgccttcgtcgataccccggaagtagatgccatcacgaaattcatcgcggatcaacagggttacccggaagcctacgcactccccgaatatgtttccgacacggaaaacggggtgagtggcgacatcgatctcggggtaaaagacccgttatttgaagaggccgcccgtttggtagtgaacacccaacagggttcaacctcctctatccagcgacgtttctccatcggctacaaccgggcaggaagaatcatcgaccaactggaagcggcaggcatcgtgggaccattcgagggtagtaaagcccgtcaagtacttatccccgacgagtacagcttggaacacattcttaaaaccgtggagttttaaaaatttaaaatggaaaatttaaaatttagaattaacaacgtcatgtttttagaaaagtcatacaaaggtaacaacaaatggtatttttacatcctcacgctcattatcgtgtttgccgcagtacaagtagcgtcaatcccgttagtaatttacagtatcatcatgaatcccgaaatactaagcggggggacgaataacattctggccgtcacgaacacgaatctgggcctagcactcatgctattcacgttcgccggaggcgtcatcgcacttctgttatgcgtgaaatatttccatcacaagaaaccgacggatatactcacgggccgaaatcgttttgacgtgaaacgggtgttcttcggggctgccatatggggaatattaaccatcgtcctactgggtgcgcaatacggattcggagacacgtctaacctcgtgttccaattccagccattcaatttcatcatgatgtgcatcgttatactgattttcattcccttccaagtggcattcgaggaatttattttccggggatatctgatgcaaggcagtatcctacttttcaaatacagatgggtagccctattacttaccggttttgccttcgggttacttcacgggtccaacccggaagtggatcgtttcggtttctgggtagctatgccgcaatatattctgatgggattactccttggactggtagccatctgggatgacgggttggaattggctttggggttacacttggccaacaacgtcatttcctcccttgtggtaacacatgacgcctccgccctgcaaacacacgcactgttcaaggatatggcaccaacggcttcgcacatggataccgtggtgatgctcgtctgcggggtcattttcctctgggtttgtaaccggaaatacaaatttttctctaagggcaacctgtggggaaaagtagaacgggaagtcgtcgagtaaaagaagttcttaaaattttcttaatactcgtgtcactttcatgacattgccaataaaatagtatctttggcagtaaacaaaaacgtgataacaattatattaatctataatcgaagtttcaaaaaaatgagaaaaattacatctttaatgttcgctctcatctttgggctgtctttcttggctaatgctcaggatgctaaaagcaatcaaccgaaaggttaccaattcactgatattaagagattacctgcaacttctgtaaaagatcaggctcgtgcaggtacctgctggtcatggtccggaatttcgttctttgaatcagaaatgatccgtatgggcaaagaaccaatcgatctttcagccatgtacatcgtgagacacgcttacagcgacaaagcaaccaaatttgttcgcctgcacggtagcatgaactttgctgtcggcggagctttctgtgacgtgatgcacgtgatcaaaaactacggtatcgttccgatggacgtttacaaaggattgaactacggtgaaccaaaccacgctttcggagaaatcgacgatgtgttggcaggttacgttaacgctgttatcaaaaactcaaacaaaaaattaagtactgcttggaaaaaaggctttgacggtattctagatgcttatctcggagaagaacccgaaaaattcgaatacaaaggtaaagaatataccccgagaactttcgctgacgaagttgttggtttgaacatggatgattatgtgagcttgacttcattcactcaccacccgttctattctcaatttgcaattgaagttccggacaactggttgtggggaatgtcttacaatttaccgatagatgaactggcacaagtcatgagcaacgctatcgacaacggttacacctttgcttgggcttctgacgtgagcgaaagaggtttccaaacctcacaacccggagttgccgtggttccgacaaccgacacgaaagaaatgagcggtgccgaaatcgctaaatgggaagctatgcctaaagggaaccaaactccggatgctttcagacaaggcccggctcctgaaaaagagattactcaagaaatgagacaacaagagttcgacaactacttaactaccgatgatcacggtatgcacgtaatcggtaaagcgaaagaccagaacggtacggtttactatatcgtgaaaaactcttggaatcaatataataaattcggtggatatttctacgcttctgaacctttcatgaaatacaaaacgatgaacatcatcgttcacaagaatgccatcccgaaggatattcgcaaaaaacttggaatcaaataaatccactctataaggagttagagaaaaactataaaaaaaggccgttgatccatccgattaacggcctttttttcataatttcgcgggagcgaaaaagaaatacataaaattataatcaatatgaatctagcgagagaaattaagaaagacatttactggattggagtcaatgacagaagaacccatatcttcgaaaattactggcctattcccaaaggtgttgcttataattcttacatcatcgtggatgaaaaagtggtagtcatcgacacgatcgaaagaagcaaaatggatgactacgtggagaatatcgaacagttattgaacgggcggaaagtggattatctcgtgattaatcacatggaacccgatcacaccggagccatcaaagctttattgtgccactacccggacgtgaaaatcatcggtaacgccaagactttccccatgctgaaaaacttctacggggtttgtgacaacttgatggaagtaaaagaaggtgattctctcgaccttggaaaacataaattgaatttctacatggccccgatgcttcactggccggaaacgatggttactttcgaatcaaccgaaggtatcctgttcagtggtgacatttttggagcattcggtacgcttgacggaggtatctttgacgacgagttagatctggattacttggaagaggaaatcagccgttactattccaatattgttggaaaatacggtcaaccggctcaaaccgcactgaaaaaactcggtggccttccgatcaaaatggtatgtgctacccacggaccgatccgtcgttcgcacattgccgacatcgtggctaaatatgacaagtggagcaagtacgacacggacaaaggtgtcgtgatcgtgttcagttccatgtacgggaacacggaaaaaatggctgatataatcgctcgtttcttggctgaaaaaggaatcaagaaaatccgtattcacgatgcatccaaaacacacccgtcatatatcatcaacgacatttttcgttataaaggagttatcctcggaagttgcgcttacaacggtaacgcattcccaaccatggaaaccctgttgttcgaactggaacacatgggcgtgaagaaccacgtggtggccttctttggcggaaaagcatgggctggcggagcaatgccccgtttcaaccaattcgctgaaaaaatcaaatgggaagtggttgctccttcttgcgaggcttgcggttgcccaaaagacgaagatttcgaaacgtgccgtaatatcgcctacgccatggcggataaactggatgaaatttgttgattttaaacgatatgaaaaataagagcgggtatgtttgaaatacccgctctcattttttctatataaagaagaacgaaggagcttacttgcctatgattacccaagagaaacccagagtgtaaagtttcccattgggtaaacatttccctccaaaaaattacttccgcatcatacggaaaggacaattctccatcaccgtgcgcatacgcaacgcctgctcataagtaatggtcgaacagaaagaatgttcatccatgatattgaatgaatcaaaataaatctcatgtccgtttttctgctccttattggtagcagtggcttcgtaagtccatttctcgggacgggaataaattctgaaataagtataggtatctgaacaaaaatcatccaacgcaccattatacttatccttccatgtaggataaagtccataaaattttccgataatggtctcgaaacgatctccagaaccgcctgccgcatccgggctgctggcattcgccatccggtagatatgcttcttgtttaaactgatacccacttccttgtaagtccagtacgaaatatcagacacatcttttaccttttgcaaatcttgatactgagccatctgcacaaacgacccgttatccaaaatataacgcggtaattgcacatcaatggtatactcgtttgcctctcctatccaaacattcaaatagcgcatcgggtcccacaccaaattactcttgatatacaaatccttgttctcaccatcgttcaacttcactcgatttacccctttttctttcaaggcctttccgtactggtctatatccgccaacacaaaggtcacattcagatccacggaggagggagcgtttttcaattcatttttcatcactctattcagcctgtccagaatttcctgtaacatatccgtaccaatactttcatactggtattcctcttgcgttgtataaacaacatggaagattattggtaccgtaataggttcgaagctcactttgggtttttcaataatccgaacttcgcgaacttccgactcgacaccgtaaacggcggctttgaatcgtagcgtctcccccatatgctctgtcgttgtgaacacctcgctgacaggcgtaccatcttctaagtagattttaatctcattctgcgggatgcggtctgcagtgatttcaatcgtgtccgtaaagacggagtctttgagtatcacctcctcgtcctcgtttttcacctcaatagtacgggtgtcctctacccccatataagccttcaccttgaaggtcaattctgcctttccgtcagcaatcagcacaggactgttgggtgacaaactgacccttgctacctgtgaaacatcaggatacgttctgaacgactcatactccgccttttcacaggaaaataccagaacgcttatcaatatcatcagaaac

SEQ ID NO: 113 - DNA, 10744 bp, Butyricimonas faecihominis
ggcggaaagttcgttcgggtgggacgggacgttcgtgctgttgcttatcgcttgtgccttgtcgatcgttttcgtcggctttacttacaaggaggaacaataccttgtgcaaaatagaaaataatgaataccaaataattcaaatttaataaattatggttaataaatcatggagaattgcaatggcatgtagcatagccttggctttcatgtcatgcgaaaatcagaaatttaacgacacgtttgttgactctgagcgtgtacatgtagacaccctatcaacagaattacaaaaagtacgggattacgttccccagtatgcagtagtagctcaccgtggttccacgtactggactccggaagaaaccgaagctgcttatcgttgggctcgtgaaatgggagccgattatctggaggcagacttacaggtttctaaggacggtgttattctagccttgcatgacacggacttaaaacgtaccacaaatattgaagatgtttttggtgaaagattcccggaaaaaacaagaagggaatattatgaccttttaggttacagcgcacaaaaaatcgattcattgattgacgtggataaaaaagcattcgttcccaactatccctgctcttatacttactacgaattgatgcttttggatgcaggaacttggttcaatcaagatgctgttagtcaagaacaagcccgtaaaggattttctgagaatcatcaatacatctctacccttcaggacttgatcatgtattccaaaggattcaaattggaaaggtatgctcaagatgccccactacccacaggtcatgtaaatatctggggagatgctctcgaaaatgaaagagtcgtaaaaaagatggttgcaacgaatgaagaattcagtaatccggtaaacttcggtgtaaaagataaagttgttcgttatgaattcggctatgttaaagatgatctcggtacgagtggaaacatccccggaatttatatcgaattcaaagagccgtggttaaatccatctaactttgaacaaatggtatacaacgagttaaaaatggaaaatgtaaccggattcgctgaaaagcttaacatgaacattatcgccggaggtgaagaatctgaaagcaatcctttctacaaagacggtaaaattaacgttggtaacacgaatggaaaagttattcttcaaactttctcgttacaaagtttaactcgcgtatgcgacctatttgatggtcaagttccgatgtgtttcttgttatggaaaggaaccggagcaacagacttaacttacgatgatcctcaaggatatgcctctttcatcaacttggcagtaaaatacaaagcacatttcattggaccctgtattgccggagccccgaacaactatcctgaattaaattatccgtggcaacacaacttgatccaccgtgcaaaaatgaagaatcacccgtattcattcgatacttatgaccaaatggctaaatatttcggccaatacaactggggaagtgatggtggttcccgttacgaggctccttacttggatgcattcttcacgaaccacacggatatgagtcttcaatacatggttgactttggttacagaaaatctcccgcaccaacggaaattccggatgcacgtgaggtactggataatttaggttacgaaaaataatttttaatcgattattgtaatgaaaaaatacatattattacctgccatgatggtagccgcgatgttatctaccactgcagtgaaagcccaagaagatgtaaatcctttattgaaatatgtcaataaagaaaacaatcttaaagcaagcatcggtggtcgtatgtttgcagacgtagcttattatcacacggaatggaccccgatgaaatccggtgctgccatcacggacgctcgtattcacgcctctttaacttacggaaaattgtttatctacgcggacttcggcttcggtaacggtgaattcagccaaaaaaacctattcgcacaatataccttcaaagaaagtttaaaaggaatccatttggtaaaagccggttattataacgagccgtcaagcatgagcatgatgaccagctcatataactatcactttatcagccgcccgtcagtttcccaagcattggatccgggacggtcactgggagccacttacaaattcttcaacagacatttctttgccgatcaaggtattttctctcaattgaaatacaacgagcaagaagaaggttatcaaggatttagcttaagtggacgttggttatggaaacctatcaacgataacaacatcaccttacaattcggtacaggattacgttaccaaagaattaacggtggagaggtttaccaagatggtgtttataaaacgaacatgcacgtggcagccaacatgcaaacttacgtggatgaaactactaaatttttaagttgtgaccttccttgggcaaaagatgccttcacgatcagtcctgaattcttattcaagagcgaccgtgtatttgctcgcggagaattcatctggaaaaaagtatggaaagaccgtgatgatcaaaccttgtttgaaagtcaattaggtggccaacaaagttggacgaatgttgaaggatggagaagtggaaacaaattgcgtcccacgatcatgaacggtggttacgtggaattcggttacctgctttgcggtaaagcttatacctacgatgacgaatacggtttattaaaaggcatgggtgacaaaggcggtttggaactcgtagctcgctactcttgcacgaacttaacagatattactgacggggacattttcttgattggtaatcacaagttctacccgaacggaaaagttgtagactatccctattcttctagtattgacgggggtaccatgcactcggtaacacttggattgaattattctttcaatcaatacattaaaatcatgggagaatatcaatatgctaacttgagtaacgtatatttcccagatgacgagaattttcatcaactgcaattacgagtaatgtttgcattctaattgtcaggaaaattttagaaaaagaaatcacaccagaagagcgtgtccgcatggcacgctcttttattttaaacccggaacaaaataaaggggaagtaacggggaaataggtcattccaaatatctcacaaatattctatctaaacagcaaagccagttgctaaacgggtttaaaacgtgggggacacgtcaattcctcttacttgataacttaactcccccttaactctcacttaattcaaaatataatcaacaaaagtaagggtacaaaaggaaatatcaagccgataaaagtatgacaattcaagtcatctcacgccaatatttttctttagaacgggtaaccgatcgccaagtgaaaccttaaaccatccttgaacttggggatattataatatcccgacttatccggattcttgtaaggagtatgcaaagcaattcccagatcaccccggagtacgataaaaccaaagtcataacgtaggccgaaacctgttcccaaagcaatctcttttaacaaacctgccaacttaaactccccgcccggacgtttcgggtcattccgcaacaaccacacgttaccggcatccaaaaagatagccccattcagttgatacatgattttgaaacgaagttccacgttcccttccaatttaatatctcccgtctgatccagataagccgttttgttatcactttcctgatgatagctaccggggccaattgaccggatcgtgaacgcccggatactatttgctcccccgatataaaattgctcgctatacggcatcacccgggaattcccgtaagcacaaccgatgccccccataaagcgggttgccagtagagaggtttccgttatcttacggtacacgattacttcagaggttaatttcaagaattgcgagtagatattaccgaacaacttcttgttttgcccctgatgatttcccgtgatatattgtacggcggaaagaatgtttcctgccgacataatcgtattctgccagtacaatcgattgggattccgtcttgttgccgccctgtcataagtgtacgaataggacatggaaggaatcaactgattcttgaaactcatcgctatcgccgggttattctccatcgtttcatcaaattctttcgaagtctgcaacaaatgggtgtacgtgatcttcaaaggtgttatcgtgtggaacactcgccacgagctttgaaaatcataactgagagatcccgtgaaagaaagcatccggaaaaaagtatggcgattcaaaaaatctactccaatctggaaattcgtacgttcggcaaactccttgctacttttcaggaagttaggtaccagcaagcgaggcaatgacaaaccgacgttcacacctaactcgtaagaattgattaacccggaatttgaatttgtctttttatccccgatttcccattcgtaagccccattcaacttaaaggtcaggttctccccgccccggaataaattcttattcgttattcccaacgacaaaccgggcccgagcaaattattggatttagaggaaacatctacttctatttccgtctctatcggtaagtcgtacacggcattaatactaaagtccaaacttccgaaaccggactttttcacgctatccgcccgggtcacgttcaggttggtatatttaaaaatcccaagccgggccagactcgtctgcgttcgattttgtcgccagaacgaataagtgtctccgggaagtaaatgcatggaacgagcgaggaccttgggcttcacgtccaacggtttcgtgtatttcacctctatccccttataagacaaggtatcttgtgtctctgactgatcggaattttccagaacaagttccacgtttcccaccttgtacggttgcaaggctaccgccgggacaccatgtttcaaagcaatacgaacatccgctacccgcctttcgcgtgtcgtgtcaaccaaaaattcgatataatccgattgaaaataataatacccgctattccggaacattttagttatccgggttcgctcatcttccatcgtgtacaaattatactccgccccggattttaacaagcactcccgttgcgttctctgtatcagactatccattctccccgtccagccccaaaattcaacagttcccagcaagtaagcttccggcacataaacattataactgattttcgctttcttgggattccgtttgttcggaataatctcgtaactggatttcaccccgaaataaccgtattcgctggcagcattctccaccactttcaagcgtagttccggctgtacatcagagattaacacgggtttcttggccaattttttgtataaccaatgctttaatcccttctctttcttcacattccagttatacacccacaacccaaccggaaacggggaacgtatgtaaggagcatacaacgggttattaggcgggaaacctaacggaccggaaatagccgaacttttcgggccctccaactttacccctttggcggtctctatattcatcttcttcaccccggtgtataacacctcaccttcggtcaacctcttcgtctgagaacaagagctacccaatatcatgaatactataataacaaataaactatttcccagacttttcattttctatcggttctattttggattctacttgtactttctttttacggcggaatatatccatgaatttttggaaattctttcttaataccacaccgataccggtttgcgtcacttcaccctccaagacactctcgtagcccgtgtgccggaagatctttagaaaaaagttcggattctttccaaacacgtactcgatggcaatgtcatccacaagattctcctctactcccccggccgcagggtcattatccgtggagattcgccccccgactttcacccgcaccttattattaaacagtcgtttcgaaaattgataagaataatccgttttcttggattctcctgcctctgacacttgattataggtattaataccaaacgtcaaatccatattcttcaaatgtttccgagaccattgattcaattcattttccacgaaattattcagggcattatcagaagcattggactttgccaccgtccccggcccggaataagttccgtaaatcatcatgttcatcgcctcctttgaacgctcctcggctgtcatcgctgccaattggttctgtatcgttatatccccttccgctgcaagatcaaacgtgatgtccagtttctccaacgtgtttgaaatcttgatcatggcattgaacgtcactaggcgggatttctggctatcatccgtcacgctagccgaaattgtctccgctgccgttatattcagggtcggattagccagatccccagtccattccacgaaactaccgtcttgtatcttgaaatccttctgcccgatcaccggcagaccgtaagaaacgattccactcgtcagaacgtatcttcccacgaggcgggtctctcccaccggattcaatgtataagtcagatttcccccgccatttattgctacccggttctgcccattcgacgacagcaacacattcaacccaactaacggtgcgatattcacggacatgagcaaatccagattcacggaactaatctgctgcaactcatcggccgcagccaattgagtcgtgtcgctgaacgaaacgaaacgcacgacatccgcactccggtccgtcaattccaaaggcgaagatttcaacgtgtaatagacttcactattatccaacaagttaatatttcccctgacctttaaattatccaacattcctttcaatgttgccgagagatcaacaaacactttcccgtaaaccatggtctccgtattttctttcaccttcatggcctgaaaattcttcgcttgaacagaggcatccatttttatggccgagaaggatgcgaaatcaaccgttcccaatagttctaatcgctgtttattaggagcaatcaacccgaaatgattaaaatccaaaagattatcatgaatcacgatagccgaagaatctattttaaaggtcgtcccgatcatcaaagcttctatggttccgtccttgaaacgcaaatctccatttatcaatggttgatccatttgtcccttcacttgaaaaaccccgatcatgtctccatccaatttcattatacccggaggagtaaaggctcccgcaacccgcaaagggaatttagggatgtctatatccaatgcaatatttttatcttcaacccctgtcattaatctacctttggtcaaaagcgcctttaccccatccaccgacaaggaaaaatccacgtcatgctctgtctgttgcgacaatcgatattcaatacctaatcccaaatctcccacacgctctttcccgtaataaaattcgtccacattaaccgtcccattaacatcaatcacgttatttttgctatacatctgcacatcaatccctaacaaaccggatatatccgggataaatgacagcgctttagacaaaccgcccaaatcaacacctttaatatctacaatcaaggaggccggtttgtgatctgcatcttcttccgaaatcaaacgaatccgcttgtctccattcagcaattgcaagttagctgccggaatttccccttgtttcaaacgaataaaattgccccggtttatttgccatgaaacatatcccaagataagaggatcgggagaaatactcacgctaaaagcactatcctgcaaagcaatattagccccgatattgaatatttccccttcctcgttcgcgtgttcacgtattctcacgtttatctgatcatactccacgtttccttccacggtcagctgggccaatccttccaattgatctttagctccgaaaacatccacgccataacgtaaagccacgtccttctgttttgcatacatcaacacactatccagaacgattccctcgatattcaatccataaaccttcgaacttaacccgaaatcatgggaaacatctgttcctaaatctatagccattcgttcaaaacgaattccgttacttttcaggtaaccattcaataaattttcttgcttggcatctatggttaaccggaaatcaggtaacagttcgttcaatctcaccatgttaaaatcatgtttctcaatctgctcaaccaacaatccgctagctgcactaaaacgatcgactaacgtgtagcctccaccatccccttcaaacttcatggtcaagtctcccgccttgacatccaacaacgtcttgtttcgcagaccggagaaagtaatatccagatttcccaacttacgggtagcaagatcctgcaaaacaatattcgaaaaatcagcccgtaaagacgatgtactgtccgccttcaattctgcatcaacattcagtcccaaggaaaaagccatattttccgacataaaatgtaatcctttcagatctacatttttaatatctccattcaaatttatcttgtacgcgttctcatctgcccgtaaccggaatttcattcccaaattcaattcctgattatcactccatagttccccggttaactcccgatccttcaatgccgcatccaaaacaacatttttataatcgtatccattataatataaggaggctaattcaaaatccactttcgccatcgcctctttccaatcaaggccccggcccgatgccaaaagattagccgtgatcacccccaacgaatcattcggcatgaatttatccaaagcgaaatctttcaaatgaacttctgcacgataggtattttctttccagccatagcccgcaacagcacgtaatattcctcgtccgggattcaactccatatccacttttaccgcctgatccgctatattaacacccgtcactaatgacagatgatccggaataaccaatccggcctccccatcctctgacaacaaaggtgcgaaatactctccccgatcaacgccaaacgctatatccaattttcccgcaaccttttccatatctgtcacgaatgtcacattcccctcactcttcaaagaaaaacctcctgttgcaccaacatcaaaatgagcaatattcaactgatcgaccttaccctttatcaatccagacaaagaaaaaactttatccgataaccagttatttaactgatcattggagtccggcataaataatagcacatcccgcccggcaatatttccatcaatcgataactgaaaaggagtttccataccgaaatcacttatcccggattccgcccgaacattcattttcaattgactattactcgtttttaaaatcagattcgacacgttagtctgttcactttccaaactgacccgacaagacaaatctcgcaaatctaatccatttccttccttgaaacgtaaattttgaacaattgccgccacctctgttcctttattgaacacgctatccactttcaacgaaagcgctgatatacgaattgtttccgggaactgctccgcatcaacaggaacactcatcggtttcattaaaaaacgattatcctccaactcgaccgtctccacccgaacttgccaaggcatactttcttccgtcgccacccctgctccactttgctccccggtagattctgccatcagtagatcgcaaaaaccacgaagcaacatgattttctctagctcaacagtttgtttttccagccccacatccattccattcagtcgagcctctcccaccccagcatggaattcccccataggcagcccctgcaactgataatcaatgctatcgattgttacctctccaaccttaaaacgccagcgaaccggctcactccccccggttgtatcaaccgcagactccccaccgcctaaattcatccggatttttcctccttttaaagcaacgaaagggatctctgcctcctgttgggacagattcaaccgatccacccgaagattcagttccttcaaaacgacattcattttcaatccggaaagagaatccccgaaattaaccgctgcattctccacgactaaacgacgtacttcaacttccttctttaaaagttttgtcaatgcaacattcacctgaatcacatcggcatacagcatcgtgtctttttccgtctgtcccagataaatcttttcaacggccaagtcgagtggaaatttcaacaaaatccgcccaaccgacagtttcatgtccaaattattattcacgtactgctccgccttccctttcacaaaattctggatggctggaacatacaaaagaatcatgataagaattaccaaagaaaaaagaaccaagataattctcaatatatatttaaaaagctttcgcaaaaatctcattttcctttcttcatcaaagattaatcaactacaaaactacaattatttctccaattcgaccactagggacaaggcttttacctcacatttcccaataatacttttcctcaacccacaaaccgaatgcttaatttaacgaacaactaaaccatagagttacggagtagtacaaatttatatgcagaatatcattccctaaaacactatccgacaacatcttattcataaccattcgaaatagtgtttttttcttcatttttttttcgtaatcttgcattttggtaggcggaatctaacattgaatagaacctatc

SEQ ID NO: 114 - DNA, 10743 bp, Butyricimonas faecihominis
attattgaatatcaatttgataacttcactgtaaatttccatttccccattctcgacatatcaaatttcacatccgccaagatgttttcacaaaaaagagatgaacggattcttctacctcaaaaatcgtatatttcatctactcccatatcgtttcattttacattaatacccattcactttcacatttcataacataattgttatcaaacattaacccctttcggataagtatcgtgcttttcatcggttatccgactgtattccatgacgcttacacccatgtctcacttgtaactcttcgataagttaccgataagtcttcgataagttaccgaaatgcggcgttcattttaccctgactttacccagacatacaatcaagataccgacgaatcaccgacgggagtcatcacaaacaccacatgaaaagagcctccgccacaatctcgaccagattataatcatcagcctcgctcttaccttctccagacatctcgtgataacaattccaaatctgttctttttcgatcgaatttaatattagaaaagtactattataaagcgaattattcttcagaaagcgggtccaaatgcaacgggtggcgaaccacaaaacgggccccctctttataatccccatccacccaaatgtctccgcccatcatcgtgatcgtcaacttacatatggccaatcccaaaccggtaccctgcacgtattcatccagtttctcgaaacgttcgaacaccttcttctgtttatcctccggaattccccgtcccgtatcggtcacgctaaaataaacacaatcctgctcttcattaatctcgattcccagcgtgatactcccctgttccgtgaacttattggcattcgacaacaaattaatcaatatctgttgcaaacgttgcacgtccgtctccagtataaattcttcacagggtgtttggaacacgtactccaccacatcccgtttcccgtaactagttgtcgccaacacgctctggcacaaagaaacgatctcaacctcctcgtaagacaacttcaatcgtcccgtctccaagcgggatatatccaaaatatcattgattaagcgaagtaataaatctgaatttttttggatgatagccacgtactcatgacggctttccgcgtcacaatcatccgaagtcagaaccccggaaaatcccacgatagcattcaacggggtacgaatctcgtgactcatgttagccaaaaatgcagacttcaaccgatcagactcctctgccttttcctttgccttccgtaactctagctccgcctgcttttgcttggtcatatcctccatacgcaccacgacacccaacaaattattatcatcatcaaaaacaggattcgccaacatatacacgtaataattcccatgtttcacaacaacatcagccacttttcccgttttcatggccattaccgccggacagaaagaacaaggttcatccagtcctctcaaaactttataacaaacttggcccttggaacttttaattttttccggatcgacatcataatcaatcccgttatgccattttatcgtgaaatccggattaataaacttgatcccggaattaacattattcagtattaagatattatctttttgggcctgccacaaggcatctctaaaacgtttggttctaaaatagaaatataaggctaggaaaaaaccgaacaataaaactaaaaaagccaaaaacacccctataatctggtatttatattcctcgaaataggacaacttcttgttgtaaagaacagcattcttgacctccgctttattcaagaatccctctgaacataacttggcataatcaaaacaatactcgttcggaatgatctgcatacccgccagcacggtcgaatcatgttgcctctctaacgccaaagcttgtttggccatatcttttccgacagtccggtacttcggtacacatcccccgacagcccaatgccccatcccgatagaagtaatcgtgaaagccggaattttaggattcgccatcatcatcgaatacgtggcattccgcataaaataaccatcatttttatctactcgccacgtccccaacaagataaccgttttctccggtaaccgggcaatagcatcactgatcgaataaatcgtatgtttccggccatccaaaagaatcaaatccagctccgggaatttctccttcatcttcttcttcaccaaagcctgcagagagactcccccgtaactattatccgtgataaaagcgatatgcttagttcccgaataaaaatccaaaattaaccgaagattcgctatcacgtcatactcgtaagcaaacccgaaaacctccaattcccgaatgttgtcactcatcacgtccacgctctccgcctcccagttctccaaatcggtaccctcctccggtaacaagacagcattccgactcaccatccctcccatgatcgggacatcccgagtaaccagtgaatcctgagaccaataagccgtccatgcctcctgccctaatagaataatgagtttcggtaaacccttttcgatatttttatccaatatttctttcatccgcccctcccacatacaagcctcggaaaaacttttacaattcatattctctatgtcaatcgaaaattttccgccaagtaggccatactcttctataaaatccgatatattcctagcagtttgggaagtttccgggttgtaggaactgataattaatatccgagaatcgggctcaccggttcctccttttgttgtccaagagacgaacaacaaaacaaataacacccccgtgtacctaagattcctatatagctttataaaaaactccaacatcttctatttgtaacttcgcaaagatatttattttcacttaaaatacgccaaaattcatacactttctacaaaaagatatatctttggcttaaaccttaaatttgtaatttatgtctattattttttgtatcatttcccggctaaaaagggacgaacaaacagacacctacgtgcattttgaacaaacggccacgttacgggaaatcgttaccacgatagattcaccttatgtctttttctacacgaaatacccgactccacgattaggagaacacgcacaaaaacgttttcttcaggtagcacaagccacaggagccgtcatgctttattcggattattacacggaacaagatgattcgcaaacggcacacccgactattgactatcaattggggagcgtcagggatgattttgatttcggatcaatacttttattcagaacagacgttttaaaaaaagtgatcagcgaaatggacacggagtacaattttgccgcactctacgatctgcgcctgcgtctttcccgggaaggattgattttccggattcccgaattcctgtactcggaaaaggaacacgattcccgacgttccggtgaaaagcaatttgattacgtgaaccctcgtaaccgggaagtacaaattgaaatggaacaggctttcacggctcacttgaaggccataggcgcctacttgcctcctgcattcaaaaccgtcccgttccaagacgagcattttgaaactgaagtctcggttattattcccgtccgcaaccgggaaaagaccatcgcagaagcgatacgatccgtcttttcacaacagaccaatttcaagtataatattctcgttatcgacaatcattccaccgacgacacgaccgctattgttaaaaaaatggcccaaaagcactcgcaaataatccatatcattccccctcgcaccgaccttggcatcgggggatgctggacacatgccatcatgagcgaacattgcggacgattcgccatccagttggatagtgatgatttgtacatcaatcgacacgtactccaacgcattgtcgacacgttccacaaacatcaatgtgccatgattatcggtagttacaagatggttaatttcaagctggaagaaatacctcccggcatcattgaccacaaggaatggacaacggacaacgggcataacaacgccttacgtattaacgggctaggggcgccccgagcattttacacgccattactccggcaaatcagagtcccgaacgtcagttacggggaggattatgccacggcactcgcaatctcccgtgaataccagatcgaacgtatttatgaaccgctatatttatgtcgtcgctgggaaggtaattccgacgcggacttgaacatccaacgtgtaaatgcgaataattactataaagataaaatacgtatgattgaaatattggcaaggcaacagagaattgaaaatggagaattgaaaattggaaatgaagaaaaatcttaaatcaaaaattaattccttatcatgtttttcgacgaatttacgaaatcacaactagcctcttggcccttggcacggaacaattacgaacgcttgcggaatgtcatttatcgtacgattgatttcgatgggttccagattcgcatccagtacaacccggaccggattcaatcggccgtggctaaaatagacgagcaatcaatcaaggcaagagcctgtttcttgtgtaaagaaaacattccgccggaacaagctagtttcgattataaccccacactggatatacgggtaaacccttatcccatattcgaccgccattacacggttccggcaaagcaacacattccccagctcatcaagggacatttccaagatatgctggccattgcacaaacttatccggagtacacgatcttttataatggtccccgtagcggagcctccgccccggatcattttcatttccaactggcaccccgtcacatcatgcccctagaaaccgatgtaaactcctgcccgaaagaaatcttgtggacttccgaatcacgggaaaccacaatcgaaagtattcatcactacctccgcaagaatatcatacttcattcaaacaaccgagagcaattaatgaatattttcgagcaattagtgtcactcgtgggccaaatcaccccgaacgacccggaacccatgatgaacctctttgcctggtacgaaaacaacgaatggtgggtagtcatgtttccccgtcgtcaacaccgcccgtggcaattcttcgcggaaggagatgaaaacatactgttcagtcccggctgtgtagactttgccggtctgatcatctcacctcgggaaaaagatttcaaccgtctggacgcccccttgctggaagaactcttttcccagttaacccttaccgacaaacagtttgagaatttacgatttatgatttacgatttatgaagatgaaagaacctgtaacttgtaatcgatcaacttgtaattcgccgcaggcgatcactctttccattggcatccttttcgctcctgccatcaccttccgtttgaacggaacctactggaacaaggatcaaaaatattccggagaatataccatttccaaagaagggaagaacttgattctacattcatcttcaggaacacagatcgtaccggatcacttcacccttacaccggagaacgatgaaacgacaaacttcgatctgttaaatgtcatgatcgggatcaatttccactggcaacgcacggaagaccagaagttcaaaggtacattgaaaatcatggacgaggggaaacatctgacagcaatcaacatattacccctagaagattatttactaagcgtgatctcttccgaaatgagtgccacctcatctttggaactcctgaaagcccacgcggtcatttcccgcagttggctgatcgcacaaaaaataaagagcgagaaactaaccgacacttaccagtcctgcatacaggatgaacaacaatatatccggtggtatgaccgggaagaccacgagcatttcgacgtgtgcgcggacgatcattgtcaacgctaccaaggtattagcaaagcctacacgccatttgtccaacaagccatcgaggccacccgaggggaggtccttgtgtatggcggagatatttgcgatgcccggttctccaagtgctgcgggggagtaaccgagtattttgaaaacacctgggaacccgtgaatcatccctatcttacaaaagtgattgatagcgatacccagtcttcaactcccgacttatcccaagaagagaatgcccgaaaatggattctctccaccccgaatgtattctgcaatacccgggacaaggccatcctgtccaacgttctcaatgactatgatcaggaaactcaggactttttccgctggcaagtatcctacactcccccggaactatctgcattaataacctcccgtatcgggattgacttcggggacattcaatccatagaatctgtggaaagaggtgtctccgggcgcatcacccgtctccgcatccaaggttcaaaacgagacatgatcatcgggaaagaacttgtcattcgcaaagctttctcccaatcccacctgtatagctcggccttcatcgtggaaacagagaaagatacctccggagctattacccgtttcactttgaaaggtgcgggatggggacacggagtcggtctctgccaaatcggagctgccgtcatgagtgccaaaggctatgattacaagcaaatcctctcgcactatttcccgaacacgaaactacaaacaattgaaaatggagaattgaaaattgaaaatgaaatcataaatcatgaaatctaaaatcactaaatccccttggtcctggatccccactctatatttcgcacaaggtctaccctatgtcgttgtcatgacacttgccgttatcatgttcaaacggttgggaataaacaacacggatatagctctctacacgagctggctttatttaccatgggtgattaaacccctatggagtccgctggtagacatcgtgaagaccaaacgctggtgggtgatcaccatgcaattagtgatcggtggaggattagccggaatagcactgactcttcccgggcctcatgccttccgctactcgttagcattcatgtggttattagctttcagttctgccacccacgacatcgcggcagacgggttctatatgctgggactcgacaccaagaaacaagccttcttcgtcggcatccgtaacacggcttaccgcctcgccatgctcaccggacaaggattgattgtcatgtttgccggttggcttgaaaagacctattcctccacgttcccggaagagattgccgttcctagagcatggtcagtcaccttctatctattggcaatcttattcgtacttctcttcctctaccaccagttcatcctccccaaaccggaaaatgatattcccgtgaaaaacggtaacccactgaatgcctttttccaaacctttattaccttcttccaaaagaaaggaatcattgcagccttggcctttattctgctcttccgttttgcagaatcacaacttgtaaaaatcgcctcccctttcttactggacaatcccgaagtcggtggcttgggactaaacaccatgcaagtcggtaccatctatggcgtcgttggccttatcgccctcacgataggcggtatcctaggcggtatcttcatggctaagaatggcctaaaacactggatctggtggatgaccgctgccatgaacctgcccaatatcgtgtacgtttatctggcattcgtccacccttccaacatctggctaatctcttccgccgtcgccatcgaacaattcggttacgggttcggtttcacggccctcacctatttcatgatgctcttcagcaaaggtccgcagcaaaccgcccattacgccatctgtaccggattcatggccctcggcatgatgctccccggcatgatctccggctatatccaagaactgatcggttaccaacacttctttctctggatcatgctttgtaccatccccagttttattgccgtgaaatacatcaaaatatgaataaagagactgaaattagtcgacaaccggaaattcgatcgtctcgctttcctcgttccaactctcaatcgtaaaatttccgggatcaccaccgggtaatattttaccgacaacaatattcaacgtgagccgcgtattgggagataacgtggaagtcaacgctttagaaagagtatgcacggaaccatccgccaaggtgataaacaactccaacaaaggattcggggcggaaggaaacaacatcacggtaggattactcatgatggtggcatcctcagaacgggacaattcgaatttcacggttttcgtcatgttctccgcctcggccgtgtaaaaattcatcttctcggcaatatttccaatatgaacgttcacgcttgttatgctggaactgaacgcactattatcctcttgtttcagtattaccttcaaaccggcggtaacccgtgtaagagaagctgtcaaatcctccgttccaatacgtgccggttttatcgcatggaccaaatcatacacgggcatataagtcccgtcagtattgggtcgcaagctaaaatagagttttgccagatcagctccattcgttaaccccgggtgagtaattgccggagaattataaatcggctcatcgtatttgggtgtcccccaatacaccatgttatactcgccgataggcaggtgaagttctcggttattgtccccatacacgtccccctctgatatgacgtaataaccattaaataccgtgagctttccatttatgtagtttccatagtaaatagaggtttcatccttacacggatatacctcaagaatccccgtgaaaggattctgattaagcggatcggttacccgagctcttattttaggagtaattaatccagacgttaccccataagatccctcatcatcattgtctgaacatgccgaaactaaagtcagaagaccaagcattacaatcattaatttcttcatagtaccttattttaatttgattatcaaccaaaatacggtctatatacgaaataaaacaggtaaaagtttatgaaatcaacaaatctcacttggtctatcaaattttacagcaacttactcttttatcaacttcaaattcttcaccccgatccgggccgccaaccaagccgaaaacttctcttcctccacatcagataatttctgcccgaacgccacgatagcaatatgtaacgtatcggcatgcagagaatccacttgattacgaatcactctggatatagcaagacttttcacggaaggataaagaatcttcacctcgggagtaacctgatgcccgatcgtatcatataacaagtaagagttcaacctttcgcgcaacacggaaatttcttcatcttgcgaggcaatccgctgtttattctgcatgtaataatcctgcaacaacatattactaacgtcattttgcatctcagtatcctctttcccgaatccctgatgaatcaccaaaggaacatcatgcaacccgtaatgcaacatcttttctttcaacgacacgatcacttcctctgatatttccttaccgatcagtgatacttcaatccgacgctccgggttctctgttttcacgtaacgatccaccaccaacgtattcggaaaattaaattcatttttgataaatcgactggcattcgtctcgaagatattcgttttcaccatattgtaggtgatatacacgctcggaaccatcgtcaggaaaatgattgaatacacgatacggtgtaccttcttttcccgttccttatccatgaacttctttttcgagaagtgcatcagtcgcactcctaaagtcgtggcaactgcaataaataccgaattgatcgtgaacaaatagaatgccccgaagaaataactcaggttgccgcttgccaacccgaacccggccgtacataacggcggcatcaaggcagtagcaatagccactcccggaatcacgtttcctttcaacttcgtcgaggacgccacgattcccgccattccaccaaagaaagcgatcaacacgtcatagatcgtgggggttgtccgtgccagcaattccgaacgagcttcgttcaaaggcgataacaaaaaatataaagtagacgttaacacgctgaatatcgttgcgatcagcaaattacggaaagccttcttgatcagttcaaaatcattgattccaactcccagaccgattcccataatcggccccatcagaggagaaattaacatggctccaataatcacggccgtcgaattcgtgttcaatcccaaagacgcgataaacgtggcaaaaatcaatacccacaaatttgtcccccggaacacgattcccttacggatagcctccacagtatcttcttcccgctcctgttcatctgacgggtccagaatttgacgcaaatacacccgaaaacgctgtaataatatcatcatactctaaatctatacatctacaaaaagctcaaaatagctcatattctttaaatcttcgcaaaagtataaaatctattacatattcttccatttttcccatatataaaaggactgacaataaatgaaacgcccccaaaaacttattatcaagtttcttaggggcgactccatgcaagaacaaactcgttcttatatcataatgaactgttattttataatctcaacaagaacgcaacgattccaatcatccttgtcataacgagaactgactcctttatgatctttcacaatacggtctttatttc

SEQ ID NO: 115 - DNA, 10602 bp, Butyricimonas faecihominis
ccctttacctattgttactcattaattgtaataattaaaagcaaatttatgaagaaaaaaccgatttattacacttttagagagtgtatttttggaaacgacaggtttttgaaacgattcctgagtttgttgtctttgtttgtcataggcaatataggtgttgttatggctcaagaagtcccgaaatttaccgtggattttaaaaatgcctctttaatagaggtgtttgattattttggaaagaacagtgattacaagttcacgtacaacagcgagaacgtgaaaaacgaaacgaaaaagattaccgaatcttttaagaatgtgacgttggaacagattcttacaaaatgtctggatggtacacgctttagtttcgagatcgtgaacaagaacgtggtgattacgctacgaaaacagccggatgtgaagttgatcgagatttccggtcgggtggttgacgagaacgggaatcccattcccggagcgacggtgttgattcaaggtacatctcaaggtgtagccactaacatggatgggcgttacacgattaatgtgagaccgacagatgctttacgggtttcttttattggttacaaaacggctattgtggaattgaaagggaaaacgaaggtaaatgtacgtttgaatcccgaggaacagaacttagatgaagtacaggttgtggcattcggtacgcaaaaaaaggaaagtgtggtttctgccattaccacgattcggccgatggacctaaaatcctccagtagtgacttgacctcctcttttgccggtaaaattgctggtatcattggttggcagacaggaggtgctcccggggcgttgactgaagaggagatgaacacaaagttttatatccggggtatcagttcatccaatggtgcgtctgagccgttgattctgattgacggggtggaatcttcccgtttggacttggctcgtatggtaccgggggatatcgagagtctttctgtattgaaggatgcgtcagctacggcgatgtacggggccagaggggcgaacggggtgattttggtgactacgaagaaaggggaggcagggagcgtatatacctccgttcgttacgaggcggtggcttccatgccaacgagtgacattgacgtggtggatccaaaaacttatatgcggatgtacaatgaggcgcagacgacccgtaatcctttggctagtcccgcttactccttgaccaagattgagcggacgggtgacccaagatatccttcttgggtgtatcctgccaacgattggtacaaaatcatgttcaaggatatgtccgtcaatcaccgcgtgggcgtgaatgtccgtggtggatccgagttaatgcaatattacgcttcggtcaattacaccaacgaccaaggtatgttgaaaaccgaccgcttgaaccagttcgatgtgaatatcaagaactcgaccttgacctcgcgcattaatttgaacgtgaacttgagcagtgccatccgtatgctggcgaacgtatcgatcagtgtcgataaataccacggtccgtcttatgacgtgacacaagcctattatttggcattcaatgcatcaccggtgaattttgccccgctttatccgggtgacgaaaaatatagttggcctcacctgcgtttcgggaatgacgccacggggaaagcagcaaatccgtatgccatgttgcagaaaggatataaggaacgcggacggtattctgccacgacaaaggtggagtatatccacaatctttcctctgtgttgaaggggttagaacttcggggaagcgtggctctttcgaagacaggatacgaatcatcggattacgtgacaatcccttattattattacatgaacccggaggcaggtgattacgattttgaaaaaggtacgcataagttgacgaatgtgaatactactagaaaacctcgtcgaacgttggagtcggatggatcgcaggcgcaaagtaccacgcaatgggtgtataatgtcactttattacacacggcagcttggggcggtgcagaagcaaataaacaccagacttcactgactgccgtgttccaggcacaacaaggtagttatgctcccgtcagcaatttgttcagtgggttggaacagcgtaatttgagctattccatgcgtggtagctatgggttcttggatcgttatttcgtggaggcgagtttcgggtacaacggctccgagcggtttaccaagaacaaccggatgggttttttccctgcagccggagtggcatggattgccagcaaggaaaatttccttcaggggattggtaacacgctttctttcttgaaggtgcgagcctcttggggtaaggtcggtaacgatgggattatatcgactccccgtttcgtgtatatgcaagaactaggcaaaggtcaggatatgaaggatccggaagtaggaagtaatcagtcttttgcgagaaagatgataaagaattatggcgatcccgatgtaaagtgggaggtgtccgagcagattaatttgggattggaaacccgtttctttaaagataaattagaactcaatgctgatttctatcaagaaattcgccataatgttattgagttgcgggaggtgatacccgctcatgtgggggtagaggtttccccgttggataatatgggcaaaacccgctcgcgcggtgtcgacctgtcagcgaaaatacagcatgcctttagtaatgattgctggattatcttgaacggtacgctcacgtatagtaaggctatttataaggaattggaggaagctgttgacaagccggcttaccaaagaaagacgggatacgaactttcacaacaagtaggatacatcgctgaaggattgtttcgcgatcaacaggaaattgataactcggctagtcaaccctcggctgaacccggtgatattcgttaccgcgatattaaccatgatggcgtaattgacgtggaggatgccgtgcatatcggtttccccgaaacgccacgattggtgtatgggtttagcggttttatcaattataaaaattgggagtttaacttctccttccaaggttccggtaaccgtgggttctttatcaacgcgaaggccatctccccgtttgtaggcgatcatgccatgctgaaggaaatctacgagagtcactggagtgaagacaatatggcaaaccgtcctttttggccgcggctttccacgagtagcatcactgaaactaacccgcaggaggattgggatagcagtgtggaagaacgaaagtccacctacttcatgcgcgagtgtagtttcttgcggtgtacctcactggagttggcatataacctgccgttagcatggcgtaagaagttacgcttgcaaacggtgaaggtattcgcccgcgccaataatccgttcatgttctccaattttaagatttgggatgtggagttgggagaggatggattcaattacccgatacagaaaacatacgccgtgggcgtgaacatcagtttctaaatttaaatatataatgtgtatgaaacgaatatatactttactactattgccgtttttcctgctaacagcttgcgacagttggttagacgtggtgccggaagaggatattacgactatcgacacggatttcgagacgcgcgataatgcctacgagtggtttaaaagttgctatgcccctttgaatctcagtagtacatcggtacgggatttagtggaatacacggctaccgacgaggtggtgatgtgccaatacttgaaaaatgccgggtattttgttggagataagattatttccggtaagcaaaatgtgtttcaaccctatgccgatcgctggattaacggtatgaacccccgatccgatttttatgcggcgattaatttgtgtaacatttttatcgataaaatcgaccaagtgtacaacatggaagagaaggagaaaaaagagtggaagggagaggtgattgccgtgaaagcctactattatttcgagttggtgcgtcattatggtcccattgttttggtgccggattttatggatccgaatcaggatctagcctcgctgaagttacctcgtagccatgtggatagttgtttccaaatgattgtaaacttgtgtgatgaggcggtccgggtgggcatcccctcttctgtcgagcaacaatcaactcattggggatatttcaataaagaggcggtgatggcattgaaggcaagggcattgtgttatcaggcatccgacttgtttgccaataatccggtgtatgccgattttaagaacaagaaaggagaattgctgtttcccgaggctggggatgcggtagctcaaaaggaaaaatggcatcgtgccgctttggctgccgacgaggcaattgaggcatgtcgtaatgccggaaaaatgttgatagacaatagtaaggctacgtcagtgttacagacccatatgcttaatattgaaaagtccgtgcgggctgcgaattttagtagtacggaggcgttgctgatgatcagaagggtagatgactctgacagtgagtggtggtattgggcgttaccccgtttgatttctgatcccatagggggcattcccggaactcaactggccccaagtatgaaaatggtcgaaatgttctacacggagaacggtctgccgttgggtgaggatcgtgcttatagcggaaacatttatggcatgacccaagagaaagatccgaagtattcagaggtggtggcgttgaacgaggatattccggtgttacataccaaacgcgaacctcgtttctatgctagtattggagccgatcgttgctattggcggattggtcgatcttcaagcggtaattttaaagtggaggcccagcaaggagaggaattcgggttgagagccaaacgtatcacgggtacggcgcctgagaacctcaccggctattggttgaaaaaaggtacttgctcggaggcggaattgtttaattacagcagtactattgccggttttggtgaaaatcccatgatcttaattcgtatggcggagctttacctgatttccgctgaggcatggaacgagtacctcgatgctccggatgaggaacacgtgtataaatcactcaacgtggtgcgtaaacgtgccggaataccggatgtggaagtttcgtgggcaggagcgaggaatcgtaataacgtgaaaactaaggccgggatgcgcgagatcatccgtcaggagtggaatatcgagtacatgtttgagggaatgcgtttttggaatttacgccgttggaaaattgcggaaaaggaattgaatgataagcttttcggttggaaagtggcggctagtgatcaaaaagctttttataacaatggaaacggtccggtcgtggtggaaagtaatcgcgagtttgtcgccccgcgggattatttttggcctatcaagagtgaggaaactctgatttcgggtatcgtgcaaaatctagggtggtaatgatgaatgaattaataatgaatgactatgaaatgtaaattattgatagcgatgtttgtggcaagcgtgtttgcagcctgctcggacgatgacaagatcgggtttgatctgcccgtggatgtttcgcaagaggcgattcgtttcaccccggctcccggaggtgcggtgatgcactattcgctgccggaggataaggaggtgtttggtattcgggtgcgttataatagtgtgtggggagaaacggttgtgaaggatggtagttatttaaatgattcgcttttgttggatggtttcacggaaatgcaatcggctgtgtctgcacaggtttcttatttcaaccgggcgatggtggaaacggaacctgtggaggtaacctttgccacggaaaagtctgcaacagtggcgttgtttgatggtataaaggtaaattcgttctggggcggttttagtgtgatgtatgatgcacccgagacggtgaacggcttgatccacgtgttttatatcggcgagaatcccaagacgcacgaaccggattcgatattgatggcgagtttggcgattgtcgaggggggagatacaatcaatattccgataaaacaacggatggatgctgttgatgtcgtggtgcgaacagatgattttaaaggtaggcgggtgaagcaggaagtggtgaaaggtgtgactgttctcttacaggatactttgatgcgagataagtttgatttccgctacacgggtcaagcggtggaagacgatacctataaattgggagtagaataccttttcgatggagacaaaaagggtaaaaaggcattcttggcacgtcaggataaccggaagtacgagtattacacctttttgaccgatggtggaactttcgatgaaaaattcatcattgatttgaaagaggagaaagtgccggcagcaattaatttgtacgcttttgtttgcatggggaaagatggtcattattatacttcgtcggatgcgaatttgagtaaatggtggtctaaaagtggggaaaattacaaaactcgtctcccgagtgtggtgaaagtgtatggtacgaacgatgcttcgttactgaatgcagataatgaggtcgtgaagagctctgcggttcttttagcatcgcatgcggaagataaagatatatgtgctctgactgcacctttatttgtggatgagtttgattttatggcagcggctatcaaagaatttaagggtacttgggtttatagatcggatgtgtacggtaattatgcgagtgatgaattcgggatgatgaccacgttgttggatttgggagaagcgaggtttgatgaagaagaaccggtttgcttgaatctgcaattcaattacacgggagcaacctaccgttatttgatcatgattgttgaagatacgtttgccggatttaattttattaaacgaaactttaatgaagggcaatacgtgacattgaatgaattggaggtatgtgtgaaagcggagtcaaatcaataaacagacgagaagatgatgaaaagaaaattattatatggaatcggattacttgcggtgttcttcatgatgagctgcgaggatttggaggatacctacgacgagtggagtggtgatggcatggtgcgttatgtgggtaaggcaggggacgtggaagttgcgccgggttgggaacgcctgcgcgtgacgtggaagaacggtaatgatgcaaatgtcaagtacacgaaagtgacttggcaatcggataaggaaagcgggctgaaggaaaaatatattcctttgcaaaaggacaaggcatcagacacattgtggatagagaatttggataatgcactttacacaatacgagtgagtaatctgactgcggacagcaccgagtcgtttacgcgggaggtttacggattaccttacacgagtgagcatgagaatttgagcgtgatttctcgcggtattatcaatttttatccgttagggaatcgaatggccgtgacgttggacgagaagaacgattatttgaaagaagtgatgttgcattacatcggtactgatgggaataaacacgaatgggatattcttgagaacatgagtgacacattggaagttgatcagtggggaacgatgatacagttggtgggaaatatgtttttgttacccgaggagggcgtcagttggggaattaactttaacgaaccattgacaattacccgaaagggaagggttgcggaatgtttggatgagatccctttcacggaggttacattggagaagggcgaacgggtgtggtccactcattttaccttgtggatgaaccaactctatgggccggattgggagagtcgggtgaatacaatcgaggaaatcgatttggattatgatttggcgacgttcgaagacttgttttatttgccggcgttgaagcaggtgaatctcggaaagaaccggtatttgtgtgaagctttggatatgtgggggatgaaaggggtggaaaaagattacgtgagcctcacggacgagtacaaggcgttgatgaccctgcaatatttgaagacaacccggggagtggaaacaaatgtgtataatggaatgtatttttccggtaaattgggggatcctaatttaggggaaatgtcttatactaaatttttacagcagttaggaaagattgatgctgatttgttaaatcattacgcggttgccgaccaaacacaaccggagattgtccccttggcgtgggaagactgggggttgatgtgctccgataccacgtatagcgggaacaataataccggtagcatgggatggttacttgatgatgacagtaagaaatgtttctctccgggaaagcgttttgaaattaaaacgtacgagttgacgttcgatatgaagactccgcaaatggtgcatggtttcaagtttgtacaagctcaccccgatgctattacggaagattacaaaaaagtattgggttacttgctttcagccgttaagatcgaggtgtcgaatgatgccgtttcgtggacgaatgcgacgtatgtggatggctatatcaccgtgggcaataatgctggtgaggcaacttatatcacgatcccggaggaattgaggcaagaggtgcggtacatacgtttatcaatggcgaataacaaggtggacgaaatggacggagttgcgacgtacagtcttaaattaggggattttattccttataccgaaccgtaatcaacacgtgaagatcctcccgttgggaaccgcggagttgtcgcgggaggatttttataaacaaacgtagtatgagaagaatagtttttattttgtgcctcctgtggggggcatgcgtggctgcgtatgcccaagacggttttaaaatcacgggcacgctgggagggaatcttggtggcaaattggtgttggtgggaaatggagccgagggggctgtgtctttgggtgaaactgtcatgatcgatggtgattttgaattcacgggaaaggtggatggtatgatcttggcttatatcttgaccgaagagaggcaaccggtggcaaccttgatgttggagaatttggagtatttgttagtggcgggtgagaatggtatcgaggtgcagggtggtggcgattcgcagaaagtattgaacgagtttgaagccgtgaaccggcggattgcccgggagaaaatgctcgtggaacagcaaatgaaagcggcttacgcccagcagaaccagatgcaattacaggccttgcagcagcaattttcgaaagtaatgcaggaggcgggggagaaacaggcggagttgcttaaaacctacaaagattctcccgtgtcggcatttatcgttgcctcgggaatggggcagatggattatgtttccctgcaaaccgtgttcgacgaattgggcgagcctgctaggaatagtctgttcgggcagatgattgtacaatgtttggcagcaatgaaggacgtagaaattggtgccatcgcgccgaattttaaagggagcatggtgaataatgatacgctatccctgtacggggtgaaagcaaaattgaagttggtggacttttgggcctcgtggtgtgctccttgtcggcaagaaatgccgaacgtgtgcaaggtgtacaagaagtatcatgacaagggattggaaatcatcggtgtgtcgttggattccaaaatcctagattggcagcaagccatggtggtggagaaaatgaagtggttgaatattgtggacgcgcagcagcaaatcgctacccgctactttgtcaggggtattccccataccttgttgctcgacgagaataaccgcattatcgccaaaaatttacggggcaagaccttggagaagaaaattgccgagttactaggggataaatgaaatgcattaagaaatagtaagatatgaaaaattgcgcatttgttttactgtttattattttctgctgggggtgttcgaatatggaagtaggcgtagaggaggatgtgttttctgctacgggaatgaatctgcctattgaagatctaacggttgaagatattcttttggaaggagcacctgaagaacttgtgcgtgcaacgaagaaggtattgggtagtaggatgggaaaaatattacttcgtgaacttaaaaatcgatatcctaatggtccttttattcgtttccatttttttgggaaaatagatgaagatggagagatcgtggatgaagctggagaaatgaggtattatggaatgggagtaatcggttataatcgtaatgctttgagacttaagactaatgaagaactattgtttcatgaatttttccacgtttttcagacgggtgatttaaagccccaaaaaagtaggaataatgaattagaggcttatttagcccagtatatatacggagaaagcaaacaaacgactattgttaataccgaattcaccatagcgttaggagtacttgctaacgatcttcgtaaaaattccttgaccgagaaagaaatggatttattttatcagaattataatgcagcattaattcttcttgagataatgccggagtatagtggtgaaggatggtattctattagactaaataagggggaaaatccgtttcctaatcttatgaaat

SEQ ID NO: 116 - DNA, 10594 bp, Butyricimonas faecihominis
tttttcattttgggcaaatatgtcaacctcctgatggttaaaaagaaaaaaaatatctgcattccatttgtaagcatgaaaaattagtatatttgcaacgcaataatcgatcgtttattaacacaataaacatttcaatatcaatccctttttatcatcctacttttctttggacaaatcttttgtttcctattggtacacaaactttaacacacataaaaaacggatgagagtatctacgattattccctcatccgtcacaatttcttaattaaatatccaaactcacgttaactggaaataccccgaacccgaaaagcgtgtattatccacagaaccaaagaaataaaagagatgaactggattctgttcctgtaaagcaagctctaccgtagcatccccatctcccctacatataggcaatcggtcaaacgaaacgtctcgtcgttcgtccttatatttcttatgaaaacgatccagatgtagaacgagaatacaaacgtccattttcttttgataatcttcctgtagtcacgaaatatagtccgatttgtcctacaacaccattatgagattgagctggtattttgtttttaagcaacagcgcagaagccatatatacaaacggcataatacttatcccttgtcttaattatttatgacagtcattattgtaattcgaattatataaaaaacctgaaaacgacaaaattcattttcaggttcctgtactcatgctactcatctcaataattctctaccagcaattcaaagaatccttgcggatggagacaagccggacaaactttaggagccgtggggccctcgtggacatacccgcatttgcgacaataccattttaccgttttcggacgttcaaaaagaataccatcctgcaagttcgacaagagtttccgataccttgtttcatgatttctttccgcctcgataatcatacggtacatcacggaaatgtccttaaatccctcctcttcggccactttggcaaattccggatacaagtgatgccactcgtcatactcaccctccgcggcctcaaccagattactggccgtgtccaaaataaccccggcaggatacgcagcagtgatctccaacattccaccttccaaacgactgaagaaacgtttcgcgtgcatctcttcttgcaaagcggtctcgtagaatatgcccgctatctgttcgtatccctcttttttcgctacttcagagaaaaaagtataccgattttttgcctgtgattctccggcaaatgattttaaaagattggcctctgttaaagaaccctttacacttttgttcatggtttttcctttttcttacggggaaaggacgttttaagttacaagctatgtagatccaaacctgtaaccggtcaacctgcaacttgtaactactacccatcaagcaaacttgatggtagtataaataccccacattttaagcatttctctcctttagttgcaaaatattaagatatacttttgtatgcaaaagaattatgacgagtaatttttccatatagagttagttatgtcagagattttaaagaagttacaaaaagatattcatttcatcgaagggttgaatagctgtatgaattgcggggtatgcacggcaatttgtccggcagccgaattctataactatgacccgcgggtgatcgtggaaaccgtgcaacgggggaatgaagaagagatcgaagagttgttgaaaagcgacacgatctggtattgcggggaatgtatgtcttgtaaaacccgttgtcctcgctgcaacacgccgggcctcgtgatcatggcattaagaaaaatatcgcaggaactgggatattttgtctattcggaaaaaggacgtcaacaatacgcacttaagcacgtgatcggggaatccatcctcaaaagaggatattgcgttactcccgacttagtgaaaccggaaatgcacccggagcaaggtcccgtgtgggaatggatatacgagcatctggacgacgtgtacgaacgtatgcactcaaactatcgtcaaccgggagccggagccttacgggaagtggattcggaaagtatggatgaattgcggaaaattttcgatgttaccgggggaactgaattcttggaaaaaattgacagttgctcccagcacgtggccgacgaagagaaagtcgatctggaagaggcttatttcctgaaaacatacatggaaaacagcgggaaacaccagtaaaaagaatttaaaatttaaagtttagaatttagaatgggaatgcgcagggaaatctaaaatctaaaattaaaaatctaaaattgaaagatgaatttagagggtaaacaacagatatggaaggattatcagaaagagatagccgatgatcactatttttacgcgagaagttgtattcgccagactttcttcccgggttcggaatgggcttacttggatattatgaagaataaactggcgaaagatgttattgatgatccgcgacacacgacttgcaccgggatcggttatcattcggacatcgttccggcagaaacaatcatgacagtagtcgcccgtcattttgccctcatgaccgaggccgggtacgaaaacatgacaccctcctgtatcacatctttcggcatttataccgagatattggagacatggcaccaccacccggaagttgaagaaaaaatcagagaattcctttggaaagccaccaaacgggaatttaaaaaacctagaaatcttgctcacacatcagacataatctataagttcagaaacgagatcgctgcccaggcaaaatacaagctggtggacgttcacacgggaagacctctccggggagtggatcacatcgggtgtcattactcgaaaatgttccccacgaaaggaattggtggagccgaatttccggccgtattatccggtatgatttatgcctggggcggcgatgtaatcgattacccagaaagaagacattgttgcggtttcggttttcgccagtatctcgtgatggccaaccggggatattccgtggccaactcgaaaaagaaatttgaatccatgcaaccttacgaacccgactttatcgtggcaaactgtccggggtgcgccatgttcatggataaatggcaatacacgatcagcgagatggaaggaaccacctacgggcaggacggctacggtatccccgtgttgacctacgaggaactcacggcactcgttttggggtatgacccgtgggaaatcgggttgcagatgcaccaggtttccgtggaacccttgctggacaaaatgggcatcccgtacgatccggaagcgaaattcaaaaacatccggggagaagacatcggggttcccaaatgccccacgtacctaagagtgtcaaaattataatgttaaaccacaaaattggaaaaagaaccatgaagtcattcattttcaactttcaattttcaattttcaattaatatatggcaaaagtcatcatcatcggaggaggtccggcaggctgcgaagccgcacatcaactggcaagtcaaggaatcgacgtggaattagtcgagaaaaacaacgaaaccggcggtaacttgaacaattggtaccaattgtttcctgaccggaaatccgccaaggatctgaacgacatattaaaacaaaacctgaatcacccgaagattcggttacatctaggcatggaaccccggaaaatcgagaagaacaaagagggtagatttcttgtacctctcagcgacggcagcttgcttgaaggtgacaccctattggtttccactggcttcaaacttttcgatgcccgccggaaagaagagtacggctacgggatatatgaaaacgtgatcacttccgtggaactggagaatatgttctacaaccactcgatcagaatggcaaacgggaatacccccaaacgcatcgggatcatccattgcgtgggttcccgtgacgaaaaggtatgcaactaccattgctccaaactctgttgtatcaccggggtaaagcaagccattgaacttcgggaactattacccgacacggaaatcttctgtttctacatggatatgcgtatgttcggaccgggttacgaggaaatgtaccgggatgcccaggaaaaatacaatatcaaattcgtgcggggcagattgtccgaggccgcagaaaacatgaacaagcaattacagatcaaggtggaagacacgcttgtcgggaaacccttgcgcatgacgcttgacatgatgatcctattggtcggtatggaatcctcggaaggtagtcgccagatggcagacacgctaggcttgaacttggctcccaatggtttcatcaaatcccaagacccgcactatcgcaacaacaacacgaatgtcgaaggtgttttcgtggccggatgcggaagtgccccgatgaacctgaccgacacgctggccgatgcccgttcggcagccatgaatattatggaatacgtgaaacttaaaaagattttgtgattgtcgattccaggattcagtgattaaaaagagcgttggatagaggggaaaaatcaatgaatcggaaatcactaaatcaagaaattaataggatttaaaattaagagatgatcaatttttggggttatagcatatcggaaacacggagtatcaattatgatacgaacgacaaatccatgacggaacatatcgcacgtgtcgttcccagcagcaaattatgtattggctgtggcggatgcacggcaggatgcacggcagggaatctcacggactttaacatccggaagatacagatgctcatgaagcgaggcgaaaataaagaggcgaaagagcaattacagaaatgtatgttgtgcggaaaatgcatgctggtctgcccaagaggcgtggaaacccgaaagatgattttagaaatgctcaactatataaaaacaaaattgaaaagctgaaaccaattattatgcagcaatacgaatacacgaacaaaatatattacgatcactttgtcctgccgttcacgatcggactggtcgtgctactgggatacttgtgcgtgaaatactacaagtggatcaaaagctttccgaaagaagaacgtaaaaaaatccgcaaaggcttgttcagtttcaagaccattcgttccggttgggaaatcttccgggaaagcttgttgcatcataatatattcaaaacgaacccgatgctgggatacatgcacatgacctttgctttcggatggttcttgttgatcgttgtcgggaaaatcgaatccatggtttaccataccagtgctttcaacccaccttattttgctatctttttccgttatttccacccggcaaaagagacattcccgtacagcgagtttttcgcgttcttgatggacttgattctgacattcctattaatcggtatcttactggctgtcaccaaacgtttctgttcccgcattttcggtatgaagaaaaccacgaaacaacgggcttacgatttgcttatattaaccgtactttggcttattttcccggtacgtttcctagcagaaagtttcactagcggtctgaacggtggaggtagcttcctcacgcataacgcgggtgactttttcagcggatttctacccttagaaagtttatcttatcctgcttggtggctttactcctccttgcttggactattcttcctactattaccattttcccggtacatgcatatcccgactgaaatggtctatatcttcctaaaaaactggggagtaaaacaaggtaaagaatataacggattcagtgaaatacaggtcaattcctgttcccgttgcggaatatgtatcaacacttgtcaattaaacacgtcctgtaatataaatgacacgcaacccgtctattttctccgtcgcctgcgtaatcgagaggaatatgcccaacaagcggaagactgcctgatgtgcggacgttgcgagaattcatgtcccgtgggcattaacctgaatgccatccgccaaagcaaaagaccggatatattaagagttacaaaagacacgtatgcttatgttccccaaccgaaagtgaaacccgctaaagtcgcttactttgccggatgtatgagtcatcttaccccgggcattataaaatccatgcaacagattttcgaaaaggcaaaagcgaactacacgttcattgatgaacaagccggagtttgttgcgggcgtccgttagctctttccgggaactggaaagcggcgcaagtggtcatggataaaaacctacaaatgattgatgcctcacaggccgatatattggttacctcctgcccgatctgttacaaaactttcaaggaggattacctgttgaatataaaagtcatgcaccacacggaatatatcgacatgctgattcaggaagggcaattaaaggtcaacgcccttgatctgaagaccgtgttccataacccgtgtgaactgggaagaggctgcggtgtcgttgacgcccccgaaagcgtattgaaacaagtaagtcagaaaatctcgacagcctatgacgggaagaaatcactctgttgcgggggtagcttggcaaatacggccattgattccacgcaaaaaacgaaaattagtagtgataccgtgaaagcatatgcggcataccagccggatgttattgtcacggcctgtccgctatgtaaaaaaacattgggtaaaacctcaccggaaatcccggtaaaagatattgcagaactggttgcagaagcctaaaataaaaacgggattcactatttttatgtgaatcccgtttttatttctcgactaaagaaaaacttaatcttcaagttccgctcttactccctcaatctgttccacgttcaaatcgctctcattactatttgtggcaatgtcataatgtggaagcgggtttttctgtaactcgatattttgttcacgatgcacgcaaacatccatcgccaaataaagagcattacgaagtccttgttcatcacccagattctgacctacaatatcataatgaggatctgttaaagacatcgaacaaatcacaggtaacccggcaatataacaagcggcactttcttcgtccacggacttaaatgccacaaccccctgatcgtaatacatggcgagaacagcgtcaaatttctcgtacattctctccgagaagaaacgttcggcagagaatgggccaatggccataattccctcttctctagctcgctcaatcgccggaataataacattcacttcttcatctccattctgaccgcaatttacctgtgggtttagccccagaacagcaatctttggtttcaaaatagtaaaatcctgacgcaaagtatcatccagcaaggttaatttcttgaagatattcttttgtgtaacttgatgtggcacatctcgtaatttaacctgttcggtcacgaaacccatctttatcttttcgctcaccaagatggacataatatccgtggtattataacgcttacccaaatattccaccaaagacccggcctcttccgtgaagaacgcattcggtccctgaggagccagcgtcaacacatcaatctcgtcccgatccaattgatccaaggcatatttcaaagcaaccatagtagcctgatccgattcgggagtctcttttccaagatcaaccttcacgttatcatccacgcaattgatgatattggatcgtttcccgttggcctcacccggctcacgaatcgtgtttaaactgaagttctcaatatttaataccttccggtagtaggcggccactttaggcgacccgtataggataggaacacacaactcacaaatccgattctctgccaacaattttatgatcaactcataagatattccgtttacatccccgtgcgtgattcctacatttaatctgttttccatgttttaaaccatttcgtttgcacaaagataatgaaaaagtcgatatttatcgataaaaaaagagggcattgccctcttttactctattcttgattttcttttctttccggtctaggacctctgtcccgatggggacgatctccccgatcttgtctaggtccgcgatcttgacgttcgcctctatcttggcgctcgccgcgattttgacgatcgttttgctccataccttccggtttaggcaacaacaccttacgggaaagtttgaattttccggttttcggatcaatatcgatcaatttcacacgtacccgatctccctctttcaatacatcctccactttctctacgcgtttgtgatcgatctcggacacgtgcaacaaaccgtctttacccggcaagaactccacgaaagcaccgaaagcggtgattgtctttacaactccctcgtaaatctctccgacttcaggtttgcaagcaatagccttgatgcgggcaacggcaatctcgatagattctgcattggtggcagcaatatccacgataccctgattacccacttcttcaataacgataaccgctccggatttctcctgaatatcctgaataatctttcctccggggccaatgatcgctccgatctgatccttatccaccgtaagcgtaaccatacgcggcgcgtgcggtttcaagtcaggacgaggttcaggtaaggtttccttaataatattcatgatgtgtaaacgacctctccgggcttgatccagagctttctccagaatctcgtaaggaagaccgtctactttaatatccatctgggtggcggtgataccgtctaccgttccggttaccttgaagtccatatctcccaagtgatcctcgtcacccaagatgtcagacaacacggcatatttctcgttatcggtgatcaatcccatagcgatacccgttaccggtttcttgatcggaataccggcatccatcaatgccaaagttccggcgcataccgttgccatggaagatgaaccgttagattccaaaatatcagaaacaacacgtaccgtgtaaggatagttgtccggcaacatacgtttcaacgcacgatgagccaaattaccatgtcccacttcacgacgccccacaccacgactagctttcgcctctcccgttgagaacggcgggaagttatagtgcaacaagaatttttcttttccttgttcagtagcctcatctataatcttttcatccagcttggttcctaaagttaccgtggacaaagactgcgtttcaccgcgggtaaagatagaagaaccatgaggtcccggaagaggtccggcctcacaccagatcgggcgaatctgttcggtcgtacgtccatccagacgtaacccctcatccaaaatcattctccgtacagcctctttctccacgtcatgataataacgggaaaccatattcttcttcgcctccctctcttcttccggaagtgattccagatactcttctttcacctcggtaaataacttttcgcgtaaatgcttgtcggcattacattgacgggcaacggcatacgctttatcgtagcatttagcccagatgtctttacgcaactcttcatcattcacttcatgacaataagcccgtttttctttattcacggcttttgccaattccatttgaaccaaacaatgatctttaatagcttcatgagcaaatttaatagcgtcgagcatttctttctcggaaacctcgttcatctcaccctcaaccatcatgatattctcgtaggttgcagcaaccataatatccaaatcggcagttgccaactcgctcttcgtcgggttaatcatcaactccccgtttacacgagctacacgtacctcggaaataggaccgtggaaaggaatatcactcacggcaatagctgcagaggcagccaatccggccaaacaatccggcatagactcttcatcagccgagtacaacgttacctgcacgaaagtttccgcatgataatcatccgggaacaaaggtctcagagcccggtcaatcagacgggataccaaaatctcgtaatcggaagctcttccctctctacgggtgaaaccaccggggaaacgtcctaccgctgaaaatttttctttataatctaccgacaaaggcatgaagtccacgtccggacctgcctcttgcgcggaacaaaccgtagccaacaacatcgtgttgcccattttcagcatgacagcaccgtccgcttgtttggctaattttccggtttccaatgttattacccgaccatctttcagggtaatgcttttttcaataatgttcatagaaataataaaactgttaaaatactaaacattttaacggaattctttttagataaaaggaggaggaggggaggattaaaagtaaaacgacccggacgacccgggtcgtttttatgtaattatttacgtaaattcaatgctttaacgatagcacgatatctatcgatatctctcttcttcatgtaatcaagcaacgctctacgttttccaaccaatttaatcaaagatctttgagtagcgaaatctttgtggtttttctttaaatgctcagttaaatgagcgatacggtaggaaaataaagctacttgtgactcaacagagccggtatc

SEQ ID NO: 117 - DNA, 10518 bp, Butyricimonas faecihominis
tttgtgatgttaataaacgttcgtttattgattctttaaaaagaggggaaaattctatttgtttcaggctaatccggtatttatttgtttacgtgtttgtcgataagtaaaccctaatcctaccgatttatcggggatgtaattaggtgatgtgctatgattttgtgtaagtagttttgttgttggctgttatgctttaaattcggaatgtgttatatttgcttaaactctcttaaaatggcggctataatcgggcgacaatcgggcgacaatcgggcgatggcgcctaacaggcgcccaacagcctagtaaccgtgaccctacaagggggaaaaaacattgatttgcggggatataagctataataatcccgggtggttatttcccttttttagtcttccagctcgatttttccacaaggaggggagaagagggggattttgggtttgttttttaataaatctttcacgtcgtcgagtgatagtttgggggcgggttccggtccggcaattcttcccactcttccttggaggttgtattcttgataggaggcagggagtttgtcgttgatgaaatcatcgagaagacgttggtgttcgatgctggaatggaggactctctcttgtattttgaacagcatatcgtgtgagatgaaagtgcggaaagtgtcgagacctttctcgcaaattcctagagcaatgccgtctgtgaggcagcatgtgaattttttttccgcgtcggtttgcgggtaaaaatagttactgttgtgatccacgtaatgccggatcacgtccataccgggcgtgtagagattattgggtactaggtggcgtgtgcggtaacgactgaaaaaatgtcccgtgtacctactgaaaacgagttcttcggttctcatgttgtaaacggggaatatgatgccggcgcctctgtaagtctcgtaagtggagtaatagtaaacgtccgggttttcccgttcttttttgttgttacatgcgatgatgatatgccattggttgtgcgtgaggggggatttccactcgatttgaaatgatacgggaaatttcttggcgaacaagatttcccggcgatgcgtgttgatgaagaaatccctcttgttcagaattgcggtggtatcgcgtcttgcctctttgatgatggcttccggtgacatggtgtctaaaaacataatcctgcaaattttaaattaacgggtgatggctgcccggatggaatcgaatgacaagtccggtagcgagaggttcgtgaaaactttaccgatgtcgtcaacgtaatgcgcgtcggaagagcggataaatttatatccggacaggtacgcgttctgttgaagaaattgttcccgtgtcgtgtgaggactgagttcaagagcctcgcatttcaagtctttggggacgaagccgagttgagagagaatgctgaaacgagatttgtcgatatgggccgggatgaagatgccgtccagcgcatggacggtacgttcgatcgtgtttatatcgacatccaaggccgtgatcaggaggcgttcttcttcgtatgtgatctgttcttcggcatccacgacgacttggtaaccgaatttgtccgggttgttttttatatctgggagatggagatcaaggaagtgctggaatgcggtaaggcgttccaaggtggggaagtacgcgagggcgtgaacttcttccgccgtgttgacttccgtcccacaaagaacccgtagcccttgttgttcgcccagttgctggatcacgggggcttgccgggtggagttatggtcggagatcccgatgagggacaggcctttctgtaatgccataccgatgatgtttgcgggactcatgtcgagatccccgcaaggtgacagcacggtgtgtatgtgtagatcggcccggatttccatggaattcgtgattacgggtgaagtagtttgtacaattgtcccgtgatctcgaaagtctgtaacgggctggagagaatagggatgttttcgttattgctttcttccagcgtatcttcttccgggaggtgtcctttgaccagaatgatggccgcgatttctttcagggaggcaatggccatgacgtttttgtgtgtttgcagggtgacccatatatctccttcttgggcatgtcccatgacgtcacttagcaagtcggacgtgtagccgcctttaacttctcgttgtaaaccttcttgtccggaacataccgtgaggtttagctgggaaacaatttcttgtactgtcataatttgtagtttgtggttttcgtgaatatattttatcttgtttattctccaaatctttttaatccccaagttttttctgaaagttcaagggattcttccggtgtcatcaaggcctcgttgcacaagagtttttgcatgaatacgcattgattgagtttcgcctttccctgaacgacatcccttgctagcgtgtggcaagccggggctccgcaggccccgcagtcgatttgcgggagaacgtgcatgatgcggtttaatttttccatcttttccatggcgacaagcatattctcgtcgagttgttcgatggaacgcggtgggattttcccgctgagcttgccttgcttgaaaaggtaggattcgtattcttgaatgtcatcgagatcgggttgctgttgttcgtgtttgctggcttgcatccgtttgcgcaggcgttcgatggtcaggaaccggttgttcacgacaagcgccccgccagcgcaggagtggtcgcaggctcgtaattcaagaaaatcgatgtccgtgagttcatcattttctattttttcgagtatgtcgatcacgttgtggatttcgtcaatggctaggcagcgaccttcaaatttagaggcctcaccttccgacaagtcccaagctatggattcgggggagaggtacgtgcgttcggttaccgttcccacgggttgatcccggtgttgcgtgaggcccagttgtattttgttataaatgaaattcaagttgataactccgtcgatgttggattgatcgtcgccaaccgggctttttactgccgcgatttttgcggcgcatggagtgacgtagaatataccgacttcatccggcgaaatacccttgtcgagatattttttacgggcgaagatggctgctaggtccatggcttgttttaacgggacgatatggtctatcagcgagggaaaacgtacctgtatcaagcggacgattgccgggcagaaggacgagatgaagggacgctcgtaagagttcttttccatgtaacgttgtatggcttttgccaagatgcccgatgcctgtgccacctcgattacttccgtgaaccccatctggtggagttccgcgaagatttgttgttccgtgatttcttccgagaattgtccgaaaaggactgtcgggagaaggatgatccggtgtttgaaattgaatatttggttgaaatcgtcctgctccacgtatatcgcatgttgcggacacgacttgaggcatttgccgcagtcgacgcaagcatttttgtttatcgtcgccaaaccacctttaatgcggatggcctgcgtggggcagaggctcatgcagtgcgtgcatccgatgcaggcagtactggcaacttttaaggcgtggtaaaacggttccatgtattaattttagattttaaattttagatcctatcgattaagtgatttaatgattttcgattaagtgattttaatcacccaatcatcgaatcggcaatcacggaatcttttttcattctaaacttcttttatctttcagttttcagttttcagtttttatcttttaacttgtagagccgaaggctcaacttgtaacctgtaacttttttaactgccgcgtgcagttaaaaaaaagtagtcatcgtgacttttgttccctcgtttactttggattcgatggttagtttgtcacagtttttctgcatatttgggagacccattccggctccgaatcccatttcccggacttcgggggaggcggtggaatatccttcctgcatggctaggtctatgtccggtattccgggcccccggtcgctgatgacgacggtgatgactgtgggatcgatagacacttgcatggttccttcgtaagcgtgtgcaaccacgttaacctctgcttcatagagggcaaccacgatgcgtttcagtacggcggggttcacgttgagttgtttcagtatcttttttacctcgcttgaggcagtaccggcacgtgaaaagtttcctccttcgatgttgtagttgaattccataatgcttgtttttaataaatgggctctagcccagcttcgtacagaagtccgcagactttgaacatgctctgcttgctttgtaagatagcgatgttacactctttggctaattctaccatatcgggggaggcttgttttcctcgaacaaatagaatgaaactgatgtctgacatttctgccgtgcgaatcacctgtaagttggctagtcccgtgatgaggatcatctcactggtgtctaaccggagcacgtcgctcattaggtcggcggcaaaagcgtgacggatgaccttgtcgagatggccgttttcgtgaatcacccgggcatttgataacgcagcaatttcctttagagtcataagtttgttttttgattgctcctaaggtaatcaaaaaaaatcggattctcaaagtttgggaatccgaatattttgaatctatcaaatggtgaaggccaccgagaagagcatatcgacaaacatggagttgctttttgtttcgtatccggttctgaaaccgatgtttacggggaacgggagacggaagaaatgggtgtcggccgaaatttccacgccataggagtggtaggttttgttccaatagcgatttttctcccagccggtatcaaagaagggttctgccgtgaaccgtttcatgtagacaagtggtccgatgtgggcatccgggtaccagaacggcaaggcgtaagatattttcaacgttgacaggttgtgcccgtagagagaggctccccggggagagtaaatctggttcccgtagtagttggttgttttatccgatttcagttgatgaccgaagtagagtgtccaagagtgatgtttccagaatccgggaagatacaaacgcccttctgcccatttcgtgtcgccgtagtccaatccgtcgaatggcgtgtgggcgtacccgacttccaagcgttgtccccagcggggatagatgtcccgttgacttgtccgggtttggttgttgaggacaagcccgtagcgcatgatctggagttttacatcatccggattggcgagtacggagttatacgggttgttggaaggcaggctggtccaccggttgtggtccaacaggtaggaacgcctcggtgttatcgagtgtatggcttgaatttcatatttcacgtaagggatgatataacgggaatagtttttccgggaaatgttgaacgggaattgtaccgtggccgttcctttcgtgcgttgtgatttataaatggtacgaatcgtgtcgatttcttgggtttgaacgatttttatcgcgtaatcttgcatgaaatcgtcattgcgtccgctcttgaattccagttgcaaggtgggccagaatcctttgtaggtggcttttacctgccagttgccgtgttcgtaaccttttcctctcacgaatcccgcggtcaggaacagggtgcttaacttgttttgcgagctgacggctaacccgaaatcaatgtccacgtcttcagcgtccgggaagatggggccccagctatggaagttgaataggtgggaggttttattgtatttccgactggcgtaggtggagtcggcggttaacttgaattgccagttttcctgttgtgtcacgctgtcggcgatacggaaggtttgggtgtctatggctttgttttctaattggtttatggcaattttacccggtttatacccgtcggaagtatagaacgagaataaaagtgaatctttgttcggggaaacgatcgggtagcgcaggccgaatttggagttgagtatgttcgccccgaattcttgcggttgggtttgccggtagaacgagttgttggcatcgaaagctccccggtatatgatctggtcgttcacggtaaccggattgtcaatctcgtaaggggtgaacgcggtgatctgggtacgtttgcccgtgtgaatatcgatggattcgaggtgtttgcctttcgaagataccaccacggtgacgatattgtttttcccgtcgtatgagggatgcacgaatagctcgtctccggagccttttacccggaatatttctttttggaacgtgtggtcaaggatcacgatggaggcgttgtcttctttgtcaacttccacgaatccccagtttccctccacggcaaaaggggcatacctgttttgccgggtggggtaacggtgatatttcttgtgacgtatatcgtagctggcgagtaccattttacccccgtgttcccagcggggatggtatttgtactcggaccacacgagcgtttcgtcttgataggcaaatttataatcatacatgattcccgttcgggtgatgatctcgtctttgtccgggtgtaggatgaccaaggctccttcttgtgccaatccttccttgtaggcaatgatttgtccggttggggtggctgtcgggtaatggtagttcgtgtatatcttgtttgcggtcgtgatggtatcgaatgggtggggtatttggtcggactcttgtttccatatttgttggagttcgctgaagttatcccggtagagcgtgcgtttggcatcacaatgggtgttggcttgtttcacgctgtcaggattgacgaaaagggactggaaatgacgggatgaccagatcgagtctcgtttttcgttcatcgtgagtttgaggctgcgggcaaaaggcgtgatcccgtaaggacgttttccaacccgggagagggcatcctgccagataccgggaccgtagtgaacacggctgtttccgaccatgtaatagccgagggcgtagtggttgggaacaaaatctttataggagccgagtacggccttataataggtgtatattcctttttccgtgatctgggctttcatttcgttgagaaattcaggtgaacgtccccgcccgctttttccgacggaggtttcgaataccgtggcatctccttctaggaaccacatggggacatataccccgatgacggccatcgtgatttgttctccgaagatatagtataatgcttttgtgaaaccttggtttaccttgtcgtactgtacaatgtggcggaattcatgaatacacaagtgttccagccaagcgtcgctgacatcctgcgggggagccgtgtagagttcactctttttgggggcccagcccgcgttcccgtttgacacgccaccattcgcccgcacgatcatggacattcttttgggtttgataccgagggtattggcgtgggcgtatagtttctcgtaaatatttgcaaggtattgcgtgttatcctcgaagaaatcagggtagatgatctgaaagttatccgttttgatttgtcgccagcgggtactgcaggggtcttgtccgagatcgacaaattgggctttaccgggagtgacaagtgtgaatataagcaatatgcctattgtcagggaatttaagaaaaacgaggtatgtttgtgtctcatgtgtagtagcttgtagtttatttttttataaaattattccgctaaaataattattttttcccacaatctccatcaagaacaattatctttgtacacgatgaaaaagagatcgaatctctttttcatcgtggttacaagttacaggttgtaaattgcaggtaatgacctgaatacgtctgaaattttaacttgtaacctgtaacttgtaacctgtaacttgtaacttgaaactgttatggatagaattgttgagttgagaaagttgttggagcattacaactacctgtactatgtgaagaatgagccggtgattaccgatcagaagtttgacgagttaatgcatgagctggaacggttggaggcagagcatccggaaatgtttgatccgaattcaccgacgcagcgggtggggaacgacacgacgaatgagtttgtgcaggtggcgcataaatatggcatgatgtcattggcgaacacgtatagcgagcaggagatccgggattttgatgagcgggtgcgaaaaggtatcgggggagatgacgtggagtatgtctgcgagttaaagtatgacgggacttctatcagcctgcgctatgaagatgggaatttgcaggtggcggtgacgaggggtgatggcgtgaagggggatgacgtgacaactaatgttcggactattcgaacggttccattgcatatgcagggggaggattatcccgcggaattcgagattcggggggaaattctgatgccttttgccgtgtttaatcgattgaacgaggaacggctggaggcgggagaggctttatttgccaacccgcggaatgcggcagcaggtacgttgaagttgcagaattcttccattgttgccaagcggcagttggattgttatttatattacgtgccgggagaaatcacgttgaccccgacacattacgggaatttgatgaaagcgagggaatggggttttaatgttcccccgtatatcgggttatgtcacaatatagacgagattcttgattttattcacaaatgggatgtggaacggaagaatcttccggtgcctattgacgggatcgtgatcaaggtgaatagtatcaagcagcagttgcagctggggtacacggcgaaatcgcctcgttgggccgtggcctataagttcaaggcggagcgggtggagacccgattgcttagcgtggattaccaagtgggacgtaccggttcgattaccccggtggctaacttggaacccgttcatatcgcggggactaccgtgaaacgggcctcactgcataatgaagatattattcgggagttggatttgcacctgcacgatatggtgtacgtggagaaagggggagagattatcccgaagatcgtgggggtggacgtggaaaagagagtggctgatgccccggtaatcgagtttatcacgcattgtccggaatgtggtaccccgttgattcgtaatgaaggggaggcaaatcattattgcccgaacgaggatcattgtcccccgcagattgccgggaaactggaacatttcgtgagccggaaggcgatggatatagagggaatggggggtgagaccattgatttattgctgacaaaagggtttattcgggatgtcgcagatatttatactctgccgtcccgtcgggaggagttgatcgggttggaaaagattctttacccggagagttacgtgatgaccagtattccgttgggaaaagtgatttatgctttcgagatcgggatgaagaatatatctgccaaaaacgcggatgttttggcagaacatttcggtagtctgacgaaattggtcggggcctcgaaagaggagttgatggctgtcgggaatctacaattccccggtgatcgggagaagaatatcaataaaatgctggagtattttcggatgccgttcaatgagccgttggagcgtttgaggcaggccggagaggtggatatgctgccgttggatgcggtgatttacgccttggatatacccgaaattgatttccataaggctgaattactgtctgttaagttcgattatatttatcgtctttacacggcaacactggatgagatcgcggagactgacgaaatgtcacgtgagaatgccgagcgtgtatatcgttttttacagggaaaagaaaagtttatccggaaaatgaacacgttgagcgtgtatcgtttacaagaaaaatcggtggataatcttattgccggaatagagaaatcgaaacaacggaatttgccggaattcattaatgctctggggattcgctatatcggggagacggcatcgaggaatctggcccgtcattttaaggacatccggaagttgatggacgcgacgtttgaacagttgacggaggtcgaggatatcggggatcagatggccggtagcgtgatccgttatttcgaaaaggcggagaaccgggagatgatggaacgctttttgcaatatggtattagcgggacaatacaggaagaagagggtgaatccgatcagttggccggaacaaccttcgtgatcacgggaactctttcgctgccaagagagcatttcaaggtaattatcctgaaagccgggggaaaagtcagtgattcagtatctaacaagacgacttatcttttggcgggagagaatgccgggagtaaattgcaaaaagcacagaagttaaatgtaactattttgaccgaaaaagagtttaacacattaatgggttcataaagattggtatattttatacgttgtaaatgcttgtggacttattttgaatattaaag

SEQ ID NO: 118 - DNA, 10471 bp, Butyricimonas faecihominis
atcaatataaataagcatttaccctcatctcgccaacacttcaaacaacacactgaaaatcaacaacaaacaatcaaaaatccgccattttcaatgacaagttttcacacggaacaaccctttttatttcgaaaaagttttttgtttcaattataggtcttattttcgcgtcattattaacaaacaaatttttttagaaatggcttacgtaatatctgatgattgtatttcttgtggagcatgtgaatcagagtgcccggtaggagcaatctctatgggtgatgatcactatcaaatcaatgctgatgaatgtatctcatgcggggcttgcgctggtgtatgtcctgttggagctccgaaagaagcttaatcatcataaaaagaaaagaacaaagctgcctctctcggggcagctttctttttgtacctattcgaaaccattaccgataactccctcaaatcaacccttctcacggggttgtaaaagcacgatgcctcacgtttgtttgcaagtcgtatccttgttcccgtgaacaaccggaacgtggccaaagttatttttacttatactttgttaaaatggcggcgataatcgggcgataaggcggcgacaatcgggcgacagcgcctaacagtcacccaacaaccgcccaacaaccacccaattttcaaactttaccccaaaaataccccgttaaatcccatgaattacgagatccatccgcacgtccaactcatcgacaggcacctcttccacgaactgaaacccgaaacaaatccccactttccgggcaacacgtgtctctttcaaaatcttatcgtaatacccgcgacctcgtcccagacgattcccgtggcgatcaaaagccacacccggcacgacaatcaagtcaattgcgtcgtaatccgtgtataattcgccaacaggctccagtatgccgaaagcctcccccggttgcagggattccatgcccttgaacacccgtaattccaacatgtcccctttcacgcaaggcaacaggacagtcttcttccccgcccacttgcagacgtaatcatgcgtgaacacctcgtcgtccatcgaccagtagagcaacacggtccgggcctccttgaaaaaatccgtctgttccaactccttccacaagggacgagacatctccaccttttgttccagagaatactggcttttcaaaactttaacttgttttcgcaattcttttttatccatggtaaacaatcttccgaatctttattcattattttgcgcaaaaatcgtacttttgcagcaataaacaaaacaagctgccaaagagttatcagatatatttggacgcttaccaacaatccatcccgtcaagggatacaacgtgcagaattatgaaaatagcgatacctcaaatcaactaccacatcggagatatttccaaaaacagggatcttattattgctgccataaaaaaggcgaaagccatgaaagcggaactcgttctttttcccgaacacgccatctgtggggcttacccgcaagaccttttcgagaaagaatatttcgtgaacgaatgccgtatcagcattgaaaagatcgccgagcaatgtcataacatagcggcattagtgggcggcccgaacctagacttggaagatggcatattgatgaacgccatgtttttcatgtacgacggggaagtgcgaggcggggtaaacaaaaccatattgagcgactacgacgttttcgacgagagccggtacttcatcccgggagaatccaacacgcccctacgctacaagaaccagaatatccgggtaatcttcgacgagtacgaatccaacatgatcgagaagaccgacacgatcatcgtacatgtcggttcgacacctttcaccacggaaagttttgcttaccggaaagaaagtctatcatacatcgcgcgtaaacagaaatgcccgctcatatcactcaatcacgtgggagcgaacgcctccctgatatttgacggaaactccttcgtggtcaacagtaaagggatttcaacatacaaattagccgcgttcaaagaagatttcatggtcatcgacacggaaagactgcttaatgccccggccctcaaagaaaaaggaccggataccattgctcttattcacgatgcacttatcctcggaataaaagatttcttccacaaaaacgggttctcgaaagccgtactcggactttccgggggaatcgattcggccctcgttgccgcgttggctacagaagcccttggaaaagaaaacgtgctgggcatactgatgccttcccgtttctccaccgaccactctgtcacggatgccgttgatctggcaagaaacttggggatctcacacgaaaccttacccataaaagaaatatacgacaactttatcgccacactacaccctgtcttcaaggatgctcccttcaacgtggccgaagaaaacctacaagcccgtattcgcgggtctctcgttatggccatttccaataaattcgggcatatccttttgaacacctccaataaaagcgaggcagccgtgggttatggaaccctgtacggggacttgtgcgggtcactttccgtgctgggcgacgtgtacaaaaccgacgtgtacaaattatcccgttacatgaaccgaaacggggaattgatcccggagaataccatcacgaaagccccctctgctgaactgcggcccgggcaaaaagatcaggactccctaccggattacgacacactcgacgctatcttgaaactatatctcgaagaaaatagttccaaacaggaaatcatagcgaaaggattcgccccagaaatcgttgaaaaaacgataaccttggtcaatcgtaacgactacaaacgggcacaatgcccacctatactgaaagtcagtaaaaaagcgttcggcagcggacgccgtatgccacttgttgccaaactataacaccagataagagaacgagtttatgagaacgataaaagacaaagagttacacgaaaaatattgcaacatttgcattgatagtcccaattccctttttgcaagtcttgacgaaagtagcaaaagcattattcgccaaaccagcatttgcaaaatgtacaggaaaggagacttgatttacgaagaagggaataaacctttcgggttaatttgtctgatcaccgggaaagctaaaatcgccaagaaaggtatcgcaggacgggaacagatcgtgcgtatggcaaaacccgtcggattcatcggctaccgggctttctttgccgaggaaatgcacatcgcatcagcggaggcactcgaggaatccattgtctgcatcatgaaaacagagcttattttcggtatcgtgcgcagcaactcggatgttgccatgaacgtgatccgggcgttggctaccgacctcggattctcgaatcgccgaacagtaacactcacgcaaaaacatattcgcggacgtctggctgaggccttgctcgtgctgaaagacacttacgggttcgaggatgataacatgacgttgaaaatttgtctctcgcgggaagatatggccaatctctcgaacatgaccacctccaatgccatccgcacgctatccaactttgcctcggaaggcatactggaactttccggcaagcaaatcaagatcacgaacatggaagcgctggaaaaagtaagcgatatgggataattcaatcctgcaattgatcgatacaccggctgatggtttcataatcaaagccacgactcaaagcaaagcggaaaagctttgcttttcgtttatagggatcttcctctttcaggccccgattcttttgtttcaacagcgccagacacgtggcgtcactttcctcatcgggtaaagaggacaacgcctgttcgataatacgttccggcacacgcttttgccggagcatctgcatgattttcaactttccccagcgattaaaacgatgcttatcccgggcatacgcctccgcaaagcgagtatcatccaagaaatgattcttcaccaaaaactccatgaccgcggcaatatccttttcctctaactcccaccgctgtaactttttaagaatatcaaaactacaatactcctttttactacactgcccggcaacaatattcaacgctttcttcgcatccactttcgatgtaatttagaatttaaaatttccccgggctttcaccattctctcccgttcattaatatccttccgcaactcaacctcctcgtaccccatctcccgaagtaactcgacggtttctttcccaaaagcctcgttgatctcgaaaaacagcactcctccacgattcagatgatcacgaccgaatccggcaatcttccggtaaaacattaacgggtcggtatccggcacgaaaagagcccgagagggttcataattcaacacccgatcgtgcataagcgccttctccgactcccgcacataaggtggattgctcacgatcacgtcgaaaccgggccattcccattcctcgtaacgcaatatatcacgtacttcaaatttcacctccacaccatttctccgggcattgtcggcagcttgtcgcacggccgccggggaaatatccaccccacaaagccgtactcctttcaacaacttacccaacgacacgatgatacacccactccccgttccaatatccaagacactcgcacccggctgcacacccgattccacgatccacatcaccagttcttccgtctccggtcggggaatcaaggtttcgctatttagctgaaaatcaataccggcaaattccgtttctcccaatatatactggatcggtttatccgtttttaactcctccacgatttgaacgaatttatcgataaagctttttgctaaaaattcgtgttttttaagatgtatgtctatatttgtataatgcaacagcttgcaaaaggagagcgagcataaaacttttatttcatgctcggtataagtatcctttagcttctgtaatgcgtattgctgtaaatcaaacatcgtattcatggaacaaagatacggtttaattgaagattgaaaattgaaaattgaaaatttaattgcgtgaactggacgggtattgcgattgacattggcattgtactgtatattctcaccatcttggcgatcatatacacgatcatactggaaaacagaaatccggtacgtacacttgcgtggatactcgtactcgtgctggcccccggtatcgggctgctcttttacatctatttcggcatgaactaccggaagatcaagatgttctccatgaaaggcttgggcgacttcaagtggttgcaatacatgagcgaagaccagaaacaacgtatcaagaaagccgaattgttgaaaaaagaagacatggaggcagtgaaaccgttgatgacattactcctgaacaacagcaaagcccttctctcccggaataacacggtcgagattctcaacaacggggaggccaccttcagttcgatcttcaaggccatcgccaaagccaaaaaatacattcacctcgaatattacatcattgataaaggagaactcggagagaaactgaaggaattacttatcacgaaagccaaggaaggcgtggaggttcgcgtgatctatgatgacgtggggtcgtggaaattacccaaacgttacatcaaagagatgcaggtcgccgggattcagatctacccgtttcttcccgtgcgttttcccttgttcaccaacaaggtgaactaccggaaccaccggaaaatcgtcgtcgtggacggggacaccgggttcattggcgggttaaacttcgccgaccgttatctgcacggattacccggcatcggtatctggcgcgacacccacctgaaagtgaaaggggaagccgtcacctccctgcaagtggttttcctgtttgactggtactttgttcgtcaggaacttctactgaacaaggcggaataccttcccaacaagaaagtcgatggcaacgtggttgttcaaaccgtggcatccggtcccgatagcgactggacatccattcaacaagcctacttcacgctaatcaacatggccaagaagtacgttttcatctcgaccccctatttcatgccgggagaaaccacgatcaactcgctgaaaaccgccgccatgagcggcgtggacgtgcgtatcatgatcccgtataaatccgactcgctactcacgcactggtgtacacgctcctacgtggaggaactactggaagccggggttagagtatttcaatatcgtaaaggattcaaccacagcaaagtaatcgtcatggacggactggtatcttccgtgggtactgccaacatggacatacgtagtttcgaacaaaacttcgaagtcaacctcatcatctacgaccgcaacgtcagtcgccaactcggttccgattttctggacgacctgaaaggcagttccgaaatcagtatccatcgctggaaattccgcccgaaacgggataaaatccgggaatctctagctcgacttttcgccccgttgctctaaccctatacttcaatccctgttcagtcagagtttagcgagaaaccggcatcctctccctcatttccccaacaccctcaccctacatcaaaattttctccagcaagcaagtaaaacgagcctctaaaatccgtagctttgcagttataagaacaacaccattgaaaattgcaaatccctcattttcaattttcaattttcaattttcaattattatgaacgagatcgccgaaatcattaacggtactttacatagcgggatacccgtggaaatcacggaatacagcatagacagccgttctgttgttactcctgaacataccctattttttgccttaaccgggaacaatcataacggacacgattacattcgtacactatacaccgatggagtacgagcctttgtcatcagtgaatttcgagaagaattcaaccaactgacaggcgccaacttcattgtcgttgaaaatgtattgactgctttacaacagctagctgcccatcatcgacaacacacgcaagccgaggtcatcgggatcaccggaagcaacgggaagactgtcgtaaaggagtggctctaccaactcctagcaaacgatcacgccgtataccgcagtccccggagttacaattcgcaagtaggagttcctctatctctactggggattgatccaaaaaccgaaattgccattatcgaagccgggatatcccaaaaaggagaaatgcagcacttgcaacagatgatacagccaactattggcattttcacgcatctcggggatgcacacggtgaaaactttgcctccagagaagaaaaactagccgagaaagcacaactattcacgtcttgccaatgggtgatcgggcaaacaggtgaggcgctggaatatatcaaaacacgagtaccttctaccacctcgtttcttctttggggggaagacccgaaggctgacattcatgtaaaaacaatgaacatcgcacttggacacagggaagtacaggtaacattcggtaataagcactttatccttgatattccatttccggacattgcctcctacgaaaattgcatgaacgccgtcagcatattgctattaaaacaatattctcccgacgtgatcacctcacgggtacaacagctttccgccattgccatgcgcatggaaatcaaagacgggatcaataattgcacgctcgtgaacgactactataattcagacccatcctctttccaactggcgttgaatatactggcaacgcaggatgcctcaaaagagcgggtcgttatcctctccgatttcatggatacgggaaaagccggagacgacttatacccttctattgccgagactctccgccaagcaaatatatccctgttcatcgggatcggtaaacacttaagtgaacatcgtcatgatttttccgctaattcccgattctatgaagacacggaacattttctccgccaagaagaacgggataatttcaacaaccagatcatcctgatcaaaggcgcccgggcttttcaatttgaatacattgccggattcctgcaaaaacaatcacatagcaccatattggaagttgacttggacgctatggttcacaacctgaatcatttccggtcactgaccgatgcgcatattgccgtcatggtcaaagccttctcgtacggtagtggctcccgtgaaattgcctcgttgctacaatatcaccgggtagactacctcatggttgctttcgccgacgagggcatcgaattacgggccgcgggaattaccatcccaattgccgtcatgaatcccgaacgggaagcctttgacaacatgatcatgttcaacctcgaaccggagatctacgcgctggacattctcgaagatttcaacagggcgctaaataaacacgggatcaaacgattccccgtacatatcaaactgaataccggcatgaatcgttccggtttcgacgaacaggacctcccgcagttactggaatttttccaaacggaacgctccgtgtacatccgttccatgttctcccatctcgcaggaagcgacgaaaccgtgcatgacgagttcacgctgggacaaatacacctgttcgaacgcatgaccgaacgaatccaagcccaattcaactataaaatttggcgacacatcctgaattccgccgggatcgaacgcttcccacaataccacttcgacatggtccgcctcgggatcggtttacatggtatcagtgccacacacgctaacctccaacctgtaagtagttttaaaacctacatctcgtccattcggaatgtcccgacagaccaatccatcgggtacgggcgcaaaagttacaccacccgtccttcccggattgccgtaatcccggtcgggtatgccgacgggctaaaccgtcacttgagtaatcgtgtcggtaacgtgttcatcaaagggaaaagagttccgatcatcggcaacatctgcatggacacctgcatgattgatgtcacggacacgaatgccaccatcggggacgaggtggagattttcgggaaacatatcctcgtcaccgaactatcggagcaactgggaaccatcccgtacgaaatcctcacgggcatctctcaccgcgtgaaacgagtatattacaaagaataatataaataaaaacccttccctacattcttttcagaactgggaaggatttctccactgtgtatgtttacgagaagctatttactcttcataacgatcacctaaatacttgatcaacaaaacatctaactcagaacctctcaccccgtgatctataatacgtccttctttatccagaatcaaacagaaaggaactccttgtattttgtatttattaattacctcacctttccaacccttcaaatcacataattgtgtccatttcatattctcttctttcaaagcttgtttccaatctttttccttgtcatcgatcgaaacgctgatcatgttaaaggcatctttcccctttccataagcatcgtacacgtggcgcaagtgaggaatctccccccgacacggaccacaccaagaggcccaaaattctaccatgttatattgacccggtttcacgtaatcagacaattgcaccgttttaccgttctcatccaccaactccagatccttgtacttttctcctaaagcgatcggggcgatgctttccaaactctctttcaattgcttataccccggtgtttcacgcaaggaaggatctatagtctgcaacaaattatccatatctgcttttgagaatttcgcagtataaaccatattctgtgccacatccacggaaaccggagacttcggattagcttttatgaaatcccattgaattcgggtaatctctttctgggcatcattcatttcccgggttaacgcaatcccctctcgtgtattaaacacaccctcacttgccgggatatgataaacctgcaaatatttatcccatgcctcactattcctagttcgataaggtttaagcttttcttgataactcaagaataaatcatgcaccggcgaacccgttactgtcacgtttcctttcacttttcgccgaaaactgttacgggaaggcaaagaatcaatagaaggactttcatactttatatccacgttatccacaaacacatccgatccccgcaaatctttctcatatgattcgaccttatccggagataaatcaatcaacaactgatagcgtgtcggaacatccactttcccagtcaaaacgaattttccccctttcacgacactcgaatccaccggagtgttccaattatataaatacaccttcattccatcaggtgtgccgggaacagaaccgctaatcttataaccgggttcccgctgacaggcaaccaacgttcccaaacaaacaataccatacaataatcttctcatacc

SEQ ID NO: 119 - DNA, 10452 bp, Butyricimonas faecihominis
ggtctacagtagaagtaataaataatgaaattatcttgactgcggtgaaaaataaagcttttccatttattcgttatcaggtcggtgatgtatcattgggagaaaaattgattacagaaaaatgtaaatgtggaaggactttgtttcgattgaaaggaatatctgggcgtaacacttattttgtaaaagatatcgatggacgagaagtatctgttatgttatttacttatccatttgattcagattataacattttgcagtatcaggttgttgaagagaatggtgagttgagagtgaatttcattacagacaaatatacgaaagaacaattaatagatttgtatatgccattcattttatcgaaactcaaacgtccggttgattttatggtaaatcaacatatatataagttgcctaatgctaaggtaccattattttacaaaattagccaatagtgtacagtaaattatgattgttaaaattagaaattttattcgttggattgtcattattgttaggcattttatttatcgcacattgtttaaaatggatataaataaaagtgctagattatcttttggagcgaagttagataagacatatcctatagggcttcatattggagcggaaagttatgttgcaagtggtgctattatttttacacatgattttacacggaatattcatagccatacctatataggtgaaaagtgttttattggtgctaacagtattattatgccaggaattataattggagatcaggttattgtaggtagcggtgctgttgtaacaaaagacgttccttcaaattgtatggttgtgggtaatccagctagagttataaaagaaaatatccgaactaaaagattcggtcaattaataagttgaatatatgttagataggaggattttattaaatggggtaaaagttcatccttttatttcgggagaagaattgttggcttatgcggaaaaggaaaaaggaattcttattgctataaatgcagaaaaaattcttcatgcgacagaacagactagggagattataaatcggaatatcgggtattgtgatgggatgggggcagtcatggcaatgaagaaaaagggctacaaggatgttgtgaaaattccaggatgtgagttatggttgaaaattatagcttctttatatcaaagtaataagtcattttatttagtaggagggaaacaagaagtgattgagggaaccgtgaataaattgaagaatgagtttgagggaatacagattgttaattatcgaaatggctatattcagacagaagaggagagggaagctttgattgaagatgtggtaaagaaaaaacctgatgttgtatttgtagcaatgggatctccgaagcaggagctattgatggaagaaatgttggagcggcatgttgcgatttatcaaggattgggtggaagttttgatgtttatactgggaatgtaaaaagagctccgaagtggtgggtggatcatggtttagaatgggcttataggcttgtaaaacagccttcaagaattaaacgacaagtgtatctggtaaaattcttattacttgtaaaattgggtagaatatgagtaaggtacaagttattgaaggggagattttcaccgattatcgtggattgatatcttctttgaatgattttgatttcgagggggtggagaggttttattttattcatcacccggatgcagatgtggtgagaggatggcatgctcatcaattcgagaaaaaatggttttattgcgtgaagggggcattcacgatcgggttggtgaaaattgataattgggaacacccgagtgagaatttgaaagcagaaatatttcgtttgtcagaggcgaaaagtgagattatctgcgtgccggagggatacgggaattgtattaaggcggaggagccgggggcggtattgttggtgttttcggggaaaaggtacgaggaggcgttggcggatagttggaggtatgataaggatttgtgggtggattgggagaggggggaagctagaaggaagaattcgtgatccggttaagttaagatttaaatatttgattaatatgttaatgttaggccgcgggagaagagttcccgtggtttttttataaattaaaatgatgtgattatggaacatttattgaaaggacagttatttttttggttgaaagagggtgctcgtgaaatgtcggacgagcaaatagaagagatggttcaagattttgtgaatgatttggtgaaatgggacgagagtgtgggagattatagagaggtaactcgaggtttggagagtcttcgtattcggttgcaggtttgggaagaggtgtatagaactggtgacgggactggaaaaaaaggctatagtgagtctatgcctgcatgccctaaaaggacgggtggagcacgagattcggttggtgcgagaacgacaggagaaaccggaatggtttgccgggaattcggataacgagccgttgtcactctggacatcgaacaatagcaagatggagattgcggaactgatgctggggatttacttggcgaaggtgttgcggacaccggatgggatggtgatggagtatcgagaggtgatccggttggtcgaacgtgcgttcggggtgaagatttcgaatcaccgggagttgaaacgggatattttcaaacggacgcacgagctggtgatattcctgaagcggttgatctttttgattgaacaggaacgggataagaaagatgcttaatagggagaggggcgtggtaaaaactttaccacgcctttcgtttataaagttgaaccattggttctgaaagttcataaagtcgagctgttattttgaaaagaaattttcctacctttgtaaaggtatttacaaaagaataggagaatggcaataaagcagataaatatagagggaatttggggtggaaagggtgatatacattgggataatatacatccggatgtaaatattcttgtcgggagtaatggatcagggaagagtactttattgaatattctgcgatttttgttgttgggaaacacaaaagaattgaaagaacttgttaaaaacgtgactgtttgcgtgggtgaaggtatgatccgttacgaggtttctgaaaagagtgtgttgtgggaaacgaaaaatagtttcgacgtatattacgtgaatacttttgatattccatcggcaaaaaaaagtgcccaatctcaattgacacaacaactggacatgctgttgtaccaacgtcagaaagatgtttattcttttacggattatcgtttggagacaacgacccggccaagagaaaacgtgagtcaagagcatatacatgatttcttgaatattataaatcgtttttttgcctccactggtaaaacaattcatattaatgaacgaaacgagattgtttttgataaaacaggagtgatattaactattgagcagctttcttcaggagagaaacaggtattgattcttttatttaccgttttcttgatgaagcaacaaacagccgtgttattgcttgatgaaccggagatttctttgcacatggactggcaggataagttgattgaaacgttgtttgaaattaatccgaattgtcaggtgtttttaactactcattccccgaatattttcgcagacggttggggggataagctggtgtttatgggtaatatattgacagagagatgaccccggaggagtaccaatttcggcaattggaagctaagcgatataaagcttctttatctttgtctggccgtagggcagttatttacatggaagataagaatgataaagagttttggagttccgtgttaaagcattacaagccagaagccacattctacttcgtgtacggttctagaacatcgggaagcgggtgccaacagtgttttaaatataaagattttttggacgagaaattccttatagccgtggatagcgattttcgctatttgatgcaagaaaaagagatttctgccatgcattacgtgttgcaaacgtacacgtattcttttgaaaatcattattgttataaagataatctgcaaggtgctttacgtcgttcttgtgaggatgattctgtggatttaatattttcatttcctcgttttgtcgaagaattttcggagatcatttatcctttattcgtgtatttgttgcattgtattcgtgtaaataacaagaattttactcgcgaggaatttcgtgacgtgttgagcggtatgataaaagtagatgggtctattgcggaaaatgggaaaaagatattggatgttcttcgtgaaagagtggagattcaattagaacaaatcaaatcaaaagagaaaactttttcgtcggaaacagaggcgtatttgcacgaagtgcttggtttaaataagaaaactacttatctgtatttgcgggggcatgatatgtttcgtattttggtgtcacaagggcgtgaggttgtaaaatcacatattcgttacgaaaagcaaaaagcgggggaagaacaatatagggttgttcttgcgaaacatcattcatttgaaaaggaattactttctaatttaatttattcttatccggagatagaaaaaatcggtaaagacatccaagatgttttgggataaaatttttcgctaaatttattcttgagacggttaatcttttgattgaacaggcattggatagaaaggataccattgttcataacttgtttagaattgcttggctgatttagttagatccgatttgcccgaaaggagtgtctaaatgtactttcttagactgtccctttctaatctctttttgttttcgtagttttgcatgataaaaccgggaaattggagtattgaagtgatcgtcattttcaattttcaattttcaattttcaattgttatgaatctggaatggtacattgcgcgtaggttgttgaaaggggacggcacgaaatccgtgtcggtgccgatcgtgaagattgcgattgttgggatcgccttggggttgtgcgtgatgttattgtcgttgtttattatcacggggtttaagtacgagatcaccgaaaaattgtcgggtttcacggctcatttgagcgtggtgccttttgtccccggttcgacgaatgaggggggagtggtccgtgaatcggagagtctggtgaaaagcttgaaagaggtggaaggagtgaagaacgtgtacgggtatatcgaaaagcccgcgatatttaagagtaaagaggagattcacggggtggtgttaaaaggagtagatgtggggtatgatgttgtttttttcagggagaatctgaaggaggggaaaatgcctgattttgaaacggaacgggcgtcaaatgaaatattaatttctgcatccgtggcggatatgctggaaatcggtgtcgggggaaaagtcacggcccatttcgtgcaggacccgccgagagcgagagtgtttaccgttgccggaatttacgacacgggtttcaaggagtatgatgacgtgatggtgttggttgatgaacgacatctggcgaaattgaatgactgggggccgggggaggtttccgggattgctatcgaactggaggatgtggagcgattaaacgaggtggtagaggaggtggaaaatgtcgtgtatgatgcgagtggaaattacgaggtacagacgcttgccgacgtggctccgcaaatttttgactggttggcgttgttgaacatgaacgtgtgggtgatcctgattttgattgtcacggtggccggttttaatatggtgtcggggttattgattttgattctggataagactactttgatcgggatattgaaagcgttaggctacaaaaatgtttctttgagaaaattgttcctgtacatatcggcgggattgattattaaaggaatgttatggggaaatgtgctggcttttgttttggcaggaattcaggcgatattccgtgtgattcatctagatcctgtgacgtattatatggacacggttccaattaattttagtctcggatacgtgatattattgaatgtaggagtgatcgtgataaccgttttaatgttgattgtcccgacgatgctgatttccaagattagtccggtgaaggcgattaaattcgagtaaagttatgagcgtgaaaaatgatatatatgctattagagattctctattggattggttgaaggaacaccgacatggtgtgatgggtacggtaatttttcatctcgtgcttgctatctttttggtttgtgtcggaatttcacgtttggattcgcaacagaggatggaaatcgagattgatatgccggaaccggaaatcgttcagcaaaagcaagaggagcaaaaaaagaaggagcaaattctccaacaaagcgctgacgaggaggtgaacgagatgttgcgttcgttggcggtgaacgaggatgccgtgaagaaaaatgctgaaacccagcctcacgaacgagtagaagagtatattgaacagattcaggaggagattgatagtgattatgggggacgttaccgggcgaataaaaacaagcattacaaggaggatagtattcgtgtccagcgggataagaaggaacggatgttggattcactccaatccacggtttacgtggggaagagcagcgtgtcatataatataaaagggcgttacaagacttatctgccgattcctgtttataaatgcgaattcggtggaaaaatcgtggtagcggtagtcgtgaaccggcaaggacgggtcattaaggctgaggtggtggatgcggagtcgaataaagatgattctttgcgggaggtggcagtagatgcagccttgaagtcggaatttaacgttgacgagaaggccccggaacgacagacgggaacgatcacgtataattttgtcaaacaatgacacggtttgtttcttctattttttcccgctttttcagattgttatatccccgcacgtgtgtggtgtgtggcgatgttctggttgatggtgagctttttttgtgttcagcttgtttaagcggtttgcctttgaacgagggagttgatgaggaggcggacagggtgcttacggatgatttgggaatcgagcatttatactggttgttccgttatgaccgggcaagtgattttcataaattagtgtacgccatcaagtatcgttccaaccgggaattgggcgtgtggaccgggaaaatgttgggagagcggatgaaagatgttcgtgggattgattgtattattcccgtgccgctacatcccgaaagggagaagaaacggggttttaatcaggcttttctgattggcacggggattgcaagtgttttaggaggacggatcgagccggaagtgttgaggcgagtggtaaacaccccttcacaaacaggtttggaacggggacaacgggctgataacgtggccaaggctttcgagctgggaaatactactcgggtggagggatgccacgtgttgctggtagatgatgtcgtgacaagtggagccacgatccgggcgtgtatgatggaattgagtaaaatcaagggagtacgggtaagtgttgcttgtttggggaagtccggcagcatctaaaaaaacttgaatcttaaatctaaaattgaaaggattttagctttttttccctagttttgtaaagttaatatttttgaggactatgaataaatttttttggaacggattctgttttgtcgctattatcgtggcgttgattatatatgcctgtgcaaacaggggttacccgcagggaggagagaaggacgtgactccccctcaggttatcaaggaggttccggaatctttttcaacgaatttcaagggaaaacagattgatatttatttcaacgaatatgttcaattaaaggatattaacaagaaattcgtgatgtctcccccgatgaagaagaaagcccgggtgagcttgcggggaaaatacgtgcgggtgacgtttcaggattctttgaaaccgaatacgacttacacgctggactttgccgacgcaatcgtggataataacgagggaaacccgctcggtttctatcggtacgtgttttccacggggccgcaactggattcgatggaactcgggggacaggttattgatatgcaaacgcagttgcccgtgctgggtgctaccgtgatgttctaccagaataccgcggattccgtggcgttgaccgatttgccgagttacgtggctaaaacggatagtgccggaatgtttcgggtgactaatattaaggatgatacctatcgggtaatggcaatcgatgatgcgagaggaaattatttgtttgtgccttcagagacaaaagtgggtttcattgattctttgattcagactatatcgttccccacgacagtttatgatacgattcacccggacacgacggttgtcgagggacggagaacgaagaagggaatggagttcaaagtggtgtcaaaagacacgattgtccggcgtgatttcaccatgttcggacctacaaacttgtttatcccgatgtttgacgaggaaaagactcaattgtatctggttgatgaggctcgtaaggagcgggaacgattggattttactttcagtatacctgctgataaccagttgaacgtacgattgttaggggtacatctgttagataagattgatcaggatgattggtatatcgaggaacgttctgccgggagggatacgattcagttgtggataaaggactctttggtgtacaagatcgattcgctcgtggcagaggccagttatttgcggacggattcgcttggtaaacgagtgttgcttgcggatacgattaaattctattacaaggacaaaccggagcccaagggtaagcgtaagaaggaacaggattccattccggcaattaagtttatggagattagcgcgggggttggtagtacggtggatttgaataagaatatcacactggaatttgatcgtccgatcgtggaggaggggttgaagaatatccaattgttggaaatggtggattccgttttgaccccggttgactttaacttgaaacatgatagtctgaaaattcgtaggtattacgtggagaaagaatggaagccggaaacggaatatcagctgttgatcgattcgatgggaatatatagtatttacgggttgtataacaacaagctcgtgaaggattttaaaacgaaagcgatcgaggattacgggaatattatcgtgaacgtgaaggaggctacaaccccgattatcttgcaactttatcagggcgataaggagatcaaggtgctggaagaacggacgatcaagggagatgggaaggtcatctttgattacttgggagagggaacttatatgatccgggctattctcgaccggaacggaaacgggaaatgggacacgggtaattacttgaaacatttgcagccggaagagataaaatatttgcccacggagataaaattgaaaaagaatttcgatgtcgagcaagactttgacatgagtaaaacgtataagagagaagatccgagtaaaaagaagaatacagaaggagataaaaaaagaaatagaactaatcgatgagaacgattatattgatagttacattgtttgtgagccttcctgccatatcgcagaagaagttgcctaacgtgatagagaaactgacttacaggggctattacaactggagctttatctggattaacgcgggttcggtggaaatgaccgtacagccttccgacaagtatccgaatgcccagtgtatatttgccgtggggtattcgaatccttcgtgggactgggtgttcaagctgagagatacgttgatatcgcatcatgatagcatgacctataaaccttacgagttttcgagaaaagcgcacgaggggaattaccataaaacgttcgattacgtgtgggattacgatagcggggtgatccatgctgatatacaccggatcggaaaataccaacgtaaggatacgattaaattgttgccggacacgtacgatatgttgtccgtggcatggtatgcaagggaattggattttgataactacaagaaaggagaccagatcccgatacgtattctactggacgataaaatatatgatttatatgttcgttacttggggaaagagaaagtgaaaacggatagcgggcggcggatgtgtcacgtgttttctcccttgctcgtggctggtgacgtgtttaaagggggagagaacatgaaggtatgggtaagtgatgacgagtatcgtattcccgtgatggttgaggccaagattatcgtggggtcggtgaaaggtatcttggatgaggccaatagtaagttttagcaattgaaaatgcagaattgaaaatatgctgtgtttttgattatatatatcgttaggaaggggtttaattaatattgtattg

SEQ ID NO: 120 - DNA, 10428 bp, Butyricimonas faecihominis
tttctttggctcggaaatttgtataagagacaggtgtaaaggtaattattgttagtaaaaaagtaggcgttgttattaaaaaattgaataaaaatgggggacatattctttttaattgtatttttaccacataatcgaaaaacgtggatttatgtcaaaaattatagctatcgcgaaccaaaaggggggtgttggaaagacaacgacgtctgtaaacttggcggctagtttggctgtactggaacagaaagtgttgttggttgatgctgatcctcaagggaacgcgacaacgggagtgggatatgatttaaaggaattgaaggcgactatctacgaatgtctggtggacgggttggagccgaaagaggcgatcctgaagacggatattgagaatttgtttttgttgccttccaatatagatttggtgggagccgaattggagatgttgaatttcgaggagaaagagagtgtaatggcaaaagtgttggcaaaggtgaaagatgactacgattatattttaatcgattgttcgccttcattgggtttgttgaccgtgaattcattggccgcggccaattcggtgatgatccccgtgcaatgccagtattttgcattggagggattgggtaagttattaaatacgatcaagattatccagaaacgtctgaacacggctctggaaattgaaggattcgtgctgaccatgtatgacgggcgtgtccgtctgtcgaaccaagtggtagccgaggtgcggaaacatttcgaggagatggttttcgacacgttgattcaacagaacgtgaaattggcagaggccccgagttacggacaaccggttatcctctacgatgccgagtgtcgcggttccgtgaattatttgagtttggcaaacgaattgctggagaaaaacaaaaaatagtttagaatttagaagattctgtgattgctgattcaatgattcagtgattaaaaataggtggaaatagagcgggagggaaggaatcacttaatctgaaatcattaaatcactaaattgataggatctaaaattaataagagatggcgaaaaagagtgcattaggtaaaggattgggagcgttattgtcggatgcggcagaggaggcgaagccaagggggacggtttcatcggcgttacaggaagaattgaaattgagtgatattcgcccgaatccgaaccaaccgagaaccgttttcgatgaggaggctttgcaagagttggcttcttcgatcaaggctatcggcatcgtgcaacccatcaccgtgagagaagtggaagacgggaagtacgagattgttgccggggaacgccggttccgggcatcgaagatggcagggttggaaactattcccgcttatatccgtaaggtggaagaagaatccgtgcttgaattggcattgattgaaaatatccagcgggaggatttgaatgctatcgagattgcgatttcgtacgagcgtttgattgacgagtgcaacttgacacaggatgcgttgagcgaacgggtaggtaaaaagcgaacgacgatttcgaattatttgcgtttgttgaagttgcccgccccgatacagttggcaatcaaggaacggaaaatcagcatggggcatgcccgtgctattattaatatagaagatccggaaacccagtacatggttttcgaacagatcatgaaatacgatttttccgtgcgaaaagtcgaggaaatcgttcgggagttgatgaaaccggaagaggaaaaagagaagaaggccgagaaaaagcgtcagcctatcgaggactacatggagttacaaactcatctggctcgttattttgacacgaaggttgacttgaaacggaacgagaagggaagagggaagatcgtgatttcttttaaatcggatagcgatctggagcgaattgttgagttattggataaggtggataagaaataaactttgtagtgagaagtattttagtgaaaatagttttgattatcccggttttgcttatttgtacgggagtaacggcgtcggagtatcgttcggatttccctgtattcttgcaagacacgatcattcacacggattccttgacgttcacgggaaaagaggaagtgttgaaaagtaaagcgagaaaaagagataatggtaaaccccattccccgcatcgggcaacgatcatggcgatggtactaccgggttccggacagatttataaccgtcaatggtggaagttaccgatcttgtacgggggtattggggctaccgtgtacgggttgtcgtggaacatgaagtattacaagaaataccgtacggcattcgtggattacacggcttatttgaacgctttggaggctgatccggaaacgccttacccggctaattccagttgggataaattgatgttaccgggtaaaacggctgaaaaatttcagccggagatgcgaaagcgtttacaggagcagttaaaaacaaagaaagataattataaacggaatcgggacttattgtatatcgtatcgggtgcaatatacgcgatacaaattattgatgctacggtatttgcccatttttatgatttcgagattaacgacgatttgtcgatgaatcttcgtccctcaaccggattttctcccgtcagcgggggaaccgtgggtttgacattaacttttaatttttaaaggaataaccatgcgttttgtgtttttgtggctatgtgcgattttattttcaggtgtagtatatggtgagagtgatcgggattcgttgaaagtacgattgggtgcgccccggctaaatttaggggcgccggtgttgctgacggattctattccgggtgcatttatcgaacgattggatgaattatacagtaaatggtacgtttccagattgggggaaggtaattatgtggattcggtgtacctgactgaaatggtgaccgggccggctgttccggattcggtgtatttacaacgtttggataaattaaattcagcgataaagctttcctataacgatattgtacggaattatattgaattatataccgtgagacgtcgagcccaagtgggaacgatgttggggttgagttcctattatttccctatttttgaagaagtgttggatcgggagggattaccgcaggagttgaaatacttgcccgtgattgagagtgctttgaacccacgggcattttcccgtgcgggggcctgtggcttgtggcagtttatgtacggaacagggaagatgtacaagttggaaataaattcttttattgacgaacgtcgtgatccggtaaaatccacggaggcagccgtttgtttcttgaaagatttgtataagatttacgaagactggattctggtgatcgcggcttacaactgcggaccgggtaacgtgaacaaggccatacgacggtcgggaagtaaaaagaattattgggatatttatttccatttgccgaaggagacacgtggctacgtgccggcttttatcgctgccatgtatacgttcaattaccataaagagcataatatttttcccttggagaatgagttgcccacgatgtgtgacacgatcatgatttccgatgccttgcatttcgagcaggtggccaaattgatggatatatccgtggaacaaattcgggatttgaacccgcaataccgttcagatatcgtgcctgccggattcgggaagagttacgctttgcaggttccttataatcatgttggagagtttattgataaacaagatacgatctttgcttataaccggacgacttattttaatgatagtgaccgtacggccgatccgaagaatcgtttcaagaaatacgctcatgcccatgctgtccctagcaataaagccaaattggtttacacggtgaaaagtggggacgtgatcgggaagattgccgagaagttcaacgtgcgtttatccgacttgaagtactggaacgggatgacaagagaccggatcaatatcgggcagaaacttacggtttacgtgccgaataataaggtagactattataagtctaaagtgaatgccaagtatgccgggattgccgcaaatgcggaagtcgaggcagaacctttaacagaaggcgagttcttctactacacgatcaagcgaggcgagaatctgtggtcgattgctaagaaatatccgggcgtgtcgaaccgggacatcatgaaatggaacgggttgaccgaccgatcggcaaagaatctaaaaccgggacaaaagttaaagattaagatttaataatagagaaagtgagattttatctataaacagtcagaagaaattccttctgactgtttttttatgagattgtctcatttttgcggattggaaattaggtgatttcaatcttacaatgacgatgggttatctttcagtaaatacgagagaggtgatattttgtataaaaatagttataaatttcactatatagcatttgtttagtgaaatatattgtacctttgtgaaaattataggtagaaattctctataaaagttatgaagatgggtgtatgtgtaaaattgaaaatgcttgtgagtgccacgtgtgtggttattctactagcgatgatagggtgtaagaaggagatgtatactcctgatgaacctgtggttgatcccgaaaacgtgtttgatttctcgacgagggaaaaatacacgttgcatgtaaaatatgatgttcctgaaaattataaggtgtattttgaagtgtacacgaaggatccggaacagttagatgccgatgggcaagtggtgaaaagagatatagagcctgttgacgtcgggtttacggatggaaatggggaatataatcataaaatagaggttcctgcaacggcaaaatacttgtatatttatagtccttatgcaggagtgccacgagtgttggtagccgaaattaaggatggagttttgtcggaagttgcctatccggacgagattgaaggggcgaggtctatgcttgggcgtgccgatgatggcgattataaaaatgaggcttacaatacgattacagggaagaaattgagccgtttgggatattggaagaacgctaaaagagcttattcattgaagggggtcacttatgatctttacggacgtccggattatacgaaggtgggagaccggataaccgtgtcaagagatatattgaacttgataaatcagacggtaccggaaggtggaaaggtggacccaagcttaataagaaatggggatatacgtgtgactaaaaaagcgcatattgatttatttttggttgatgagacaacatctgccaataatacgttggcttattattgttatgaaaccaataatcccccgaagaaagaggctgatattaaagtaaatgatattgttattgcttttcctaatgccaaggttttgaaacgacatgattatgaacctaaaggaaataatggtgcattggaaagaggggaaggagttcgtttacattattataaagacggaaaagatatgggagaagaattcccagaaggagtttctatcggttggattatttataatcaggcttataggacagctgtgaatggtaatgctttgaatactggagtaaaacactattttgcggataaggatttgaatggaaacggaaaagggaatgtggttttattcagaagtggggaaaaagtgatgtttggttttgaggattggaatggcgattatgattacaatgatgttgttttttacgtgaaggcagatccgatagaggcgattactccggatatacctgatgtgaaaccgacggatccggatgattcggatattgttgcggaaataacttatcggggaatattgacttttgaagatttgtggccataccggggtgattttgatatgaatgatgtggtggttgaatacgagtcgacagttggttacaatcgggcaaatgaggtgcttcgcacgattgataattatacgatattgtggtctggagctagttatgataacagctttgcttatcaattggaggcattacgcggagaggtggaagtggagatttcttcgtctttgggcggaaatggaggggctttcgtggacccagaagttgatcgtgctactattcgtttggcgaataacgtgcgggcatacgctaatgaagatgaaaaggtgacattcaaggttgtgacgaaatacaccggacgtaagattaacaaggaggatttcgtgttaccaccttataatccttttatcacgacaaattcattggataaagaggtgcatttaacaaatatgcggccgacagagaagttgaataaggacaatttggggtatgggaatgataaatcggatccgagttccaatctttattatgtcacctatgacgagaatggccaacagatgccatttgccattaatatcgcttatgagcgcaaagaggatttgaatactttcgtgatcccgagggaaagtaagcatattgatacttattatccgaaattcttaaattgggtaaagacaaaaggaaaagaagatgctgattggtatttgcattctagtaataaataaaaaaaactccgagatttctcggagttttttattcttatctgcgatgtaacaaaacaatgttttccacgtgatgcgtgtgagggaacatatccacggcttgaacggccatcacttcatagtctgcatccatgagagccaaatcccgtgcttgggtggcagagttgcagctaacgtaaacgatacggtcgggagccgcttttagtatggtgtccacgacgtctttgtgcattccggcacgaggtgggtccgtgatgatcacgtcgggatgaccgtggcgacggataaactcttcgtttagcacgtctttcatgtctccggcgtagaataccgtgttgtggatattgttgagtgccgaattgattttggcatcttcaatggcttccgggacgtattcgataccgataactttttgggcattgcgagccacgaagttggcaatggtcccggttccggtgtaaaggtcgtacacggtttcatttccggttaatcctgccagctctcttgttttggcgtacaggttataggcctgttcggagttggtttggtagaaggatttcggaccgatcttgaattttaaatcttccatctgttcgaagatgtggtcgttcccgtggaaacagatcacttcttgatcggtgatcgtgtcgttcatcttttcattgatgacgtacattaaagaggtgatttcggggaattgttgcacgatagcattcagcaagccttctcgatcctcccgattttcttctccaaacgtgacgatgaccataacttctcccgtggaagaggtgcggatgataagggtacgtaggaatccgacctgttcccgtatatcataaaaactgagttcatgtttgatagcatactcccggataaagttacgaacgccatttgaaggttcggcttgcaaataacatttctcaatatcaataactttgtcaaataaaccggggacgtgaaagcccacggccggggtacgatttatatcttgatcattagcaatttcttcccgagtcagaaagcgcttgttgcagaaggtatattccaatttattccggtaataggtggtcttgggagaaccgatgatcggggccacgttttgtagttctactttaccgattctttgcaggttgtcgatgatttcctgttgtttgaattctgtctgcaattgataaggcaggttttgccatttgcatccgccacatattccgaagtgcgaacaaaagggttccgtgcggatatcggagtatttccgtacgttaacaataaagccttctaggaaacttttacgtttccgggtgacctgtacgtcaacgatgtcaccgggtacggtgttcggtacgaataataccttttcatccacgtaagcgatggattttccttccgcggctattttttttatttcgatattttccagtaagggctttttaccacgagccatattaattttagattttaaattttagatctgatcaatgaagtgatttcatgatttttgattaggtgatttagaatcgcagaatcgttcaatcggaaatcacctaatttatttgtttttcagtttttctttcaggattttgacaccttcggaggcgcctttttcaatgaactcgatcttactgtttttgacactttccggaattttcgggtcgatcaacaggatgcgacaaccggcatgtgcatagtgtaacaggctggcagccggatacacggctagcgaggtcccgatgatcacgagaatatcggcttgttgaacgagttctatggccggttcgatgttcggaacggattctccgaaccaaacaatgtgagggcgcaggatagaaccgtcctcggctttggttcctagctttaattcccaaccgtcaaggtcgtatattaggttcgggttccggctacttctgacttttttaagttctccgtgaaggtgtaatacgttagtacttccggcacgttcgtgtaagtcgtcaatgttttgcgtgatgatccggacatcgaaatctttttcgagttcggcaagcccgtaatgcccggcgttgggttttgcctcgtagagttgtttccggcgctcgttgtagaaacggttcactaattccgggtcacgttgccatgcttccggggtacaaacgtccattacattgtattcttcccaaaggccgtcgctgtctctgaaggtacgaattccactttcggcactcataccggctcctgttaaaacgactaacttgttcataatcagattgtattttaatcattgaattcgattgcaagttagataaaaaaactctattttcgtaactttcaattttcaattttgtacggtatgacttttggtatagcggatttaagtgttatccccatgcgacgggaaaaatcggaacggagcgaaatggtttctcagttgttgttcggggaggtgtacgaagtactggaggaggaggataaatggcttaatatttgcttgttacatgatcattgttgtggatggattgatcgtaaaacttacaaagaggtaagtgaagagtttgcggaaaagtaccgggcttccgatcaattgatcatgagtgaggtgtttaatctggtggttaaaaaaggggattgggagaacaagatggtcgtggcggggagtgtgttgcctttctacgatgcatatacaaaaaaattgatgatcggggatgaggagtatgtcgtgaagggttttttacgggaagtagggattgaaagtctgcgggaattattgattcaatatgcgttgatgttctataatgctccttatcgttggggagggcgaactcccaatggtgtggatggtgccggattggtgcaaatggcgtatcgtttggcgggaattaccatcccgcggtatatcgagcaacaagccggcgaggggcaagttttgtcttttctggaagaagcacaaccgggagatcttgctttctttggggattcttccggtgctgttactcatgtcggtatcttgtgggaacaggggcgaattatccatgcctcgggaaaagtccgggtggataaaatcgatcatcacggtattttcaatgaagatttgaaacgttacacgcacacgctgaaggtggtgaggcagattttttaattcgctgaagacgaattaaaaagttgcaggttacaagttcttcttcaatctaaaatcattaaatcataaatcataaatcataaatatccttggctttccgggcccatgttgaataataggtcgaggatgctgaggttgggggcgaaagggaatctttcggcaaaggtttggtggtaaggtttggcgacgaaagggtcttctacacggcggcgggaaggtttcgggtgaataacatcccgcaagtctgtgagggtgtcgtatgtcgggtaatagtctttcgtgagtttaatcggacgttggagttgcaggttatccatgagctcttttagaattttggtattgagatccaacaggaacttctctttccgttcgaagaaatgcatgaagttgtcgatatagtaatcgtagtaaggggaatttttgtaggcagattctattcctttgaaatggagcttctgccagttcgtggagtagtcaacctgcacgtctttggttaatatctttatggatgaacctttcacgactggtacggataacgtcatcacgccattggctgtcatgatgtcacatcgatttcgatagctttgtttaccatagctttcgtattgttcaatccatatttcagtgcaatcgtgtatttttgtaaagtattgaactggtggaaagtatgccgtgttaacaagtatattgctcatgatccatttatattagccgggcaaagataagaatttttcaatgaattgaaaatctgtaatattttgtat

SEQ ID NO: 121 - DNA, 10421 bp, Butyricimonas faecihominis
gttttgggataaatgtgtctttctaaaaataggtcgttatgaaaaagtaagtgtatatattctaatcttgttcttgccgtggtttttgtcggcttgtgatgattatttgaaggaagattccgatgatttgttaattccttcactggtgaatgattatgtcccgatattattgggagagggttatccggatgagtttgcgtcccagatcgaatggattcatctgatgacggatgacgtggagatgggcccgttatattatgacgagtcgatgtataacaatagtaaggtgacgtttattgacgatttcgatcccggcatggattacggggagatggtgtacacgtggtgggcggattattcccagtatatcacggataatttttgggatgcccgttacaagaatattctggcgtgtaatattatcgttgatgctttgccggacatgaagtacgaggcgaatgaatacgggacttattgcaagctggcggcacagacgtatgctttacgggcttatcattatttttgtcttgtaaacacgtatggcgcaccttggtcggaagagaacaagaataagttgggtgtgatcaaacgtacgtccccggtcgtggatgtcagcccgacggaacgggctacggtgggagagatttacgcactgatgaatgaggatttgaagaatgcggagaaatatctggagagcgcgagtacgaattacacgaaatgggagatcacgcctgcggctatttatttcttggcatcccgggtggccttgttccaagaggactgggaggaggtgattcgtacttcggaagagtttatcgatctaggtggcaatgaactctatgatttgaatgatgttgatcgggagacttgcggattaccgggagcttctggcggaacattctggattaaccagattgcgattgacgagacggtgtttctttttagtaagaatgataataagtttaattatttggcaccttttcaattctactcgtattacacgctgggattccatacatcatggacgggagacgatgcgttattaaatttgtacgaggagggggatttacgtaaagaggtttattttgcccggttgtttaaactgggaggaactcggttgagaccggagtatttttcgggacaggctcttccgatgaaatcggatccctatttatcaacgagtaaaggagaggctcgtgaatgttggcggagtccggaggtgtatctgaatttggccgaggcgtatgcccggaaggagaccggggtgagccaaacggcgattaattggttgaaccagttgcgggtaaagaagatttcccgggatatttatcaggcgaagaacgtttcggattttgcttctcgggaggatttgattcaatttatttgggaggaacgccgtcgggagctttgtttcgaggaggccatgcgtttctgggatatgcgtcggcaggggatgcccgaggtaaagcatgaattctattcttcgatgacttcgtcgaagacatttgtgttgaaacagggaagtccgaattatttattaccgattccgctttctgaaacggaatacaatgacgggatgacgaataattctagagaaacaattgttggaaattaaaaacaataaataaagatgaaaacgataaaaatggcgatatatatcatgttggctctattcctgtcgggaatggcctcatgtggatcggaagattcaataaacccgatgccggaattggggaatcctccttttgatttacctcgcggggaggagggctcattggaagagttgatttattccgtgtacgagaaatacggttcgttcgtgctgtacgattttgatcagacggagttttatactacttggaacgggcggacggtttactggtacgctcccgtgaaaagtgggagcgaggcttacgtgagacaaatagttacgtttatgcaggagaaagtgtttgccggttatccggaggcgtttattgctaagtttttgccgaagaaaatttatctggtagattctatatgtaaaacgtcttcttataataaatcgaatttggtaaacacgttagtgacgaataatcatggtttggcggtttcgaatgtcggtgtgaaaatggaatctttcacggatagcgattgggattccatgaattcgggaatcgtgacggcaattatgaataatatatataacacgatggaggttccggatgagttctttgctttggtgacgtatttggttatttatatgttcgatgaagaggagaatgccgacccggaaggggagtttgacgcttaccattatgtcctgtacacaaatggattcgtgggggcgaatgctttcattgattatggtttttttatgccgcataagtatggggaggatttgggggattatctttccttcttgatgtcaactccgaagagcgagatggatcgcatttttgcccgtttcgatattgtgaaacagagagctttcttgatcgctgattttatagttaaaaagatggagatggatccgattgccttacagaattcgttctgcccgaacgatccgcttcctgccggttattttgataaagaataaaatagatgatgatgagaggatttttaagtttgatgatgtgttgtctcctttgggggacagcctattctcaaatcacgtatgatattacgggagtttgggaaaacggtgccggcaggacgattagcgtgcggacgttggaagatggtaatgtcgagggcgagttcttggattcggtggtcgtgactgccgacgggacgtttgctttacgcgggaaagtcaacaagaagaaatgtgcgatgttgatgaatgcgaagaatggattccggatgatctttttggacggaaaacctttgcggctgacgattaaggagtccgagtattcatacaagaatccgtccgggccttacgtgttggagaatgaaacaagggatcaggccgcagcgcaagcgatgattcagttttggagtgatgattatatccgtaatttttctttgggagggttgggactttcgttgaagagagccgatactcggcaaaaacgggattctattgcccgggaaatagaacgagttacgaaagagcaacaggatcagatggaggcctttttgaaatcgtacagtgatagtgatgtagctccgttttttatcgaggtgaatatgttgaggatgatgtctttggaacaaatctccgcattttatgatcgttttacggatcgggtgaaacagacggagaaaggaaaagagatgggagagcgtattgcccaattgaaacggttggctcccggtagcccggctcccgagttcgaattgactacccctgatgggaaaaagctcgcgttgaaggatttgcgggggcatatcgtgttgattgatttttgggcttcgtggtgtggaccttgcatggatgagatgcctaacgtgaaagctatctacgagaaatatcatgaccggggcttggagatcgtgggggtatcaatggataataataaggccaactgggagagagcgattgaaagagccggtttggtatggcatcatgtttcttctttgaaggggatgaatcgttgtccggtggctaaattgtaccaagtggtggccatcccgaagttgtatattatcggtaaagacgggaagattattgccaaagacctgcggggagaagagctgagggaaaagatagacgagttgtttgaagaataatataataaagcaaaatatgatgaaaatgttgatgagagggatattcatgctggcgtgttgcacgttggtgttgtcgtgttcgaagggtgtttcttaccggatcgcggggacttgggaaaacggggaagggaagaagatttatttgagtgagattgttgggaataaagagtttcgggcggtagattctgccgtggtggctccgggtttcacgttcttgttgaaaggaaacgtggatcgggtgcaaaagatggtattagtttataatacagacaagaggaaggagattatcgtggatggagagccgatgaatgtcatgtttgaggagactacgaaagagtggaaaggaaagcccacgacttcggtgacggtgacttgcacgggaaataaggaacaggagatcttggaaaaagggagtactttgaaaacaacgatttcctttatgcagttggggaagatgatggcagccagtcaagctgactatagcgacccggtggccgtggattcgttgaaacgagtgtttgcccttctggatagttctttgatggccgccgtgaataattacatggactcggctcgtaattcttatgcctcgacttatttcttcgagagtcatttgatggataactacacgtttgaagaagttcaaggtttctacaataagttgaccgaccgggtgaaacaatctgtaccgggtatcgagttgaaaaagaaaatagacgagatgggtatggtgagcgttgggggtgttgctcccaactttaaagcgacaactcccagtggccgggagttgtccttgtatgatttgcggggccgtgtcgtgttactggatttctgggcctcgtggtgcgggccgtgtatggcggagatgcctaacgtgaaggagatttacaagaaatatcacgatcagggattggagattctcggtgtctcgctggattcgaagaaagaaccgtgggtgaatgccatcgagaaaaacgagttgaactggcaccacgtttcgacgttgaacaagttcgattgcccgatagcccagcgtttccgggtaaccggaattccacggatgtatattatcgataaggacggaaagattattgcgcaggatttacggggagaggctttgtccaaaaagatggatgagctttttgcccggtagaaagtctcgtttagataattgttgtggatgtgacattttaggtgtcaaacatggtactcggtggggtaccatgttttgtttaccatacttgcattattatcttataataattatacttgcgtaatagaaaatgacgagtcgtgggtaaatgtatttagtgaatgattgttttttgctgttatcaagatatttcctacttttgggaaaataattaagtaggttgttattggtaaaaactccttcatggatgtactaactgggataaataataaggacaggcaggtattcaaggcttttttcgagggaaatttctcttccatcgtgatgtttgccgataagtacctgaatgatatggaggcggcggctgacgttgcccaagagtgttttatccggttgtggcgtggagatatgaccttcgagacggaggataaggtgaggggctttttgtacacgatggcgaggaatttggctttgaataagttgaaacacgattccatcgtgtcccagtacgtggaacgaggaatgttggagtcggaagagtacttgcgggataacgtgatcgaggaagaggtgtattcgatgatttataaagcgattgacgagcttgcaccgcaatcgaagaaagttatattattatcacttcaggaactttcgaacggggagattgccgaacaattgggaatatcgataaattccgtgcggacgttaaagcaaaatgcttacaaaaagttgaagggattgctacaagattatttttatcttcttttcttgctgaattatacggacttatattaattgttgtccatttttatacggaagaaatgttaaaattgtaattttttttcatgtggattcatcgttttcattttttcagttgttatatagatgtaattaaaatgaaaacatggatgtaatttcgcaaaataagagaatttgtcaattaattgccaagcaactttgggaaggattgagtgatgaagaaagggaagagttgcagtcgtggattcactcctctccgggaaacgaatcgctttatgataagattgtgaaacgggaacgggtaaggcaatatatagagaaacgggagtctattgatgtcagaaaatacatgactacttgtgaacgggagttaggtctagggagtaagcggaggatgaggcgctggcactggggatatgctgcggccattttcgtgttgtgtgttgttggcattggaatctggatgaacgaacgagaagaggctggtgtcactgaaatagctcagacaacgatagagccgggaaaagcaaaagcattgttggttttaggtgatggaagagagattgaattgagtaatcagaatgtgaataaagttttggaagaaagtggaatcgtggttgtgaatgattcctcccgaatagagtataatcggaatgcagggggaggagataaagaggttatgaataaaattattgttcccacgggaggggaatataacttgattttgagtgatgggacttgggtatatctaaatgcggagagtgttatcacgtatcctcaaaaatttgtcggagagaaacgggaagttactttggagggagaagcgtattttcaagtgaccgcttctaaggaacgtccgtttgttgttaagacaaaggatatggatgtacttgtgactggaacggaatttaacgtgaaggcttatcctgatgaatcgaatgtccagacaactttattgcgaggaaaagtagctgtttttgcggggattgataaaaaagaaaaaatagagatcaaacctaatcaacaggcagagtggagtcgggaaaatgtaaaattgcaggtacgggaggttgatccggatttgttcgtggcgtggaagaatgggcattttattttccggcaggatcggctggagaatattatgaaaactttagcccggtggtatgatatggaagtggtttatttggatgagtcaattaaaaatatggcctttgcagggaaactggatcgtagcgaagatataacaccgattctgaatgtgttgcgggccacggataagttaacggtggaggtaaatggaaaacgaatagttctaggggtgaaataaaaacaggtgatgctgcgaacatcaccggttcaaactttcactttgatataaagtgtttttaattaaagctgtatgacaaagttatgaaaaaaaagtggaaagaatactttccccacggggaaatgtatgtaaaaatttttaggatgatgaaattatgtacgtgtttgttattatgttccgtcatgtcaatatcggcaaatgtacgggcgcaacatgcaagaatgagcttggagctgaagggggtgacgttggaagaggtgatctgggctttagagaaaaagagtgacatcacgtttttttacaatgtaacggatgttgcgggaagtaataaggtggatgccgtgtttaaagatgctcctttggaaaagatactgactgaggtgttgagaggaacgaatctttcctatgagatacagggaaaggtggttgttattaaacggtatttgtcgtctcctgtttcagatagtttaaaatcggtgacgataaatggtgtcgtgaaagattctcacggaaacggtcttcctggggtaaccgtggtgttgaaaggtaccacaacgggggtggctactgcaaatgatggagatttttcgatcacgattcctaaacgtgattcggtggttctggtgttttctttcgtgggtatgaccacgaaagaggtggtgtggaaaggagagaagacgttaaatgtagtgttattggatgaggtgagtgaaatggaagaggtggttattaccggaatttttacccgaaaggcagaaagttttactggtgcggcgaccacgtttaaacaagcagatttaaaacggatggggaatcaaaatattctacaaagtttgaagaatatggatccttcgtttatggtaatggagaatgtggatttcggttctgatccgaacaggactccagacattcaagtgcgtggagcttccagtctgcctaatgtgaagggagaatacgagtcgaatccgaatcagcctttatttattttggatggttttgaggcaacggtagaaaaagtgttcgatttggacatgaaccgggtggcttcggtgacacttttgaaagatgcggcagctaaggctatttacggttctcgtgcggctaacggggtggtggttatcgagacgatacaaccggagaaaggaaaattaaaggtttcgtattccggtgacttgaatattacaactccggatttgtctagttatgatttgtgtaatgcaaaagaaaagttacaggtagagtgggagagcgggcgttataaggcttattacccgatagacgagcaatttagtttggaacagtataatgcgattgaacgggagattgcccgtggggtgaatacctactggctcgcaaaaccattgagaacaggcgtgggacataaacattcgctatatttggaaggaggagatgactatctgcgatatggggttgatctttcatataataaagttgcgggtgtgatgaaagaatcaagtcgtgaaaatgtggctggagcaattactttgtcttaccgatataataagatgatttttagaaatgttttgagtgtggcgtttaatcgggcagatgattcaccttatggtagtttttcagaatatacaaagttgaatccttattggagtccgaaagatgagaatggtaatttgaaacgagtgttgggaacattccagagatcgtattggcagacagcaagtgtgtattataatcctttgtataatgcgacattggggacaaaaaatttctcaaaatatacggagattacaaataatttctacatggaatggcagatgcataaagatctgaagtttatcggccgtttcggttatactcagaaacaggatagtcgggaggatttttatccgggtaatcatacgaagtttgctgattggacgggagataactatttcaaacgtggttcttattacattaaggatggaacgagtaagaccttgaaattggatgctacgttgaattactcgaaacaatgggataaacatttgttgtttgccaatttgaactggaatttgcaacaggatagttatgattatcatggtatggaggcttggggtttcctgaatgataaggtggatcacgtggcttttgccaaacaatatgcggaaaatggcagcccgtcgggagatgagactacgacacgggaaatcggtcttgtcggagcgataaattattcttacgataatcgttatttggcggatttgtcttatcggttgagtgggtcatccgtgtatggatcggacaatcgttggggtggtttttggtcggcaggtatcggatggaatatgcattacgagagttttatgagtgggcaggaatggttgaaacaattgaagttacgggcttctgtcgggtacacgggtagccagaactttaatccttatcaagccatggcaacgtataagtatttcacgaatgcggaatatgataatattgtgggggcgtatttgatgggaatggcgaacgataagctgaaatggcaacggactcaagatattaatattggtgtggatgcccagtttttcggttctttgacttttcgtttcgattattatgtgagcaatacggataatttgttggttgatttcgatttgtctggttcaacggggttcaatactttcaaggaaaatttgggagaagttcagaataaagggtttgatgctacgttgaattggcgggtgtataataatacggaaaaggatgcctatttcacgatttttggttcggtttctcataataagaataaaatcgtgaaaatttcagatgctttgacgcattcgaatgaggctcaaaatgacgatgatgttaatccgtcgaagcctttcactcgctttgaagagggacaatctaccagtgctatttgggcggttcgttcattgggtatcgatccggagacaggagatgaattatttttgaatcgtaagggggagaagacttacgaatggaatattaacgatcaggttgtatgtggggagtctaatccgaaatttcaaggtaattttggatttaatacggagtatatgggattttctttgaattgttcgtttagttataaggttgggggtgattactataatcagacgttagttgatcgggtagagaatgttgatattcaatataatttggatcgtcgggtattctccggaacgtggaaaaatccgggcgatgttacgttttttaagcgaataactgaaactccgacaactacccgtccaacggatcgtttcgttgagagacaaaatgagttatctctggcatcgttgaatttagggtatgattttaaacatctgaatatatctaagtttgcggagcgtttgaaattggctttttacatgacagacgtgtttcgggtatcatccgtgaaaacggagcgaggcttggaatatccgtttgccagaaccttttcttttagtttgcaggcaacgttttaataataaaaaattgaat

SEQ ID NO: 122 - DNA, 10405 bp, Butyricimonas faecihominis
ggttagttatatctgtcttgtttgcatggggtaaatacgggagaaaaggcgagaaggttctttctcgcgccatatttaacgttgaatttgtattcccaaagtactcgtatttcgtttaaaataggtgaacacagcaaatatcccggccagtatcgtgctgagtaaaaacgggaaataggaggtatccgtggagaatattccctgtaaaatttcgagaataaaagggtaggtgataattgccatataattcatggccatcaccagtgccagtgcgaatgttgcgtgtgattcggccgtactcgtggatgttttgtcgtatatgatgggttgcatacacccgtaccccaacccgataaggataacaccgatggttagcagtaccggcccgcctttcacgaggaaaagcacgaaaccgagggcgatggccgcggaggagcacacgttcgtgtaactgcgcaaccatccgatgatgttgttgataaaaagtccgggaattgtcatggcgaggaaaaagacggaaatatatgtgccggaaatgtccgggtccttgaatttcaacgtttccatatagatcgacaggttaaaggggactgtcagcacgataaacgtgataaagtaatagagaaacatgagcgctacaggccagttgtggtttgtcgatacgggagtatcgtttgcaggttgggctctttgcggtgctgccggaggggcagagttcagtttaaaagcgaacaacagcgagatccccgacaggcagtacacgaggaatgcgtaatgccagttgatgtcggcgagaacgccagcaagaaaggtggtgagaaccagcgtgatgttggtgatcgacgaggcgatacctagttggcgggtcctgtaacgtttcgtgaagttgtcagcgataagtcctgtggaaaacgggatgatcatcccggccccgacgcccaagagggcgctgactaccagtagcagccacagggaattactgaaagggtaaatcacgctgcacccgaagaatattgataacccgatgataaggattctttttttgttaatccttaaagataatcgtcctgccagcaagatgaaggggacaatgataaacgacgggagcgattcgagcatttgcagttccaagtcgctggcatccttgaaaatgttcttgagatcaccgagaatcggcgagatggccaagccgggtaatgaagttaccatcgatatggaatagatggcaaggagtgccgtgagcgtgatcatgccatggccggtttgtattttcatgttggtcctgtttagttttctgcactatacgggggaaacaagcgaaaagattcatactaacttcatttttctgtcctcacgattacggctcgtccgtcattgagggtggtggcaaaaaggtaggtggtgccgccgtcttttatcttgcttcgggtacggagttcgttgacagatagtttaaagttgcgggtggtgatgtttgctttggggatggtgcgggaaatctgtttaagcagtttgcttgaaaagtccagtatttctttgacttgaaatgcacgaccggggaagtctgcaacaagatgatccgaagtgtagaggtggctgtgagggtggagtttctccagcccgtaacggttggcaacgagtttaaaggctccgcttttgaggacggaactattcggttcataaaggtaggagccgatatgactcatgtagcgaggttgtgcgtccttttcctcttccaagagaaaggaaaagtattgctccgtgtcggtagcaaaattcacggtgtgaatgttcaccgcttgatttatcggggttttatccagcacgaataaaagttccttacactcgttgcggacggaaaccacatgcacgtcggtggtttcgggtaggagttgcaggactgcggaaaggtcggccatgggggagattttgatgatcaggcgttgaccttgttgtaaaagtgtttccttgatttccagtacgttcggggcataatcggtcagggcgaacacccgcttgttatcgcttgtccggcgggcgggatcaacatagtacgtgtcggcaataacttggctggccacggttgtcgcgtcagcgtgaataacctcgatgttggtcgctcccagcgctaggaaattggaacgagcagcctcgcagtacgattcatcgcgttccacgtatgtcactttatctacttgccgggaaaagaagtacgtgtcgacgcccaagccacccgtgaggtcgcagagagagttaccggtggcgagtcgagccttgtagggagcagttgtctcggatgagcattgttcggtggatagcttggacgggtagaagatgtcccggcaggcataccacgagggaagtttctccttgatattctcccgggcttgaatttgttccacggccaacacgacacgatcatccgggtactcgtttttcttccatagtaactgatccggattgtcgtccagatgctctcggatgaaacgggatatttcgggatttaatggcatgttcgatcgtgttaaacaaattatcaatggtcggtagcgcctgactttgctttatacaagggatcgtaggggagcgagaaccagaacgtggagccgcatcccagtgtggatttaaccccgatttccccgcccagtttttcaacgatactcttgcagatggacaaacccaagcctgtacctctcgcgaaggtatttaattttataaaacgatcgaagatttgttcttgattctttgtcgagatcccgatacccgagtcttgcacgtggaatcggatgtacttttccgagagagtataacccacgtgaatgtaaccgaattccgtgaatttaatcgcattgttgatgaagtttgaaagaatctgcgtgatgcggtttctgtcactgcaaatggaacaatgaggctcgtgttcctcgaatgataacgtcacgccctgagggactttcatagcatgagaacagatgatttcttcgcataggtcattcacgtccacttcggcaaacgtgacctcgtaggttcccgcctcgattttggagaggtcaagtatatcagagatgagttgcaataaaagttcgttgtttttctgtatcacggagatgtattgttccctttcctcgatgttgctcgtgtcagccaacaagttggagaaacctactattgcgttgagaggggtacggatttcatggctcatgttagccaagaaggccgatttcaagcgatcagcctcttcggctttcagcttggcggcaatgagtttactttctgtttcttttagttccgtgatgtcaagatttagcccgatgagttcaataatgcctttctgcggattgtattctttcactttgaaacgtatacgcatccagcgccagctatcctcgaattggatacgtacctgcccggagaatgactgttcctccccgtccatgacgttttggaaaaacgtggcgagacattggagatcatccgggtgagcatgctcgtaggcttccatgatattgttgatctggcggggtgtctggtttagattatgaaaccaaacgtccgaacccaaaaagttgttacttagcgggttccagcggcaaatacctactttggagaattccgcgatgtcattgaacagggtttcaaagtcttcaattttgcggtaagccttgatggcttccgtgttgtcgatgacgatgagaaggtagttttctatgttattgttggtatcatagagacaatttccttttaccgtcaagtttctcgttccctcgtatttcgtgttgtagtaggttttattcacgttcgtgaatttgtatgtcagcgggaatgtgatttccttgccctgccgtaacatttcgagatgttgctggggaagattcggatttttaaatagattaactcccagtacgtcttctttgtgttcgaagccaaagatttcgctttcaacgtcatttagagcgattaaggttccatctttatcatagatttcgataccgacgggtatgtttttgtatatgttgtgtaaggtttcttcactacggcgaagggcctcgatcgttttcatccgttctgagatgtccgtgaacaaagcgacgacttcttgttgaccttgtaagtagatcaagatatgatactggcgtcctgtatttgctattagtcgattggtttcaagtactttgccgcttgaaacgacttgctgcaacacttccagttcttcgggtttgttcgcgttgaagtctttagcagtatgaccgatatacgaaccgattggcgatgctgttatattgtaaaaggcgggattcgcatccagatatttgtaatcggttactttgccggaatgatcatataagatttgcatccgtaggtaaccgattggcatatgatcgtaaaggctcttgaaatactctctttcctgttgggcttttttctcggatgcccgtaattcgatacagatgttgatgatgttggagatggctgaaaaccattccttgtcgatcatgctccaaaggcggggtgtgtttacaatgtctatccccatatacccccaaataccttgtgcggatagaagtgggaataccatgagggaggcaatattctgacgggccaaagtttgcttgtcgcttatggcttccggtggcatctcatctaggttgttgatgatgataggcacgttgttgaacatttgtttactccaccactggttgtagttgatgtccatatcctgcaatgtgtcgatctccggggaaactccttcccgggtagcttcgtagatacaactttgtgtaccttttgccttgtcgtactggaatatataagtgcggtccccgttaaattgctgtaataaatctttcagcgtgtccgtgatgacttttggggtgtctgcactttttaagaagtttgatagggactgagacagggcaaattgccggaccagtaattcctttaaacgggagtcttccttgtttttataaagggatgtattcgtttcttcatcaagtatttgggaaaatccgatggcgataatcgtgttgtcttcccgcactattttgttgcccagcttggaatgaatccataattctccatactttgtttggatcgggaatatttcgtcgtagaaattctgtgtccggatgtggatgaacgaggaagagatacgttgcctgtgttccacgttgatgatgtttaggaactcttctacggtcatggtgtttttagatagatcgagtatatccatgatgtagtctgaacaaatgatttcgtgagtgttgaagtttaccttccaccagccgatttttgctgatttttgtagttcgtggagtataaactctttctcttgtaaatcttctaattcatttaccggaattgcggtattcttgttttcagacatgatcgaatctatttagtagtgattatacgccttggagatgttttcctgtttcacgggcaaaagtagacaaattttgcataatagccatgatttagggttaaaaacgaaagattataactggtattttacaagttttgacagaaggggggatcttctgtttttttatttggattattaacgaattcaatgttcctttgcgatggaaaaataatgaagacgtgttagagcgattaaaaacatggatgttgcctttggcgatgttaagcgggggtatattttactcttttttcagcttgttttctttcttgactccttacttgatttccgtgatgctattaatcacgtgttgtcgtttgtcgatcagagaaatgcgttttacccggttacacgtgtggatgcttgtggttcaggtcgtgggtagcgtgtgcgtgtacgccgtgttatgcccttttgatgccttgttgggagaggctatgatgatttgcgtgctggccccgacggccgtggctgcgacggttgtcacggggatgctgggcgggagtgtgccatgtctagccgcttacacgttagcgagtaatttgtgcgtggcaatcgtgtcacctgtgattttctctctcgtggggacgcaaggggaaatgtctttcggtgcgtctttatggtacgtttgccggcaggttgggccgttgttacttttgccgctggccggggcatggatcttggaatattttattccttcagcacataaggtgttgaaaagtcatcaaagcatttctttctatttgtggtcgttcagcctgacaatcgtggtcgggaaaacggtgtctttcattatgcagcaggatagtaaaaactacggggaagagtttttaatcgcttttgccgcgttgttattgtgtatcggacaatttgcgatcgggcgttgggtcggtcgccgacatggtgagaccattgcaggaggccaaggattgggacagaaaaacacgattttggctatatggatggcgcaagtgtatctttcgcctctttcttcgataggacctgccgcttatgtcctttggcagaatagtatcaatagttggcagttgtggaagaagaggaagaaggaaggaaaagcatgacaatgttgtattgatttatcttgttattggaataaaatggaatgttattgtagcatatttggaaatatagcgaaaatatgctaacttgtgtccgggtatttgtggggaaagtgagaatacaaaatataatgagaatggagtatgagtaaatggagtgtagtgcatacagttacgtttttgcaggatgcttacatgatcaagtcttacttggaatcggctggaatcgagactttgataccggatgagtttaccgcacaggtgaataatttctataccacggcgattggtggtgtgagactgatggtacgcacggaggatttggaatcgggggtggctttgttaaaagaaggcgggtacattaatcccgaaaattcggtaacggatgaggagattttgatcgtgggagcagatagttccacggatatgacttgttgtccgttctgtggttctgcgaatatcggtaaaagaaacacgccgggaatggcgatggtgattctttatttcttgttgtcggcgttatttccgatattccggtcggcaaacaagtgttttgattgtggtaagatctggaaatttaaaaagataagacaatgatgagtgaggttaaattggcgaatattgatggtgaggaattacggagagagctcgaaattttgttcgaggataaggagaaaagagtgtttttcatgcagatgttggcaacaagtgtcaaggagacaaacgagttgctaaatgtggtgactttgatgctggaatccccggaaatattacagaatcccgagtccaagatgaagatatgtgaatttctgaagaaacataagggtattattgccgatttatcagagagtatgaaagtgtttttatagtttgatttcaagatttgtttataacagctttcacttttttctttttgtttatcaatgcgaatcctgcaatgattaatacgagggcgattgggtcgtgccatgagaatttctggagaccgagcgatattgacacgatggctccggtgatagggaggaggtaaatatacacgctttccacaaagggcgaaatgtatagcagggctttcaagtttaggaagtaagctatcatcgtggcgaaaataagcacgaaaccgagttccaaccagatatgtacgggagcctctgacgtgaatagcggggcttcgagggtttgatgcaagccgaaagggagtacgaggataaaggctgccaagctcatccagcgcatcacgataaccgaattgaatttctgggtgtagggtttgattaatatgagatagagcgcgttgaaaaccgaggcaacgaagatcagaacgtctcctgtgaatgagtctttcaccgctcctgcgtgcggggtgattgaaacgtaaagagttcccgcaagtcccaaaacgataccgatggctttgtagcgattgaagtccgcgtgaagaatcagtacggcgagtgcaattacgataataggttgcacggtacggataacaaaagcatccacgggacccgtgatattcaagccgttgatgtatagtagtaagttacccccgatgccgagcagaccgcccagcatcatcatgaaaatgtcttttcttttgggttttgcctgttgtttatttgccgggatgaagagggagatgatccagaaaccgaaagccatgaccgtgcaacgaattaacacgaggccatgaggaccgatccattccggcatgaggatcttcatgaaattcgtgttaaagctatatatgacaattgtagacaagaccatgagatgcccgatgatctcttttggcttttgagttgtttccattcgtgtcgttttttcgtgataaacggaaacttcccggataaggtttgagtcggtcttgtaaattatattaaaaactcaaacacttggtcgtggtggtggataatgtattacttgtgcatatccagtgcaacatcacctgccggaatcggttcttttcttatagagaaatggaaacgagttccacgtccttcagaagaggtaaattgaatggttccgcccatcgcctcaatgtatgccttacaaatagatagacccagtccggggccgtcggtaaaggtgtttgccttatagaatctctcgaagaggtacgtgtgtattctgggcggcattcctaagcccgtgtcttccacgatgaagttaatcatattttgttcttcatccacggaataagcgagtttgatgtgtcctttgtttgtgaatttctgggcgttggacaggagattgagaattacctgatataatttttgttgatccgtgtacaccaagagattcggggagtctccttccaaatacaattccacgttcgggtgggtgttgttcattcgaagaaggataatatcctgaaaaaactcgtgcagacagaaggttgccatctgtaaatcgatcttgtgcgcatcgatccgggccagccgcaacacgtcatttgccagatgcgagagttggtcggagtgttcgtatataagattcatgtactcgttttgctggttaggtgtcagtgttttatccgtacttactaggttggtccagcctaagatgcagtttaactggtcgttaatttcgttactcagtttttcgagaaacgtgaattttgacttttcaatccgttctgttttggccaaagcatcttgtaagcgaatttgagcctgtttgagttccgtgatgtcatgaatggtaattaacatttccggacggttgtgaatgttcatgtatgaaccggaaacggcaacattgcatttgaaggttttcttgtctgatagacgcaggcttacagtggtttccaagttagaaaagtcctttttcgttttaaaggcttccgttactgcctgtctgatgggacaagccttgcaaagttctccgttgccgcaacctttattcagggaattgacacaattaagtagttccccgactcttttaggttgtccagagtcctcggtgtctgtgatcgcgtaatagttcgttttctccacgataaagttcctgtcaatgacaaggatataggactttatgtgttgtaaaataaaattgaatagtgcctcagaagttttgatttctccttttttgtcgctaataatttgtttcgcctgtatatacttgtataaaataaacaggattacacatattagtatcgcgataatgatgttatatttcatgctacacacttcttgtaattcaccacaaagttgttaaattttaccgatgttccaaaggatagaattataaatttctatattttttggaaaattgttctgtcgcaaacactccttttttgcaatatttttgtttttcgttctgatgtgcaggtgtttgctagtagggaagatggcattaaagtagatcttcgtattctttatgacgggccacgtatacgcgggcaaaaggacaggtgatgataaccttcaagtgattttcccgtgcataattcaacgtttctttcacaagtttggccccgtagcctttattctgcaaaggtttgggaacgaatgtgtgtaagatgttgattcccccgtcaaagggtttgtattctacgacggccgaattcccgtttttggagaattcgaacatatgtctggttttatcatgtgtaatttccatgttttgagtgtttttgagtttataaatttcttatatatacgataaaagagcgggtgcagtttcaaactttttattaaaaattatttgttgggggaaaggaggttggtcggggcatggtgtatactggcggtgtggccttgattgcttatgataaattatatgttttgagatgctgattatgagaaatttgatgattattttttggtttataacctattttcacgaaccgaggggtggatttctcggataattgtataattttatagcgctcccgtgtggatgt

SEQ ID NO: 123 - DNA, 10376 bp, Butyricimonas faecihominis
atcatatattatgagaacaatattacgacaaattatcttggggatattcttgtcggtggcggtaagtagtgttgtttctgcccaacaattgaatatgggggatatactccctcaagatacaaatgtgagggttggaaaacttgataatgggatggggtattatttgaggcataatgccaagtcgacgggattggcggatttctacatcgtgtatgatgtgggatcagttcaagaagaggattcacaaaatggattagcgcatttcttggaacacatgatgtttaacgggacaaagcattttccggatgatagtatgatcctctggttggagagtatcgggatgcagttcgggacgaacttgaatgctgccacggggatggaaatgacgtattaccagttgacgcaagttccgcttaagcgggaaagtatcgtggactcgatgttgttgatcttacacgactggtctgggtatttggctttggaagataagaagattgacaaggaacggggggtgattatagaggagttacggcaacggaataatgcccaattccgggtgggtaataaggcggctattcccgtttttggagatactcgttatgcacaccggaatatgctcggtacggaagagttcctgcgtacgtttgattctcagatgcttcgagatttttacaagtgctggtatcgtccggatttacaggccgtggtaattgtcggtgatttcgacgtgaacgagatggaggcgaagttgaagaaagtaatggcggatattcctgtcgctcagaatccgaaggcaaaggaggtgattcggattccggataacgtggctcctgttgtgacggtgatcacagatccggaacaacagacgtgtaatgcaaatttttatattaggcgagcggctgttccaaaggaattgaataaccgggtcggggcgacttacatgaacatgatgatcaatattgccgcagccatgatgaacactcgttttggggagctggcgcaacaggagggatgtccgttcgcatctgcccatttgcagaatgttccgctgacgaatacttgtgacgcgttggaattgcaggttgtggctcgcggagatgctattgcggaggctttcacctcagcgtatggagagttggagcgagtgcgacgtttcgggttcacggaggaggaattggagcaggttcgcacgggaatcttgagaggtggaaagtatgcgtacgagactgctggggatcgggagaacgggatgctagtgtgggaatgtatcaatcattacgtgaagaatacacccttgatgtctccgcaacacaagtgggcggttacgcaattgatgttgatgaaacaggtgacattgcaggaggttaacgagttggtacgacaactaatctcgcttgcgaataacgtgttggttatttccgccccggaaaaggcgaagagggttttacccgaaacggagattctggaaaatttcttctcatgggttcggacggttgagatggaaccttaccagaccgaaaaaattgatcggcccctcttgtctgaagagattatttctggtcgtattataaaaaccaagaaagggaaatatggttcgaccgtgtggatgttggagaatggtatccgggttgtagtgttaccaaccacggatagtccgtaccagatcgttatgaacggtcaggcgagtggggggctttccatgattcccactgaggattattattcggtttcgatgctcgcacaggtggtgagtgcttcgggagtaggggatttcactgcagagcagttacgaaaggtgttgggtagtaaggttgttaacatacaacctacgattaatcgtttttcgacagatataaacggaagtgccgcgaaaggagacgtggagaccatgttacaattgacgtatctgtattttacacgtcctaattttgatcgggggcgtttggatatgataatcgaggcgaaccggataaatttggaaaattcagtaaactctccggattttgtcatgacacaaatggtgaataagatcacgtatggtgaccaacagcgaacacgaattcctgatgaacagatcttggcaggtattgattgtggtaaaattagctcttggtatcgtaatttgtttactgatgcggcaggtaattatactttttattttgtcggggatattgacatggaaactttcaagcctctggtggaaaaatatattggaggacttcctgccgggaagcaacaattgggatggaaggatgacggggtgagggtgttgcccggagtgaaagaggaaaggcaagaaatacgtatggaaactgccagaagtatggttagtattggttactcgggcgggatggactacacgcaacagaatatgatgacgatgggaatgctttccgcttgtcttcaatcacgctataatcaaattattcgagaggaaaaaggtggaagttacggggtttccgtgaatggaactctctccagacaaccgatcggtacgtatgatctgaaggtaactttccagacgaacccggacatggtggaagagctggttcgggtggtaaaagacgagctttttcagattgccgacaaagggcctgatcctgaagatttaaacaagcatctggaatattggcgaaagatggaaactcaaaatgcaaggaatgttcagactcgtttgattttattacagacgtattacacgtggggtgaggattgggatgttgattacaataaattgttgaattcgatcacagtggaaaaagtgcaggagcttgcccggaaaatcatggctgatgggaatttgaaggaggtggtggtaaatccgacgacgatggttactcgatgaatgggctatgggtgcgctagaccatgaacatagttctaacataatatctacataccatgaacgcagaccagtgttcatggcatgttaggggaggcatgatgtcgggtagttggtgttgagggatggtagcctaatgtggggtattgtggctccctgttgtttattagaaatagatttctaacctttgtagaatatatttttctaactgctgatttgcgtgaaacattaattattcgaaattatgaaaacgatctatttatttatctgcatcgtgggactcttgatgagttcttgtgcgacttcgaaaaagagtgtccggaagggggaagcaaacgtccggcacgagcttttggatgcgagaacttttaagattacgaaattcgctcgtgacaagacctatggctactcggaggacaatccagtcaaagtgggaggtggaatggagggacctctgaacgaacaacgctttttgaacgcgttggcggggcctaacggggagaaggtcacgtataaacggcagggtagttgctgcccgttcaagacaccaaacgctctcttcggagatagtggtgtactggatatgtacgaggtaattatcgagggttcgtcggaaaagattattctttacctgaatatgtatgactcggaaaccttgcaagtgccggtagggttcactttgcggaaatagagacttcaaaaggcaaacacgattaagtgggagagagatacaagattttgtttccaagaaaaaaacgggtatgaatgtactgggtattatatttttttgtacatttgtccccgttttacgtcaagagtagtggacagattgaaagaatataagatagcccacagagggttaggggaaggcgttcacactttcgagtttgtcatggatgacggtttttttgattgttttgacgcgacaaaaggtacgaaagggaaagtaaacgcgagagtaaatatcgtgaagtcatccttgctaatggaggttcggatgacgatcgaagggacggtggaagcaatttgcgatcgctgtctggaggaaatggagttaccgattagcggggaattgaacttgtatgcgaagtacggggagagggtggaaggaaatgatgatgattttattatcttggctcaagatgatgattatctggatttaagtgaaccgctatatgaggtgtatatgctgaattacccgcttcgcgtggttcacccggagggaaagtgtaacgaggagatggagcatgtactggaagagttgacaatggaagaagagaatgataagattgatccccgctgggatgaattgaggaaattaattaataataactaaataaaactagagagaaatggcacatcctaaacaccgaatctctaaacagagaaggaataaaagaagaactcacgataaggcaacagttcctgcaatagcaaagtgttcaaattgtggtgctgcggtacagtatcatactgtatgtccggaatgcgggtattacaggggtaaattggctattgagaaagctgttgttgcataatattgatgcaatgataaagattgccttagataatgcagccccctgtactagggggctatgattgtatatgggtatctgattctattattcaatttgaaaatttttattttatggaaaggccaagagcggtaatcacaggggtaggagcgtattatcccgactatattctaacgaacgaggagttgagccggatggttgataccactgacgaatggatcatgactcggatcggtataaaagagagacgtattttacgggatgccgataaaggcagtgcttacctcggggccagagcggtggaggatttgtttcgtaaaacaggtttgaaaccggaagaagttgatttattgatttgctgtacggttacggccgacatgcacttccccgctaacggaaacgtgatttccgatatggtgggaataaagaatgcttttagttttgatcttaatgccggatgttccggtttcttatatggcttgatcacggcaacacagtacgtggagagcggacgctataaaaaagtgattgtcgtgggtgctgaaaagatgtctgcgatcacggattacacggatcgggcaacttgtcctattttcggagatgcggcagcagccgtgttgttggagccgaccacggaagatttgggggtaattgaccatatattgcgttcggatggaatgggacgtgttcacttgcacatgaaggcgggtggttccttgaaaccgcccaccattgacacggttctagcccgggaacattatatttaccaagagggacaacccgtgtttaaacatgccgtgtcgaatatggccgacgtgtcggtggaagtgatggaacgcaataatttgtcctcggaggacgtggcttggctggtacctcatcaggcaaacctgcgtattatcaaggcaaccggggagcggatgggactacccaaagagaaggttatggttaatatccaaaaatacggtaacacgacttcggcaacaattccgttgtgtctgtacgagtgggaagatcagttgaagaagggggataacttgatccttgcggcttttggtgccgggttcacgtggggagcgatttatttgaagtggggatatacgaaagttaaaagctaaaaactaaaagttaagagttaaaagttataagttttgcaagatccatggagtctagatttaaggctttatggatcttgttatttttttgaatgttcgggtgtttagatttttgagttttatgggataacaaattatttccaattttaaattacttgttgtatatttggtcgattattatggatgctaaatgagaaaaagtgcaagtcaggacactaccgaaatgagtcagacaattgtcttgaatgattccgagatagagggagatattatcctgcccgggaacttgtgtttatttggcaaaatttcaggtaatgttactgcaaaaggtaaggtggaggtgaagttgggtgcggtggtgactggaaatatcttttgtcgggaattagagataggcggggtggtagaagggaacgtggaggcctgttttttgatgattgaagaaaatgccgttttgaaaggagatgtgcaggctggcaaactgctggtgagagccgtgaagtatgatataaaacggttacgtttggtaagaaaataaagtaaacgataaatcatgggaaaagaagtacaacagcaaatagcgttaaatttactcagtgaaggaacccagatcaccggggatcttcacgcttcaaatgacattcgtattgacggggaacttaaaggaaagattttcacgaaaggacgtctggttatcgggcagatggccaaggtggagggagaggtgaattctccgaatgttgatattttaggaaccatggaagggaatatcgtgtcgacggggactgtttccttgagggcaaagtcggtattcacgggaacgatcaaagctgcttatatcgcgatcgagtccggagcggtttttaatggcgagtgccatatccaacgagaagttcaacaaaaataattaaagacgtggtgtgtcgtgtattggcagtgatctcattgctactgagtctggtttcttgtgaaaaggaacaggataaggtagaagatggtgtttctttggaactggccaaagaacgtaaagcgaatataggcggcgtgacctataaattgtatttttctattccggcggagaagagtgaggctattatggccgaatcaacgatcttttttgaattgtttgatctggttccggtcattttggactttaaagaggcaaaagagaatattcttgctgtcacgtcttcggatgggagaaaaatcccgtacacgtttaaaaatgaacatattattattcaaccggaacacttgaaaaagggacggaacgagctggtcatccaatttaaagcgggagagtcttctttgaatcgaagtgatgatatgctatacacgttgctggttccggatcgatgccgcacgttgatgccttgttttgatcagccggatataaaggcgaggtttaaattgacattgaaaatcccttcccggtggagggcggtggctaacggggagccgattcgtacggagtattttagtgactataagttgtacgaattcgaggaaacaaaaccgttgagtacttatctgtttgcttttaccgtggggaggttctcgtacgtggaacgttacgtgggaggacgatggatcggtatttatcaccgggagacggacacttcgaagattaatgccagtattccggtcatagccagagaggtaagtcatgctttggattggatggaaaactacacggggatacgttacccgtttgatgtatataatgtcgtggcgattcctgattttcagtatggcgggatggagcatccgggcgccgtgtattaccgggcgtcaacgatgtttttggatcggaatgcggatttgtcggcatggatgaaacgcagtgatgttatcgctcacgagacggctcacatgtggtttggtgattacgtcacgatgaggtggtttaatgacgtgtggttgaaagaggtgtttgccggtttcatgtcggataagattatgacccagttatacccggacgtgaatcatcgattgaatttcttcttgaatcattacgagccggcattacggacggaccggacgaagggaacgcacccgattttgcaagagctggataatttgaaggatgcgggaactttgtacggggatattatttatcacaaggccccgatcgtgatgcgcatgttggaacgggagatttccgaacgacggttgcaggtcgggttacaaaggtatcttcgcaggtggtcctattctaacgcggattgggacgagttgatcaagttgctggaaagtacaacgggacaggatttgcaggcttggaacgagatatggatcaaagagagcggggctcccgtgatcgagttccagaagaacgggatcgtgatgacggatgagagcgggaagaatcgggtttggcctcaggctgtatctgttttttgggattacatggggttgaagagaacattgatcccgttacgtgattcactgactcctttcaggtatggagcggctgtcgtgttaccggatggggacgtcatgggatacggttgtttcttacccacggatttttctattcgttttcttgatgatgaactgggaaatctgaatgacccgctttacagggcagttgcttggcaagctctttacgaaggggttttgcataaaaaggtgaaaggggagtttttcctgaagttatgtatcaaacatttaccgcaagagaagaacaatttggttgtgaaccggacgttaagtttcttgaggattatttattcaacttatttggatgagggaagtcggcagttaatacaggacgatttagaacgtttttgtattaatatggtgaataataaggccgaggggaaaaataaaaaatcgtattttaacacgttattgtcgatttgttcttcaccgaagagttgttcctatttgtcaagcgtgttaaagggtgaacaggatttaccggaagacgtaacaatcaatgaacaagataaaattagtatcgcatttaatttggtgttgcgggatacgagtgtttatgaagatacgaaggcatatatcatgagaacggttaagaataaggacttgctggatcgttttgaatatgtatacccctctttatctggtgataaacaagtgcgtgatagcgtgtttaacgccttacttgtaagagagaaccgggtgaatgaagtatgggtggaagagtgtttgcggtggttgaatcacccgcggaggagaatggaggcggaggggtatgtgccgaaaatgcttggggcgttgcaggagattcaagaaacgggggatattttcttccccggttcttggttaagtgccggattgtccggccacacgagcaagaacgtgtacacgatggtaaattctttcttggagaaacatgcgaattatccgcagaatttgaaattgaagatattatctaattcagatcatttacggcgtttacattcagaagaagagaatagagatagattgaaatgatatggcgatagaagagaattcattgatattgattccggcccgttatgcttccacccgttttccggggaaaccgctggtggatattgccggaaaacccatgattcaacacgtgtacgagaaggctgcggttgtttctgaccacgtgtacgtggcgacggatgacaagcgtatatatgatgccgtgcttgctttcggtgggcgtgcggtaatgacttccgatacccatcggagtggaacggaccggtgttacgaagcgtacacgaaagtaaaagagttattgcagcgcaattttgacgtggtggtgaacgtgcagggggacgagccttttattatcccggagcagatcgaatctttgatcgtgcgttttgaagagcctgccgtgcagattgccacgttggccaagcctttcgcgaaaaatgatgagatttttgacccgaataaagtgaaggtagtgttttccaccaatcatactgctctttattttagtcgaaatccaattccttattgcaggggcgtggagcgtgaagattggctggctaaaaccccgttttataaacatgtggggatgtacgcttatcgtccggaaattctgaaggcggtgacttctatcccgcagggtgttctggaacaggcggaatctttggaacaattacgatggttggagaatggttacacgattgctgtcagtatcacgaatcatgaatcaatagggattgataccccggaagacttggaaaaaataaaagctaacagctaataactaacagtttgaaaataataaaagctaaaagtttctcgacttttagcttttaatttttagtttttatcttttttagattgtcatgatgtctttttctttcttcgcaaagtattcatcggctttcttgccgtattcgtctgtcattttttgagcaatgacttcagcgtctttggacatatcttccggaagcccgtcctttaccatttttttcacttgttcaatgacatcccggcgagcgttgcggatacttactttcgctgtttccatctcgcctttactttgttttacaaggtcacgtctgcgctcttctgtcagaggcgggatatttatacggatgagttctccgttgttatccgggtttaatccgagattagcgttcatgattgctctttcaataggagagatcatgcttttttcccaaggttgaacggcaattgttctcgggtctggggttgaaatattggctacttgtgataacggggtaggactaccataatagtcaaccagcacgtcttgtaagattttcgggttggctcttcccgctctgattttactaagttctgattctaggtgactcagagcagcttccattctctcttttgcttcgtcgagataaaattgtacttcctcgttcatataatttttatttgatttaatatcccataatg

SEQ ID NO: 124 - DNA, 10344 bp, Butyricimonas faecihominis
gttatacgttgttgttctttttaatttgtttaaatagtgttgggtatactgtaaaaatagagaaacgtttgttatatgaccggcacacgctacatgatacctataaatacaggaaacaggaacgacgatttcaatgggataagatatcggcattccttgattcattgatggtctttcaggagaagaatgacgggtatggggtacttcggaattataaaaacgtgaacgggatgccacccctttcgagaaaatacaaaattaacaaatataaacagactcgggattcgttcggcgtggatcgttctcaaggaattcctttatatcgacggggaaattttagcgtgccggaacgttatggacgggatggggcttatgttgccgtgattagtgacagtgctggttgttttcaggtgagttcggctacttttgcagggggaatggtatgttcctaaaaaatacatgaagttaatagggcctctttcgattaaaaaagttatatttgtagaccgaacgaatcagaatattgcaactttggaacaagaaggagcgacttggttggtgagaagtatgaatcccgtgacgacgggagctaatcgaccaccttatcaagaagccacaccaccgggaatttattttgtacagcggaaattgtcggagatgctttacctgaaggacgggacagatgagaaaggtggttttgctccttatgcttgtcgttttaccggaggtgcctatttgcatggggttccggtcaattatcccgataacaagttgattgaatatagttggacgctcggaacgacaccccggtctcatatgtgcgtgaggaatgcgacatcacatgccaagttcatgtacgattgggcggaggtggaaaagacattggtaattgtgtttgattgatataaaaataactttatgcgtgcgttatcgcttatcttgattatcgggggaatttgttggggatcgctatcggggatagcggcagagaggtcgtctgtaccgaatagtcgggcgctttatcacgagatagcgttagccggaacgattgattatgcggtgttcgagcgggctatcgcggggtacaaccggatgggcggtcacgacaaggacatccttacggtgattgatttcacgaaaccttccacggaaaaacgcttgttcgtgattgatctgaaactgaaaaagatcctgtttatttcttacgtggctcacggtcggaatagcggggagaaatatgccacgtcattttccaaccgggaaggctctttcaagagttcgttgggtttttacaaaacggaaaacacgtattacgggaagaacgggtattctttggtgttggacggtttggagcggggaattaatgacaaggcgaaagagcgggcgatcgtgatgcacggggcggcatacgcagacccgtcaaccattcggtcatgtgggcggttggggcgtagcttgggatgtccggcattaccattagccgtgagcaaaaaaattatagatacaattaaaggtgggacccttctgtatattcatggagatgacaaaacttacgcgagcctgagtacgttcataaaacaagatgaggcacagaaggatcgggcggatatttaataacattattttttagagtagattatgatgacttatgttatacttattgtcacggttgtcgtgtcaattgcttgttttaacaattattccctgttcaataaattgtcgtgtaacccctaccggatggtacattccagagagtggtaccgaattatttctcacggttttgtccatgccgattggacgcacttgatcgtgaatatgttcacctttctctctttcgggttatacgtggagaaccagtttgtcgcgtggggattcggtagttccagtttcttgatcctgtatttcgggggaatggtggccgcttcggtctatgacgtgtggaaataccggaacaatcaatattattcttccatcggggcatccggtgcggtttcggctgttttgttcacggcgatatttttgcatccttgggataagatttacttctttgcgatcgttccgattcccggtatcgtgtttggtttcatctacttgctttattgccagtacatggcaaaacgagacggcgataatatcaatcataatgcccacttctatggagcagtgttcggcttgatctttcccgtgttactggaaccgagattattacagatgttcattcagcaacttttaaggcattaattggctttaataaaaaagtccttatatttgtgtctcaatagcaaaaagatatgcgtgagatagatcaacgaatttgtgaattgttgagggttcggaaaatagaggggatggagcttctttttaaagagtactacaaaccattggtggtttggggtgctacttttgtgtctgatgttcaacgttcagaagatatcgtgcaggatttttttgtcaaattgtgggaaaagtcattgacggataaattattcccggattcgttgaaatcttacttgtttgcttctgtgcgcaatttggcgttaaaccaattggaacggttagatccgttaaaacaagcttgtgatatagcgtattacgagagtccatgggaagaatatgataactttgaagaagaagtgtttcagcgagtggaagtggaactaaaaaaattaccacctagaacgcaagagatcattcgttgtgtctatttaaagggaatgaaatataaagaggtggcggaaaaactaggaatttcagttgcgacggtcaattctcttttggtaaaagcattaaaaaaattacgacaacaatctgataatgagagtgaacttgcagtttatttattttttcttgaaaaaagattgttttccagtaaatgatttttgattctgaactgtattatagttgtaaaactaatgactatgatggttcaagatgaaatagacgaaaagttacttttgtatattttaaacgaagcgagtgatatcgaacgggatgaggtcgataactggctacgtgagagcaaagatcaccaagagtactttagaaaatttcagcgagtacacttggaattacaatggggtacgtatgcttacggaatgcagccggactttaatactttacgtcgaaaattgaaaacacgttatagtattcggatgtggtatagtgtggctgccattttggttttgatgttaagtgtaggaggtgtctttttgtggaatcgtgttgatcaaccagaacaattagcacaagaagtttctattcaaccgggaaaaactcaagcggttttggtgttatcatccggggaaaaagtaaatatgggagcggaagcttgtgagttggaagagcgtgatggaactgcattgcaagtgagcgaaaacggtcagatcgcttatcattcgggtaaagatgataaagtggcagaagaaaaaggagaggacgtcatgaatcgtttactggtgcctcgtggaggtgaatttagcttaaccttggcggatggaacttgtgtgtggttgaatgcagaaacagaacttctctatccggttcggtttaacggaaaacaacgtgtcgttcaactgaagggggaggcttactttaaggtggcaaaaaatcaggatatgcctttcttggttcaagtaggagatgttgctgtcaaggtttatggaactgagtttaacatgaatacttatgatggggtagagaccgtgttggtaacgggggccgtgagtatgaatcaaggcaatcgggaggtgatgttaaaaccgaatcagaagggcgtatttgatccgtcaaaaggagaaattctggtagaaaatgtcaatgtattgccttacgtggcttggaaaaatggtgattttatttttcagaatgaatctttaggttccattatggataaattgagccgatggtatggcttggaggtattttatcaaaacggggagttgcgtgacgtacgattatctggtaatttgaaacgatataaagatgtgaaagagttgttccattcttttgagaagatttcggacactcattttaaggtgcaaggaaatactgtatttataagtaagttataagaaaagatgaagatgtttccctcatcttcaccttattgaacaataaatgaatgggtccattggcaagcggattcctattcatcatgtgtaatatttaacgacaaagttatgaaatctaattggaagtacgctgtttttagcgtgaaaaaatcaaagacttttaagagtatgagatttttcttaattttctgtttcttttgtattcctggagtaatggcaaatggctactcgcaggagcaggttgtttctttaaacttgaagcagtgtgatgtgaatacattgtgtcaggaaatatggaaacaaacggggttacgttttatttacaatgaagagcatgttaaggcacttcaagcgtttaatgtgcaagcagatcacaaaacagtacaggaagtgctggatgaagtatttaaaaatacctcattgcgttatttctttgagaacgatattatttatatcgtgaacaaacaaaaagatgaaccggagaaaaaggaaggaaggtctatttccgggacggtgaaagataccaaaaaaaatcctcttccgggggttaccgtgttgataaaagggactacagtaggggtggttacggatgtagacggaaaatttaagattaccttacccaaggataccgtgacttttgttttttcatttgtggggatgaaaagacaggaagtaaagtacacgccgggcaaaaagttagacattgtaatggaggatgatgtggagcagatggaagaggttgtgattaccggttaccagaaaattgacaaacgtcatttaaccagtgccgtgacaactttgaaggctgatgatattaatgtggccggtatatcgactattgacaagatgttggagggacacgtaccgggtatgattttcatgcaaaattcaggtcaggtgggagcggctccgaaattacgtatccgtggttcttcgactgtgttgggttctcgtgaaccgctttgggttttggatggaatcattttacatgatccggtaaatgttgatccttctcaaattaatgatttggattttgtgaatttgttgggtaatgctatttcaggcttgaatccggatgatattgagcaaattgacgtgttgaaggatgcctctgccacggcattatatggtacgcgtgcagcaaatggtgtgattgtgattaccacgaaaaaaggtaagatcggacctccttcaatttcctactcttttaccggaagtttatctcgtcgtccaagatatacggatcgggaggtgaatgtgatgaactccaaagaacgtatggctttttctcgtgaattggtggagaaaggaatcaagtttacagcattaaattcttgggttggttacgagtctgcgatttatgatttttggaatggaaaaatgaattataatgaattccaaaagacggtggatcgttatgaaacggttaacacggattggttcgatttgttgactcgggatgctttttctcataagcatacgttgagtctttccggaggtactgataatattcgttattatgggtctttgggatttaatgacgagaaaggggtcaataagggagaacaaaataaaacgtattcagcggcattgaatttgactgctaattataatcgtttctctgcccgttttgcgtttcaagctaacgtaggagaaaaagaatatactccgtcagatgtaggattgtttagttatgcattcaatacttctcgaacaattccggcatacaatgaagatgggacgttgttttattacgatagaacttccacgttggaaggaggttctagctctacgcatcctttcagtattttgaatgaaatagaaaatacttcagacgagattcgttcgagttcgttgtctgtaaatacttctgtcgattataaatttacagattatttaaaggcttcggccactttgtcctatcaggttagtaatacgaacgaggaaacttattttggggaaaagagtttttatgcagcttgtttacgtgatggaggattcacagaacagggaaaagtagcaaattacatgccttatggaggtgaattacaattgttagattctcgaaataactcttatacggctcgtttacaattggacttcaataaattcttggatgaaaatcatattcacatgattacggcttccgtgggaggagaactttcttcttcacgttaccgcggtttctcgcaaacacgtcgttgttatatgccggaaagaggagaatcttacgctcccgtggacgtggcggcttatcccctgtacatggaatggttggctaatgatgaagcggcattaggaaaacgtacaaactcgttaacgaacatgatatctgggtatttcacggcatcgtatagttatcgagatcgttatgttttgacattcaacatgcgtggagatgcgtccaataaatttggtagcaagagtaacgataaattcttacctatttgggctattgcgggacgttggaatgtgaaggatgatttatttgccaatcgtagttgggtgaatttattggcaatgcgtctttctttcggttatcaaggaaatatgttggactcgcaaacacccgagttgatcattaagaaaggaacgatgaacacgcaattcggaaaatatgaatcgaccgtgagttcattcccgaatccatttttgaaatgggaaaaaacggcttcttttaatattgggttggacttctcgttcttgaatgatgcaatcaaaggaactgttgcttactattacaaaaagacaaaagatgcctttttgagtaaaaccatttccgagatcaatggtattactaattatatggtaaataaaggaactttggaaaatcagggatgggagttcgctttgaattttgtaccctttaatccgcagggtgggacggatagttttcgttggagtatagacccacagattggtcaggtattgaataaattgatagccaaagcgattaataatcaagagaaagtaattcgtgatgaggtaaaatatgctgattatttgtctggtaacgtggaaattcctggacgcccgttggattctttttactcgtataaattcaaaggattggatccaattgacggccgtcccatgttctatgatgtggacgtggaaaataaggaaaaatttgcggatatggataaagaagaggtgtataagtacgtgatggattattccggatgtagagtaccgacgttacaaggaagcatttccaataaattgtcatataaacgttgtgtattagcttttaacttggcttatagtttgggttccaagatccgtttgttgaaattatacccgaacgtgaatggttcttatggtacaattgctccgcagccacacgagaatgctcgtcgggaatttttgaaacgttggcaaaatccgggtgatgaggcctacacgaatattccgggtattttatcgggagaagcattccgtgcaacaatcgtttccaactggtggtcggggtattcttactcttttgcggataatatttggtcgatgtatgataattcagatatacgtgttgtgagtggtaattatttgaaattatcttccgtgagttttcgttatcttttctcggaaaaagtattgaaagctttacgtttaaaatcggcttattttgaattgacgggaacaaacttatttacaattagtgctaaagaactgaaaggacaggatccagccactcaatccgggtcggcaaatacaattaacatgagccttcgtcctacttattcttgtcgtattaacatcactttctaagtttagagttatgaaaaagaaaatattatattggatcgtgtgtttgggactatttaccatttcgtgtggtgattttttggaagattattctcaagatttgacctatgcttcttcttgtgctgatttggaggaattacttatcgggaatggctacatgaaacaaaatgtgtcaacatcttttacggtgactggagacaatagtttttcttgtccatggattcatgttatggatgatgatgctatcgaaccggatcggaaacaacaatactcgggagctgtatatcaacttgaagagtttcatcattgggcaaagaatccgttccagaatgagggaaagacatttgatgatgctgcatggaaagattggtatgcgcgtatcgctatcgccaacgtggtaattcctaaagttaatgatatgctggatgatccggaagaggaacgtaaccggataaaaggggaagcacttttcttgcgtgcaggattttatttcttgttgacgaatttttatggacttccttaccgggaggcttcggcaaccacggatttgtctgtacctttaaaattgactgaatatattgaagataaatattattctcgtaatacggtaaaggaagttttcgagtctatagagaatgatttgaaacaagcggtccttcttttgaaaggagtagaacaaactactgtttatcaagcaaacgaggctgctgcccgtctattgttaagtcgtgtgtatctttacatggagcgttgggagaatgccgtggctcaatgtgattctatcatgcttctggataaatactcttgtttggattttaatacggtagatgcgtctaaaagtagtacgtatgcaggttctcccgaaacaatattttcacaaggaacttacagtatggattttatcatgtctgaaacgaactatagtccttattaccattatggttgggtggtatcagatgatttgttgaaaatctataacgaaaaagatttgcgtagaagtatttatcatactccgacaagaatgccgggagtggagggaacaactgacggaactttccgttgtatcaagttgaaagataagaataaagatggatacgtgtctgatatgtttctgttgcgttatccggaagtgatattgaataaggctgaggctcttgctatgttaggaagggagaatgactctaaagcttgtctgcaagagttgagaagtaatcgattcaaaggggcggatttgcaatctgtggttgaaacgggagatgattatatcacttttgtacgggatgaacgtcgtcgggaattatgtttcgagggacatcgctggtttgatttacgacgttatgccgtatctactacacatccttttacgaaagagatcattcacccacattatgaccgttgggcaggttctggttccggtgtaggggatgaaagaaatgaatatcaatttaccgggaattatagattgaaaaaatataacgaggaaacggcttatgtgttaccaatccccgagtatgccatgacatataataatggtgcgttagtacaaaacgagagagaagatcgtaaaataaataactaagactatgaaaaagataatatatgtattaggatttgttgtgttgatgtgcatggtagcttgtagtggcgaagatgacttgactccaagttcactggacaacaactggtgggtaaatgttgataatccggatgatccgttggatcacttcatctttggggtatatgaacaatataacgttcctattttctatacagataccgtggggacacgggaggagaaagatgcttttggcaattctatcatttattatgagaccattaaattggattacacaattttaggtggagttagtgatgctaaagttgtagagtattctttgtcaaaaaatcaggaagatatcatggatggagttgaatttctacgagattatgtgttgcccaaactgccggattatcttccagctccgaaaagttatttgttagttgatactttgtggcaaggacttgcaacaggacaagtgcgttattcttctgctgcatatgcgggaatgactgctgttgctgttggaaagttgggtgagattaaggaaatgactgcttcagaaaaacagcttttcggtggtgaagttttggctgcacctattgcttcagatatttattccgattataaatccgatcttgatgctaaatttttcaaagttttgacccaggatgtaaatcaattttatagttatgggcaaaaggtggatattaataatacgagtaaatataacccttattatgcgccttgtgaagattatggtttcttgaaacctgctcaagacaaggaaattatagaaggaagtttatattatttcccttcacgagatcaagatgtgaaagattatgtggctttgtatttaggtttcacggaggcagaagtacaagaaacctatggaaataaaccgcatgttcttaaaaaatatggtcttataaaagaaattatagaaag

SEQ ID NO: 125 - DNA, 10314 bp, Butyricimonas faecihominis
tatttaataagagcaaatatttcgaatgagaagtctgcgtgtttataaattctttttcgggtttatttttcctattctctactaatggagcttgttagctggaatcacttggaaaaaagagattcgaataattactttttgtacttgttttatagtttttttgtatattcgtggtttattatgacgggtataaaaaggaacttctcatcaattgttaattgttatgtttgatcgatataaaaaatcttttcctgctaaattgagtttgtatgtgatttcgttcattacaattctttcttttgttttagtgggcgtattttatcattactcaacggaaacgttgtcgcaggaggccgaggataagattgaaagtatggctgatcaggcgaatttgcgcgtgagtgcgttgttgagtaaggtggaaaagattcctgaaaatctgggatggatgatcgttgaatatgtaaaggagccggattctttgtttggtatcactcggcggattgtaaaagataacccggagatttttggttgcgcgatcgcttttgaaccttactattttccggaaaagggacattattttgcaccttattcttatatggtcggagattccgtgaagaccattcaagtagggagtgaagattacaattattttgagaaaggctggtacaaaggtgcgagggaacaccgatactggagtaagccctatcgggatgcgggagatccggatgtgatcacgacgtcttacgcggtcccggttcatggggaaaagaatgaactaattggtattttatctgtggatttaaccaatcgatggttgcgcgatctggtcgattcgatcaagccttacaagggtagttataccgtggttattgacaaacagggacgttatatcttgcgcagggaaggggaggtgatgattggtcaaaatatgttcgaaacggcaaaagaggcacgggatacgaatgttactattctggtaaacgagatggcagccgggaaaagtggtagtatcatcgtggacgatgggggagttctgtcctatgtgtattacacgccggtagtggcaactgattggtacatggcggtaatttgtccatacgatcaggtgtttggtaagttgagcaaatttaatatgtatctgctgattggctttgtcctgttgttgttatttgtttattttatttgttttgtggctgtacgacgaatcacaaaaccactgacgatatttgctgcttctgcccgagatgtggcccgaggaaactttaacactccgttgccacgtattcggtctaaggatgaattaggtgagttgtacgaatcgtttcttttcatgcaacaacaattgacggagtacgtggaccagttgcgccagacaacgacagcgaatgaaaagatcgagagtgagttgcgtattgcccatgatattcaattgggaatggttccgaaacaatttgtccccacctttggagccgaatgtattgatattcatgccgtgttgcatccggctcgtcaggtaggaggggatttgtatgattatttgatgctgaacgaggatgagtttggtttcgctattggggacgtttcggggaaaggagttcctgcctccttgtttatggcaaccacgatcagccagatgcgatctttggccctgcgggatacttctttgaattatatcatgaatttgatgaaccaaagcttgattcggaccgggaatacgagtatgtttattactttttttgccggggtgttgaatctgaacacgaatcgtctgagattttgtaatgcgggacatccttacccgttattgattgccccggatggaaccgtgtctttcttcaagactgcggataatttacctttgggtgttacttctgattatgattacgaggaacaggagtgctattttgctccgggttctcagttgcttttgtacacagatggggtgtcggaagctcaaaatgaacgatctaaattttataagatagatcggttatttaacttggtggcaggtcatcccagacttgcgccacggcaaatggtggataaagtggtcggggatgtgaaacgttttgtcgggaatgcggaacaatcggatgatttgaccgtgatgagttttcggcttaatgcccgtggaaaaaagaaaacagaggggtttttgtaggcccctctgtgaagtttcggaaacttttgcacgcacatttatagttcttttaatgtttgttggatgatttcttgaagttgttttgcttgcattttgtttacgatctgggtacaggtcagaaaggcttgattgtaagtctgtttggctttttctttattccccgtgtttttcaggcaatcgcccaacatcatcagtaaacgcgttcgggtttctgcatcgatattcatttctaaagctttcgagatccaaggaatacatttcatgtaagcattcttggacatcttgccttcaaaaacaatggcaaggtcctccagagcttgtgcgtaatctccccactcgaccagttcgccttttccggaataatatttgttcatgttctcgaaaaacaaatcttcgttatggcggtataggttatacgtggcgtctgccagtaaggtcgtggcttcttgggcggagagagtgccgaaagagaattcggagtatatgtcttttaaatctccgcttacccgtttcagacgttccttgtaactgaggtctccctttctgcatgaacgaataatatatccgttatttagactgaccagataactgaagatcgtcggtttatccacggagtctgcaaaccttttataattttttgtcacgaaatcaaagattgggtcttctttctctgcttgcgggtgatacagggttaggatataaaagtccgtgccgttgatcatgttctctaattttttgtttttacagtattccgggaaaaggctctcgattcgggaaccccatttttgcctgttgtatccgctttgggtagcaataaaacggggagcttctatcaataactgttgttgtatggtgaagtcgtttttctcttttttatatttttcgtataattgttcgaaactcaatgcttctcccaaggctattttgccattttgtattaaatcctccggggaaacggctccttggatgcgtcgcatttctttaccgttccggctgatgaataccattgtgggcaaggctgttacattatattttttagttaatactttattttcacccgcctcaacgttaacctgtacgcatacaaaattggaattgaaatatttaccgacttcttgccgtgtaaatatattgtctgccattattttgcatgggccgcaccaatcagcataaaaatccacgaacaagtctttcttttccgcttgcgctttctttaaagcctcttcaaaagttcctttgaacagaagcatttgggcggataattctccccatgttcccaagtaaaggaacatgaataaatagagtagttttttcatttcggtgtactataaaattgtaaaatgatttatgaaattaatttttatgaccaccattctagcttcttcttacaaagaaggagagtcccctcccgtttacatagaggggagggggtgtttgggggaatgactagttttgaatgacgaaggtatacacgtcctccattattcttgtccttccttcattcctgatctccagagttaccgtgtaggcacctgccggaacatgtttttcaacgccaaggtccacgtagataagtcctccgccttgcacgtgcacgtattccatgaacttatctccgtttccttgcgtgttctttgcgtccagaaccgtataaatgatgggttctgttcctaaaacgctttcaatttgggaagtcctccaaggaatgttaaagtcaatctgttcttggtatttcctgatctgttcttttatgacattcggggaatccattcctaattcatttgacgcattatcaatctggtctgagatgtcggcttgctgttgatcgacttctccaacttgttcataaagttcatctgcccggtccgatagtttttgtatttcaatcatcagctcttcttttctggcaacagttgttgccggatcgtaatattcgtcatacagaatatcttgagcatcatagatttcgtctaattttgaatataatttattggcatcttcttctagtcggtctagttctttctgaagttccgccgtgaattcctttaagtattcaagatttccctctaatttttcaatttttccttctatactgaaaatgtatagggtgtctttggaatatccggcattttccgtgaacaggtagccaaccgtgacatcgtgacatccgaaaaagagaatggaacatccgagtattaataaaagtatgattgttctcatcatggtcacatttaaaaattaatcaattgaaggtcatatcctagggcgtgaaccacaccgttgttcgtctggatgttggtagaggcgacccgccagtccgtgtttccgtttccctgtttcgctatccataattgatgggctccggctttctccactccgccgtaatcttcccagtatgtccaaataaacaaggaacggcctagtgtcggaaccaccattccccctgattcttcattagtcaggccttcctgtgtccggtaaccttcgggtacctcttccagcatcaagcgtttcgtgatgatcaagtcctttaagattctggcacaagtttctgccgggatgtctgttacccggtgccagtattcgctttcatccacttcttcaccgtaataatctttcaaatcgtccagttcttgattatggtccaagatgaaatggacaatacttaaactcgtgactccgaaaaatgaaatctgatcgtagccgcctttgccttcaaaaatgggttttaacccggcatgttcgatcatgatcattgtcgaatcccagtccgtgagatgactttcgaaatattcccacatggaacaattatgtatgccatttgccgtgccgccgtcaacataattatactttgtgcatgaacacatacagagtgtggtcagaagtataagatctattgtgatataatttaattttgatgccataaccagaataaattttgtttcattaatggatttttagtgaatgcattgttgtgtatacgtaaataaagagccccgtcttttacatcctgttcggacaaggttttgtaattgcctttcagttcttcccggaaataaccgttacggacaatatcaaaataacgttcgccttcgccgaacaattctctttcccgttcatggaagatttcttttaacaaagaggttttgttcgtggctcctgtatatccttttaatccggcacggtcccttatccggtccaggtcttttagggcttcggttgtcatccccagatgggccctacattctgcccgtaaaagaatcaggtcagccaaacgccatataatgcggttcccgtccattgctataacaccgatattttgcatgatgaatacaggattagtggtttttaccgcatcccgccatttattaatgtaggcaaaacgaggcttgaaaggagtttcttctccttcaatggtaagctcttctcctaatttgtaccagtattcttttcttcgttgatcttccgggtctgggaaaagttgtttcacggcatttaccgagattcgttcttctctaagagcattatttatttttctgggatcagtttccgtgtaagggtagttgattagcagggtaccgggataacgtaattcaaggttagctatatcataccaccggtcatcttgttcattgacttctattgaaaagataacttctttggtggctcttgctttacctaacgtattttggatcagcaagctgatattattttccagatcataaaatccagctttcccctcaattaccaaggatgcctcttgttcggcttttttccagaactcttctttatcatagagtcctcccatccatgcataaatatttgccagtagcgtgtgtacggatcccaagctggcatattgtcgtgaagttatcgctgcgccgttggcatctgttaatttatcatggggtgggagaatcaaggctgctttcgcacaacggattgcttctgcaagaacggtgtcaaccgggcttttggcacgggcttctgcttcctctgaaccgggagcgatcggagcctctccccagtgttgggctattttgaaatacattaatcctttgataaaatttgcttgtgccatccagtaatttacacgttctttaggaatattcttgattcgatactggttatcccgtagaaagtttgccatataaattgttgcgtagtaagtactccatgacataaaattgtcacatcctttactccaaaaagtttcataatttaattcttggtaaggttttgtatatgtacttgggtaatcacacgggagtcctacataatcaagataacgacctccataagcgagaatgtttttttcggaaccgaacatggttaccagaatcttttctaagtcgctttcactttggaaataattccggtatgtgacggaaatttccgattccacatccagccagtcgttacacgagtaaaatggcaggaataataaaaggaatattatttttttcataatcaacacgtgttaaaagtttacagttaatccgacagagaatttccggggtaggggatatgctccgctattatcaatgcctttggtaatgtccacaatttcaggatctaagccggaataattagtaagcaagaatagattctcggctgtcaaaaatatacgggcgcttgtcaatccgattttttgtgcgaattgctggtgcagattgtatcctagagtcaattgtttcagtcgaagcatgtgtactttctcaatatcacaatcatatcgtccgctgtattgattgcctacttcataggcaatcaaatgaggatatttcggtttgctgttttcttctccagtccatgcatttattttttccacgttgacatataaaggagctccatctgcattgggggttaaagagcggtcatcataggttcttaaaatgtgtctcccgatagagtatatgaagaaaatattcaagtcaaattgtttccaagtgatttcattgatgattccaccatgagcaaccggaaggggacttgccgcataatacatatcgttgtccgtgatagacccgttgccgtttaagtctgccaaacgacgagttccggtaaagaatacgccactggttgtaccaagcggatataacattccactgggtcttaaataatagggaatctcatccatattgttataaaagccttccattttatacgccaaaatgttgtacagtggtttcccgataatattatttccatagtcgtaaccgtcaccactcttttcgaaacggttccagtttctggatacatttattttcgttctccattttactgtagtttcccggaatatatcagccgttaattccatttccaacccttcgttggatacggcaagggcattctgccattggaatgtcatcaggtttaggttgccaggtaagtctacttgtcttagctgacctttcgtgtagcggtagtaataatccaatgtcattttaattcggtagtcaagaaaattgacatccaagccgagatcatattggtcggttttttcccaacttaatttccggtttaaaagtccacccaagcgatctggcatcattccttcttttcccagaaaatattgtccgctggggcccatcaggccatgtgccaggtaaggttggtaaaacttttgtcctgaacgtccccaactggcacggatttttccgaagcttagccagtagaatttctttataaaaggttcatccgagaaaatccagcctgcagccacagaggggaaggtagcccagcgcacgtcttctccgaatacagaggagccgtcccggcggatcgtagcttccagcatgtatttctctttgaaattgtatctcagccgtccgaaataactgttcatgcgttcttcttcaagactggatttgtatgtactggcggacttccatgtgggattactgtccttgtcgcttccccagttttcattaaccagtccactgctgttaccccactgcccgctagcgtaatgtacgtagtcattagggccgtctttggcacttccttcattcaggtaggtctggtctttttggtaagaaagtcctagtaatatgtcaaaataatgatgttcttttattttgaattggtaagagagtaaattctcgttgaggatagacaagcttctgcctatgcttccttttgtataggaacggtggaaatccgtgtctgccgtgctaggacggaagttattttgattttgttgattatagtcaaggccgcctgacactttcaagtgcatgttatggatgatttcgtaatcaagtaccagattgtaacgtaaggagtaactcagattcttttctatgttattgttcaatgcttccaaaagattgtctttaatatagtcactgcccggtaggagagaggattgggtgttcggatcgacgctgattccctcgattttctgaccggagccacctcgtcctccccggcttctgtcactgtaagatagggatatttggttgtccagttggatttttttcgtgggttgtgcggataaattggttatcacgttgacacgttcgaagtctgtcccgatcatgattccttcttccttgtaatatccggctccgatcatgtagcggaaattctcgcttcccccgcttgcttgtaggttggcgttatacacttttgcagttcggtaggcatatctgttccaatccgtggaattgttgtagaacgggttcaaactatcttgtaacatgtaagcgttttgtcctccgtcccgattaccgaaaaagtaattgtaaatagggaaatcgttgttttttgtgtatttatatacttcttcgtaggagttgggtataacccatttaccgtttgcggattgatagggtttcacggtattcctgtatgcattcatgttgtaattccggatgatgttacctccccatactttgatcgtttccggtaaccaagaggcggaataagaggcatttgcaacaaattgtgctttcccggcacgtcctttcttggtggtaatcaggatgaccccgttcccggcacgtgagccgtagatggcagcagaggcggcatctttcagaacctcgatagattcaatcattgacgggtccagatcggatagcgtgtttgtacccgtgatcggggaagtaaaggcttgcatcgggactccgtcaaccacgtaaaggggcgttccgtaattccggtcgctgccttctccgtcaacgaagaatgagttataaccccggatagccacgatggctccgccacctccgggagctccggaaagattatttacttcgactcctgccatgtgtccttgtaacaggctctccaggctatgtgtcgggagttctttcatttcatcggctttcaacgtggagatagaactgacaagagtccgtttcttttgtgaaccgtaagcaactacttgtacttcatccaatcccgacacatcagcctgcatttttaccatgactaatttgccgtccgtgtattttactttttgggttttgtagccgataaacgagaacacgagagtacctttggcttcgggtaacggaagtacgaaatgtccggcgatgtccgtggaggttcctacttttgtgctatccagcaggacggttactcccggcatcggtttgttattttcgtccaacaccttcccctgaatgatgaatagtttctttttgtcgtttttcgcttgttcccggaagagaataatcgtcttgtcgagaactcggaacgagaatcccgtgtttttcaggcaagtagccaatacttcttctatcgtggcccctttcaggtccagcgtgatattcgagatttttttcacggcgatgtcatcgaagaaaaagctatactccgattgcgtgcggatgtcgttcatcacgctttccagagaagcgttcttaaccttcaggtccaaccgcgtatcttgtgaataggtggcagccgaaaggtgtaggatgccgataaatgtcaagataaagcataacttcataattcttacttgtttttgccataatccacccgaggaatggctgtttttgtccatttttttcatacatttgtaatgtttttaatgagaactagaaaatagtttgggcatttgatgttgcgagcgtcagatgccttttttatttcgcttgaataaaaactgtgcgttgatttactgtaaatgtcac

SEQ ID NO: 126 - DNA, 10165 bp, Butyricimonas faecihominis
catcaatgacagcctataaggtgttttaaaggaaaataaaaacgggagagtattcaaagtttctcaggccacgaatacatcttcccgtcgctaattcaaattaattaacaatcaaaattatgaaaaaaaatccacaaacaaaagcgaggcaaaaaagagtactcgcactcgtgaaaacaaaatttccccgaagacgaaagggatggggacttatcgtattaccatttttatgctgtttacccttattgtcgaacgcaaattacacaaggcatcacccggaaatgaacaagctttccatgtcagaaagtccaacaaatgacacgaaaaaagagaccatcgtcatccggggaatcgtgaaagacaaagagggaacccctctaccgggagtgacgatcttgataaagggttcaaccgtcggagtgtccacggatgtgaaaggtgaatacgtgatgaacgtggaaaaacgagattctctagtcctatcattctcgttcgtggggatgaagacgaaagaggtaaagtggaccggccaacaaacgttgaatgtcgtgctagaagaagatgtaagcgaagtagaagaggttgtcgttatcggttacggaacaacaaccaaaaaagatttgaccggatcagtggcaagctttgactcccagattatcgaagaatcgacagcgacaagcgtggcccacatgatgcaaggccagattcccggtctgagtattctggcaggagacggggcgcccggtagccctgcccggttagagatccggggcgtcccgtcactaagcggggcaacctctcctttaatcgtggtggataacgtcccgatgacaagtgattttgacatcaacgagttgaacccggatgatattcagagtatcgacatactgaaaggagcctcttccgccgccatttatggttcaagagccgcagccggggtcatcatgatcatgacgaaaggcggcagacgagaccagaaaccggtaatcaattacagctatgattacagcataacgagcctcgtttccgacgtgaatacgttgaccacggacgagttcaaaatgctagtcatggaagccgtccgcaatggagcaaaagcggaaggatatgacgatattaccaaatactccaaatacgcaacgtttgccgcatcggatttcttcggggaggctaataccccgtggatgaaatacatcatgcgggacggttccaaacagcagcataaagtttccatccggggaggcggcagttccttcgggtataacgcctctttgggctacacggatgagctgggacaagtgaaaggaacgaattacgagagatacacgtatgacatcggtttcaacgccgatattaataaatggattcgggccaccgtgaaagtctccggaactctatccgacaggttaagcaataatgcaggcctatccaccgcggcgaaagcccgtcccgatataaaggcttacaatgacgacggttccttgtatttacattcatatctctattcagggcgcacctattatgtcgtgaacccgattatcgaaatggaagaaaacaccacggagagcgaagatcacaacgtacggctcacgggaaatctggaatttcgaattttacccgaactgaacctgatcacccaatacacgtaccaaacccggaagggggaacgttacgcttaccagtccagccgcacacaggcaggtagcggctactggggagaccaaaaaggtttcggaagaaaaacacatagcaaaaccgatagtaaagaactcgaaatacgcttgtcctacatgaaggattttggagagaatcacaaattaaccgccatgctggcaagtaattataacgacgaggaacaggagtattacacgctatccatgactgatttcccggatgactacgtacagaacgcaatatggcaaggagctaatccctataaatacggggcggtaaacggtagtgccagcggatccgtgctattatctttcgtgggaagaatcgagtataaattcatggatcgttacctcgtgaccgggacaatacgttcggacggttcatccaagttctccccgaaatacagatggggaaccttcccgtcatttgcggcggcgtggatcgtttccgaggagaacttcttgaaagattcccaaggactatcttttttgaaaatccgtgccggatggggaaaaacgggtaatggttgggtcggagaatacggatggagaaccttgtattcctctaccgattatcagaatatgccggcaacgataccgagccagatcgggaataacgaattgaaatgggagtcgaccaaacaatatgatttagggttagacttcggctttttgaagaaccagagaataagaggttccttaggtttctacaagaagaccacgaaaggcctgctataccctttcaccatggcattgagtaccgggatggaatcaaccagcgtgaatttcgccaacatcgagaacaagggagtagaatttgacatctcggccacgatcatccaaaacaaggattggaattggtctttcggtttcaatatcgggaagaacaaaaacaaaattaccggacttgatgcggaatacatctctgcccccgggcagacctacctaagtaacacggttatccgggaaggagaatcactgggattaatctatggatttgaaactgacggggtattccgttctcaagctgaaattgactactacgaatcactgaacccggactatcaatatcaagagcaatattcttaccggaaaaccattcccggagatttgaaatttgtcgatcaggacggtgacggccgggtaaataaagtatacgggaaccacgaggataaaatcgtgttaggatgttcccgcccggatttcgaaggagggttcaacacccgtttaagctggaaaggcctcacccttagcgtgcagggaacgttcagttacggggcgcaaaaggcatggacggcagaggctaatcaattctgttttgcctccacggggacagcgaacgtgctggacgttgcgctgaaacgctggaccccggaaaacccggatagcaattacccgtgcgtgcggctggatttctacaacaatgattttacagacttctccgtctataacgcctcgtatcttaaaatacaaaacgtcaacttggaatacaggttccccaagtatatcgtggacaagacaaagatattcgggaacatcagtgttttcgcctccgcaaataacgtgtataccttcacgtcctatcccggcccctctcccgaatcgtggagcagtgatgcaatccaaggagcctcggtcgacacggaggcttacccaaaaaccagaacgttcaatttcggagtgaaagtaaccattaaatgatttgattatgaacaagatatttttatatagtttattgtttctctttgcaataacgggatgtgacagtatgttcgatgatgaacttcccccgcatgaattagtcggggaaaatgcgatcacgaacgagacttccgcggaaacagcgttaaacggcatcttctcgaatttacagggttacgggacgatgagtgcaaattacatttgcgacaacgagtaccgcacgggattattaactgggacctaccggggaacattcgagacggacggcctgctaggtttcaaattgactgaagaatactcgtacgttgccgatccttgggaattagcttacaagatggtaaacgcggcaaataatttcatctattacgtggaaaaattatccgagaacctatttggcgagaaccggaaaacggaaatgctggcagaggccaaatttgcccgagcattcggccacgcgttcctactaagaagatacgggtatttctgggatataaacagccctctcggaccgatcatccgtctggaaccttcatccatctcgaataatagcatgggacgtagttccgtgaaagagagttatgaaaaaatattcgaggacctagactacgcgatactgcacggtccccggttttattccaaataccgctcctgcgcgacaacggccaaagcttttaaagcggatattctaatgaatcgcggagaagagggtgactatgcggaagcgattcgattggcaaatgaagtgattgccagtgatgagttcggattggaagacaaatacggagatatttttgccaacgggtattcttcaaaagagttgatgttcacgagacatatcaagactccacctagcatggatgataacgtgggcagcctgttcaaaatgttcggtggtgcaacctataaaccgacagagatgtatttcgagattctgacccaagacgataagcgttatgaggcgactttcgactccgtgatgcttggcaacgggacggctgcacgaaagacgcaggtgtggaagaaacattacgtcacgtccggcgattgcccgatgtactacatgcgggtagcccagatgtacctgatcaaggccgaggccatggctcgcacgaatgcctccataaaggattgtctggacgtgctgaatgtcctgcgtcttcgttccggtaacacgacttttgaggcggccgattacagttccctgtcagacgtgctggaagaggtgttccgggagaatgtacgggaaatcgggatggaaaacggggccattttctacctcgccgtgagatattccgagggcggtcgtcgaaagttaaaggacatgaacccgaacttcgagcatgacgatcaattatgtttccctattccgaaagccgaattggaacacaatttcgtagtagagcaaaaacctttataataccagacaacatgatgaaaatgaatatattaaaaaacggattccaagcattaattattatgtcattgatggttgcctgctcactcggtgacgtgttggaaccctccgatggagtaagcatggcgttaatggaaacggttgacacggtggtagccctgccgggagacacgataagttccaagttcatagcgtcgaccaacgggactactttacgtcgcattgaaatcgtggaaaagagccatgatttcaatgaattgaaggattctatccggtttgctctagtggatgaaacactggaactgacggtagacgaagagggatatttatcccgtcccgtttccaccgtgatgatgatttaccccgttatcgtacccaatgacaaagccatcgtgggcgaagtgcttagcatgaccttcaaagcgtataatgacaagggaaaatccggaagtataaaatcctcgttcaagatcgtgaactatgttcgaaacacgagttggttatggttgtataaacttgccggcaaaacccaaggaagtatgttttttaatccggcaaaatacaaggcctattcgaatagcagtttcgggacacacaaggacgagatcgacgtggcggcctacacggcaagcgacgggaaacactatttcctgaacccggccaacaaggaaacgcaaaacctgttcgtggcagacggaatggattatgatgcatcaaccatgcgaacgacaaagttcatcccattggatgctgtcaattttgaccttgctggggacgctgaactggaacggatggacttctcgaaagccgtggataaagtcgaagtgacaaccggaagtgtcatcggtttcgagaaccaagacggacgacggggaattatgaacgtgaaaatatcatcttccatctacccgacgatccagtgtaaatttcaagcggtggctaaaaaacaagaatgatttaatcccgaaatatcatgaagaacatatttataatcattattttaacgttctgccctctcgccaatctactcgcacaggacaagtacgaggtgttcagaaaggagatgtccctcatcgagaaacaagagaatgaatatcgaaaagtaatttggggtgaaaacgatttttcccaaggctacaaagacagcatttataaaaaacatcaagtactggtgaaagaaaaggtcgagtttgccaagaacgccattcgagagaatagagatgacgaacgattcttgaaagtgttggatatttatgtacgtaatttcttatccttagatgaatttgaaaccgaactgaaaagtttttcaaccaaggtacagaaaacggaaacctgtcaacgttacttcgagtttatcaagtacgcgagaataaatgtccccggcaaacaatgtattgatttcgagatgaaaggccataacggggaaaccataaaattctcggatgtgtataaaaaacacaagcttgttcttgttgatttctgggcatcttggtgtggggcgtgtcgggcaaccatgccctccattaaaaagatgtatgaagtctatcatgaaaaagacgtcgaagtagtcagcgtgtcgctagatgacaataaagaggcgtgggaaaaagcttataaagaagaaaatattccttggatagacgggagcaacctgttaggatggaaagatcctgtcgccctttggtatgctatccggggaataccgcacaaggtgctggtggaccagcacgggattatcgtcgctagtggctttcatcaactaggtagcttggaacatgaaatagatgaatatcttcattcgcataaaaattgatacttaaaggagatatctctttatgagatacctcctttttactcgtttagtttatatttcacctcgataatacaaacgattcattatgacattcttactttcggagcctgctgttctaattcatttgcttcgtctacctctcccagcactctcaatatacgagctttcactttcatgtattcagacttgtaataaccagaaggagctgattccatcaatttatccaaccaagcatttgcctcgttcatgaatgtttcatttccacaagtctcaacatgacgcaagaagtttcgaataaagtccaacttatcctgcggggtatagaaaataccgtattggagggagcgatacatttcgtccaacataccacgaatgtctcctgttttcaaataagccgctgcatagagggatgccacatactggggcactttgggcaggggctgagtaaaaagataggcaagcaattggtcatagcgttgctgattgaatacacctttatcaggcgtccaccaaacgaaactagatacggcacttttcaaagtgtaatccataaaaatatcaatggtatcgcgagaaacaatatgagagaaacggtagcgatttgcagccacttttttcaatattggagaaagaggatctgaaagatttcgaataataatatcccaagtttcacgagtataaaactcggtatcggaaagcccattgatatactccgaaaccacctttttttgcaactgtggacgatatgccttgaataacacatcaatgtactgttttacgaaagtacggtctcggtcaccagcgtcatagcgcatttggaaatcaagtaaagtttgttctccttttaatgctttcttaccattttgaataaattcggatgcttgctggttgcccactacacaatgtttcaacatcccgtctttatccacatacaacaaagtgggaaaagcggcaacgccatatttccgagccaattccggaccttcacctttttccatgtcaatttgaaaacagataaagtttacgttatagaaatccgctacactatcttgtgtgaagatattttttgccaacattttacaaggaccacaccaagaggtgtaacagtcgacaaatatcattttcttctctttttttgccatctttagcatttgttcccaatttccttcccggaactcgatggagcggttctgcgcccctatctcatcaaagagacagagactgcagaccaataatatatattgaattattttcattattgtgttgtactaatttcgttcacgatatatgacatctttcacaataccgaatccgtcgtaggaacggtaaacagaggcattctgcgaagaggtaacaggtaattccaacatacggacatgacctttcaaagcattatcaccaatagtctccttactaccgacaattaaacgatattgcatttctccactacctgccggtttcgaataatctcccattacaaaaatattgaacttcaacatggtgatttcctctcctgaaaactgagtaacaatttcgtcactctccatcttaatgggcaacaaacggcatgcttttgaattgatattatagcaatatattttgttatcaactgcataatacaaatcgtagtctcgcggatgtacggcaaaagctgttgcccgttcgatctcaggagcatccagttgataataatgcccactcacttgagcaacgtaattagaattaccaacctctattccatatatccaaagctttccggcgttgtctttcaatattgtatatgtttcccctttactaccatgcatcgtgttagacatatggacaaaacttttacctgtagtaaaagaaaatactttttcctctgccgatggcttttgcaccttattcatatcactcgtgacctgtacaaaacgctgatttgtctcatcatataaaattgcagtaccaccataagtgttgtaataaataccagacattcctattgctggagcaacatcaaaatagtccgtctcaccatcaagtttatttaagcgcattccgtatattgctccagctattgtcccctttccatacacaccatcctttcctatgcaaaggcgacaatccccataagttccaactatacaagtaggaacaaaaccatcgcgccactctgcaaactcatacatcaaatcattttcataatcatagctgaaatcatcatcatccaattttgcttgcgcctcttctgcaaggaaataaacaggacgaggtgcagacattcctcctaacaaatgaagcgacttcggtcccttaaattctcgcaacggactatcagcccaaaggtttctgattattttttcttcaggcgtagaggtcgagatcatgtccaaatgcgaaaatccttctgaatcctctgacaaaaccaaccaaccttcataggtggcagaggtcacttgtaaatcaaacccttgacgccaagtaactcccgatgttttatcttccaccagcaaataaacggtgtattttgcttccggtaattgcacaaaatatttcaagtctaaccgattgctgtccaaatcaaaggttgtcgcaccatccaccgaaccggatttcactactgcttgccatttaagcgaataattatttaaatctttcccctccaaagaaccttctatcacaggagttacccgcacggtatccaccaaacgataggcatattgcatttcttctggaaaaccggaaaaggtcacttgattaatttccgagtaatcataattccccaaatccttgtagcagctggtgaatgatagtacaccaagcacgaacaagagaacatatttcaatttttccatcatattcctgtttatttattgatacaaaaagtctcccattctcatctccttgtcaccgtccattatcgggtgctcatccaaataggccttcatgtaattagcaatgtaacttatacgtccggatcccatgtaagaagcggagaggaaagaagtacgcgggatttccatgactgtacaaatagtctcgaatttgaggggagaaaaggtgccgaaataatacacgttccaagtattgggggcttctttcatcacgttattgaacagaatacggtgcgtagtcttcgaatagacaacagccgaaccgctagtaagcacatcatcctcatagtacaaatggaaatcattattttctactaattctaaaatcacttccttgtccgattcatcattcgggcgtttcaccacaacaggtatcacgcaagaagtttctccactcggtacttcatagcgttcagccaaagtttcgtaatcttctcccgccgtggcattcttttctactaacttcacttccacataacggctcacaccttcttccacatcacccatcacggtaatctctaccgatacagtatccacatcctcatccaaataggcaaaggaaactaccgtagaatctacctccatatttatgtacgcgacattttgtccagaccaagtgtcgatcttttgttcacaacctaccaagcttaacaagcaagtcaaggccaaacataataatatagtcttattc

SEQ ID NO: 127 - DNA, 10141 bp, Butyricimonas faecihominis
attttaaagtttggattaaagtatacctttgtggctgagttcataaaaatgaaacaattaatacatcaaaaggaataaaataaagttattgtcatgctgaatattgcattgtttggccctccgggagccggaaaaggtactcaggcgaaaaagatcgttgaaaaatacaatctagcgcatctgtcaacaggagagatgattcgtaaagagattgccgaaggttcggattttggtaaaatggctgccgggattattaataaaggcgagttattatctgacgagtttgtggttgcgttaatcgaaaacagcatcgaacatcacaaaaacgtggatggtttcctgtttgacgggtttcccagaacggtgagacaagctgaaattcttgatgagatgctggctaagacgggacacccgttaagtgcattggtgagtatcgatgtgcctcatgacgagttaatgcgccggatgttggaacgtgctaaaatcgagggacgtgccgatgataacgaggaagtgattgaaaatcgtttccgcgagtaccgggcaaagacattacctgttgccgatcactataaggttcagaaaaagcatttctctgtgaacggtcatggttcggtagatgacgtgttcgagtcgataacaaagattctcgaagaggtacggtaaaacggatcaagaagaagagattgaaaggatgtttgcgagaacatcctttttattttaaactctagactcctttaaactttcttcgagtagcgccattgtaaaattaggaatagtagcccgggaacaaaaatgatggcggctgttgcctgcaatgcgatggagagggaatacagatcatgcaaccagcccactaatggggccatggctgcgaacataagtcggataacgaagttacggatggaaagtacggttgcccgcatttcggagaaggtaatttggttgatataccctttcaatataggagtggcgaatcctctcacgatgtaaaagaagaacaggcatatcaaaccaacgtaagatatgttgaaagcgaccgcaatatacccgctcacgataaaaaataggataaaagcgtacattcgcagacttcccagacgttgatccagtttatcggaatagagcgctgagatgccgacggtgagattcagtattgtccagatgatcccgaaccaggacgtgggggtatccagttctattaacaggggttgaacgaaccaagccatggtcagcgtggcggcaccgatcacgccggaaaacatgatgttatagcacagttccttgttcgtgaaaagggagtattgaatgattttcacgatattggcaaacgaattcttgattctggttttagctgcgtgttcggttagggccatggctgccgggataccgataaaagcgattccactctgtgcgtagaaaggaaatcggagagaataaacagccaacagcccgctgaaaatcccggcaaatgcttccgagaaattccctaccatggtaactcgtccctcgtatttcaaataagcgtcttcctttttataatatagcattgtatcataaagtaaggcggagtcagcaccggacacaaggctctgtccgaatccgagcaaaatttccgagaggaaaaacgccgtgaaagtgtcggaaatcgaatagttggtgaatcccaagaaacagaatatgcaacctgcaatcaagcaattccttcgtccccacacgtcggctaagtagcctgtcggtatctccaaggacaccatggcgatggaatagacgctcttcagaataaatatatctgccagatccagtccacattccttgtaaaacagcacgatgataggcatcactagggtaaaccatttggaaaccttgatcaagtaaagtgctattatattttttttgaacgacacgtgatttctgtttttctattcggaagacaaaagtagtttaaaattaagaataaacgaagtgattagaatctaaaatcaaaaagctcctttttgtttcagttttcatcaaaaagcgttatttttgtttccaaatttaaaacataaatcactaatcaagtaaaaaataagtttgccatggcaatacagaaaattgatgacatctacgagttactgaagggaaatacccaaaaaaagcgtttggttgtagcttacgctaacgacagtcactctatcgaggctgtgaataaagccgttgaaatgggtattgttgaagccaccttatgtggtgatgaaaacgagattaggaaagtgtgtaccgagcatggctttgacatctctcgttttaagattgtacacgaaccggtggacacgaaagcggctgctaaagctgttcaaatggtacgtgataaggaagctgacttcatcatgaaaggattggtaagtactgataaatatatgcgcgctatcttgaacaaggattgcggtttgttgcccccgaaagccacgttgtctcacgttgttgtgatggagtgtccgaattaccacaagttgttggtgttcagtgatgctgctattattccggccccggatttcagccagaaaatggcaatcgtgaagtatgttacccagattgccaacgctcttggtgttcagcgcccgaaagttgccatgatttcagccacggaacaagtacttccgaaagtggagtctaccacggatgctgccattcttgccaagatgggagagagaggtcagttaggtaatattgacatcgacggaccgttagctcttgacgtggctattgacaaagaggctgccgagatcaagaaaatcaaatctccggttgcgggagatgcggactgcttggtattcccgaatatcgagtccggtaatgtgttctacaaaacgaacacgaaattggctaacgctcgtcaaggtgcgatccttgtaggtgccaccgccccgagtgtgttgtcttccagaggtgacagcgtggatgcaaagctgaattctatcgcgttggctgctctttttgcaaagtaagataagttagatacaagtgaaaagccgaagttgttgtattaacacttcggcttttctgaattatttaaacaactaagaacacaggcttattcattttcttccgtgatgacgattttaataatctcgtctccttggcggatggcatcaatcacttctaatccctcgtaaacttggccgaaacacgtgtggcgtctatctaggtgagccgtatttctgcggttgtgacaaataaagaattgagatcccccggtatcccgtccggcgtgagccatggataggaccccccgatcatgatactggttatccccgtttaactcacatttgatggtgtaacccggtcctccggttccgtcacctctaggacaaccgccttggatcacgaaatccgggatgacccgatgaaacgttaatccatcataaaagccttctctggctagttttacaaaattggcaacggtattcggcgcgtctttttcgaaaaaaagaaccttcataacacctttttctgtgtgtatttctgctctgtacattacgaaattggttttgaattattgcaaacaaatgtagggtataatcctaatgaatgcaagctgtccaagtttatttaacgcattttctgttatttgcatatagttaaaaaaagaggtgttttcgggaatttaacaacctgaaagatcaaaaatatcagtatgtatttaaaaacttcgtcgtatattcgcgtacgattaaaaatagagagtatgacgtgttgtaatagcagacgaaaaccggaatggttgaagattaaattaccgaaaggacagagttccacggaggttttaaatatagtcagaaaacataatctacatacgatatgtaccagtggtatgtgtcccaatcaaggcgaatgctggggaaacagaactgcaacgtttatgatcggcggggatgtatgtacccgttcgtgtaagttttgtaacgtgaaaacggggcgtccggctccattggacccggcagaaccggaaaatatagctaactccgtgaagttgctcggtttaaaacatgccgtgatcacttccgtggaccgggatgatttggctgatttgggggcagctcactgggtgaaagtgatcgaggcggtgaaacgggagaatcctgaaacgacaatggaagtgctgattccggattttcagggaagacaggaactcgtgcaacaggtgattaatgctcgtccggaagtgatttctcataatctggagacggtgagagaattgtcggatggcgtacgtagccgggcaaaatatgatatttctttacaagtgatccgtcaggtttcggaatcgggtatcgtttccaaatccggtattatgctgggattaggggagactcgtgaacaaattcttcagacgatggatgatttgctggcagtcgggtgtaaagtaatgactatcggtcagtacctgcaaccgtccgaggcgaatctcgaagtaaaagagtacgtgacaccggagacctttaaggaatacgagcgtatagggttggaaaaagggttccgttacgtggagagcggtccgttggttcgctctagttaccacgcggaaaagcatgtgagataagttatgaaacgtacacgattaattgatctaggagtggcgagctatatgcccgtgtggcaacaacaggaagagttgcacaaggggattattgccgcgaagttaaagggtgaggacacggagaattgtatgattttcgtggaacataatcacgtgtacacgttagggaagagcgggaacgaggcgaatatgctgattagtgccattcagttgcaggcggctcatgctgaattcgtgaaggtaaatcgaggtggggatattacatatcatggccccggacaattggttgtgtacccgattattgatatggctaattttggcgtgggggtgaaggagtacgtggatttgttagaagaggtggttattcgtaccgtgggagagttcgggattaccggggaacggttggaaggagccacgggggtatggttggatgcacatacttctagggctcgcaagatatgtgcgatcgggattaaatgttcccgttacgtgacgatgcatggtttcgcgttgaacgtgaatacggatttgaattatttcaattatatcaacccctgcggattcgtggataagggggtgacttctatctcgaaagaggtggggacagaggttcccgtggcggaagtgaaagcggtcgtgaagaagtatttcgaggaactcttcgggatggatttttacacgttttaatacaatttggcgggaaatgtcatacacttcccgtcgtgtatctattcttgtttattttaatgtaatgtgcttatttctcccgttatccttttttgacatgtgatactctgttgaatgtatgtaagttagaaataacttgaatgtcaaggagtattttatctctgttttttatttgaagtttgtcgataatttcattatattcgtagtatgaattaaccaataaacaaaaattgacagagcggaatgaagaataatattgaggtcgaaatatgtactttttctttggaatcatgcttgaatgcccagttggcaggggcatcccgggtggaactgtgttccgggatgtatgacgggggaacaaccccgtctgcggctatgattcgcatggcccgggaaaagttatctatacaactttacgtgatgattcgcccgaggggaggcgattttctttattccgatttagagttcgaggtgatgaaggaggacatccggtttgccaaagagtgccgggcggatggtgtcgtgttgggtatcttgaatgcagacggttcggttgacgtacaacgtacgcgggaactggtcgaattggcggctcctttaaaggtaacgtttcacagggcgatagatatgactcgaaacatggaagaggccttggaggggatcattcaggccggatgttaccgggttttaacatcgggaggacgcaacacggtaagcgagggaatggagcaaattaaagccttggtggagcaggcgaaagggcgtgtgcaaattatggccggaagtggtgtaaatgccgcgaatgccaacacgttaataacattaggggtggatgctattcacttgagtgggaaaagtagtcgggacagtgaaatggaattccgtaacccgaacgtgttcatgggcggggtttcgggactaccggaatacgagcaatattacagtgatgttgagaaaataaaagcagttttagacaacgtgaaatttagaatataaaattcagggtgtgacgttcattctatgttttacattctagattctaaattcaatatatgcgaacatttgtagagaagatattaaatgccgaacgtgggagcattgtggtccgtgaaccggattatgtgatgagtcatgataattcggcacgggttaggtttttgtttgaacgaattcatggtacccgagtatacaatccttcccagttggtgatagtgctggatggaaaggtgtctgggttagtcaacgaattatccttggaatataattcgatacgggatttcgtggaagagcagggaatagagcatttttatgactgtgaccgtggaatcagccaccagattatctcagaattggtacgtccgggtatgttggttgcggggagcgattctcatacagccacggcgggagcgttcaacacgttggctgtgggaattaataaaacagagacggccgtgttatggaaaacgggcaaaatgtggtttcaggtgcctgaaacggtgaagatcgttttgaagaatcgtttgtcggaaggagtgtttgctaaagatttggctttatggatcaagggaatattgagcgagttggacgtgaacgggcaggcaattgagtatcacggggaaggggtttcctctttgtccattgatgatcgaatgacaatagccaatatttccacggaaatgggagtgatcagttcggcttttcccccggatgatcggttggcagactattttaacgaaccggcagtgcggggtgtttgggcggacgaggaggctgtttattctcggtttatagagattgatctggccagcgtctttccgatggtatatgacacgagaaacgatgttcttcagggagtggaggaacttgtcgggttgaaaatacagcaaggacttatcggtgcttgtgcttcaggacggttggaggatttacggttagtttccatgatcttggaaggaaagcgtattgccaacgggttccaattgttcgtggttccggcttctaggagtatatatttacaggctgttgaagagggtattattgataagattgcacagtccggagccatcgttcttggctccagttgtgggccttgcttgggagtgggacacgtggcgtctgccggaaatagccgttttatctctactgccaatagtcggtatatcggaagttcgaatcattccggtgttgaaaaatatatagcctctccggcaaccgtggctatgactgcgttgcgaggagaactaacatcaataatacacttcgagggcgcacggtataaatataaagctccccggatagaaccagtcgtgttggaagggtatgattatcgtaagagtaacggggtgtggaattacggggatatagataatatatcaagtaaccagatatttgcggaaaaattgatgtatcgcttgacccttgaacaggtggaggagattaaaccttacttgtttggaggattggatccgaatttcgcttgcgacgtgaaaccgggagatattattatcgccggggagaacttcgggtgtggtcaactggtgaaacatgcagcgacgggattggtagccgtgggggtaaaactggtgattgtaaaatctgtgaactgggatttttaccgtatggctattaatcacgggttacggattcttgttgattgggccgtggtggatgcttacacgtcaggggaacaactggcaatagatgatgaaaatcatttattgtatttgaacaagagagcgtataagctcccttatgttgatgcggagtttcaagaaatcctcgaaaaaggaggattaataaataccttttcttaaataagaaaaggttattgatattcatgtgtgtgttgtttttttctgttccggggtgccggaatggggaagagggcaatcctttcgaggattgcccttatttatttttgggcgtaaagcctaaaacagcgggatatggtaaattagcccgatggataaagttgatgtagagtagttctcggctcctaatgttttggccttgtccgtgaatcgataagaacgtccgatgtacgatgcgaagaaatgtagattttccgtggtgggatagtattcgataccaccgaaatacccgtaagccgtccggtatttgcctttctccagttgatcggaatgcttgtaaacagaggcattttcgtacattcctttcacgaaaatattccatttgggctggaaacgatagtttaatttggtgacccaagattcgtaacgagcatttttgatgcaatctgcctctccttgaagtcggtagaggcttgaaataatacctcggttatccagttcttcatcggaaaggtagaaatcgaggtacatgttgaactttcccagatctaattcgttaccgatggcataaaaatgattgttatatccttttgccagactgagcaaggaatatgaccaacgggttctaaatttatcgctgaagaaattgccgttccagttggccgtgtaagcgaggggcgcacgactttcttccacgtcttccgggagttgcccgtaaatatcatccatggaagccgtccggctgttcacgacttgtaaggctatttcttgggtaggggtgacttgataagagaacgtgattccggtcatgaaatcgaagagcatgtaatcgatcatgtcactgtactggtagatttcaatcggatccagatcatattcgaaccccccgtatgctgccgcctgtttcccgatggaggtgacaaactgatcagtcaggcgtacagagatcatggcataatcgatggaggagggaaggttatccagtgcgtggggcgtgttactgctgttcaggcgttgacgccaacggtaagaaagccagtcattgatgtccccccgggcttctaatcgaagctggttcattttgaaggctgcttgctcgaatgttccgtctgtgaatgcactgttgaatgtggcttgcatgtgcagtttcaggttaaaagtattattctttttttcgatattcgatactctttcaaaaagagagcgcccgtttgtcgtgtcgtttagatgggataacagaccttgggctgacagactctgtaatgatagtgctaatagcgtgattagtaatagtttttttcttttcattgttatcggattaaaaaaactaaaagctggagatcgttcgaaaacagccttccagcttttagtggttacttactgattgtatcttatttcaaggtaccttcttctgcttgtttgatcatgtttgcgcttgccgtgatatatacttcgacacgacggtttttagcacgtccttctgctgtactattgtcagctaccggttgatcgaatgctaggccttccgtggtgattctgttgcgggcaatcccgtttccaactaggaagtttgcaacagcttccgcacgttctttggatattctttcatttacggcacgggttccggtgttatccgtgtggccgtagatcgtgatgtctgtttccggagaattctttaacgacgtggcaaattttgtcaaggcatctctggaagatgaacttaattggctagagttcgtggcgaacaatatgccgttgtcaaaagttactttaatggcttgtaggtcatttgcatctgtaacagtttcaacctgagctccttcaatggcttctaactcttttttctgtttatccatctttctgccgattaaagcccctgttccagctccaacagctcctcccacggcagccccgatggcagctcccttacctttaccaaccaaggctccgataccggctccaagtgcggctccaccaccggccccgatggcagcgcctttgcccgtgttgctcatggatgcacatcctgaaaaaataatgcttgcgcttaatactaaaatag

SEQ ID NO: 128 - DNA, 10116 bp, Butyricimonas faecihominis
atacaattctctatactataagcaaatggttgaatgattaaaattgattggttatgggaatttgtatattttttatcgtaatagctatttcgggacttttgttaccgcattttttagcagaacctgaaatgaagtagagtgaacctaatcatcttgatgatagacaattattaatataaacacgacggatatacgtcaatatccgttagtaagagcgggagttttattcgtgtagttggaggtttgaggagatttattacatttgtttcaagcaggtatctcttttccagagggttacctgctttcttttcctaaattccgttaaaaacttttttgtttagtcgattaaggctattttcgtgttagaaataaatcgacttatggcaaagattttaatcgtggatgacgatacaacattttgtatcatgctgagaaaatggttggaaaaacgtggatttgaggtagatactgctttttcctacaaggacgctgtaaaacaattggataaagcaggattcgatctcgtgttgacggatttgcgtttgccggataaggacgggatcgatttgctgcgggtgatcaaggagaaaacaccggaaacacaggtgcttctgatgacagggtatgccgatatacagaccgcggtcacggcgattaaactgggggcttttgactacgtggccaagcctgttatcccggatgagattcttaaaaagttgcaggaagctttgaagttggaggcagaacccgttgccaagtctgttcctgcaaaagcgaaaacgacgagcttttcctatataaaaggagtgagtgaaggtgccgatcggcaatatgaatatattcatctggtggggcctaccacgatgacggttttgattaacggggagagtggtacgggtaaagagtatatcgctcgcctgattcactcgatgagtaaccggaaggacgggcctttcgtggcggttgattgtggggcaataccgaaggaccttgctgcgagtgagttcttcgggcatattaagggttctttcacgggtgccgttaccgataaacaggggtatttcgtgaccgcatcgggggggactattttcttggatgagattggtaatttgccttatgacgtgcaagttcagttgttgcgcgcactcgaagagcgtaaagtacatcccgtgggcggaaatgttgatattccttttgatgttcgtattatttcagccacgaatgagaatctcaaagaggccgtcgcgagtggtcgtttccgcgaggatttgtatcatcgtttgaatgaattttccattcaggcattgccccttcgggagagaaaagaggatattctgatttttgccaatcatttcttggataaggcgaacgaggaactggggaaacaagtgaccgggtttgatgaggaggtgatgcgtatttttagaacttactcgtggccggggaatttgcgggaaatgcgtaatatcgtgaaacgggcgacgttgttgtgtatgggaagtttgatttccaagacctgtttgcccccggagttggagcaaaagcccgtggagcctgaaaggacatctacaacacggcgggagatggaaatcgagctgatcaaggatgccatgcagaaatgccggaacaacaagagcgaggctgcccgtatgctccagatagacaggaaaacattgtataataaattaaaaagtttcggtctggaggacttatgagatattttgagagattattgacgtgtttctttttccagtaattggagaacattgtttccttcttgcaggatcttttcaatactctctcttattttattttcctctgtatccaatggcattttttccaggaaaagcaacgagggaatgacatcgttaatcgctagttgcttgaacatgggtagcattttgtgtgctaacttggcaatctgttccgtttcatgtgattccagatgttgggccaatagctggaaattggtcttgcaatccgatataaaagacccgataatttgattggcggcatctttgtcattgtcggcaaagaccatgatcatatctaaattgtaaggggcgtttttatcagaggtttgtgttgtcggctgtttggtttctatcgcacatcctaacaggtcgtttaccctgctatatagttgttccggggtatacggtttatttagataggctgaaaagccggcttcttgatactctttttcgtgcatatcgtcacgggcagacagagcaattaccggaaggctttttatttgttggttttgggattctcggatttgttgcacgagttcgaacccgtccatttccggcatctggatgtcggataaaacaatgttataattccctttttccaaacgggatagtgcctcttgagggtgcgtacacgtgtcacactggatgcctgcttttcggagtaattctgtcgtgacggtcagttgaagaatgtcatcatcgatgataaaggctttcatcccttcatgcctaaccgggggtgaagagggtgtttctgtcggttgggattcttgtgctgtggcctttatcaacgggaatttaaccgtgaaggtacttccctcgccttttttactttcgagggttaattcaccatcaagtaaatgaacgagttgtaatgtgattgttaagccaagacctgtgccttccgccccgttgttatgctgcggggttaggcgggtgaattctttaaagatcagttcttgttcctcttccgtcattcccggcccggagtctttgattacaatgataaactggtcgtcttttgtaggggaaataaaggcggataaagaaacctttccttcccgggtgtattttatggcgttcgataggatattaaccacgatttggcgaactttcatggaatccccgaggtaaagtccgttcagggcgttgctaatatcgcttttcaattccagactcttttgtgccgctagaggaaggaaactatccgtcgtctcctgtaacagacgtcccgggttatatggaaccgtgttgatctccattttattggattccaatttggagaaatcaagcatgttattggcaagatgcaggatatgttcggctgtccccttcatgtttttgagaaaatagtgctgtcgctcctccagttgggtgttatttagtagttcaatgtacccgatgatggagcttagaggggattttatgtcgtgagtgacagtcagcatgagtttctcccggttatgtagcaaccgttccgtgtatgtttttgcagcttccagttcccgcctgtatcgttgactttgcgtgatgtcattgataataagaacgacgaagaagaccaccagcacacaagcgatgatcgcgatccaagatatggttctggtgagatgatgtgtcgtgatttgctgttgttccaagcgaatcatcgtgttttcgagttcttctttttcaaggtctttcagtactcgcttgaggcgttccgtgatgtgttgaccactttggataacgatcgcctctcgccgggagacttccgcatcgatctcttccttttgctgctggtactggctccatgaatcccgaatcacgttcattaatgtgtccgtgttgttgtttgtcgtgaccatactgagcgtgtcaacgatgcgatggagggttgtgtcaacttttaggatggaatctcttttcgtccggaataatccttttctttcccggatgatgtagttactgtcaatgacggtaatgattttttcccggagatcggggatgatatctgccgaatctttgagcgtgcctattttttcgattgttttgttgtagaaatcctctgggatgtaatattttttgacgtaatacaagtctttcagattcttgatccgtttgcctaaaagcgtatttatcgtgtctattcgcaggttttgttccgagctgatggatagatttttcaaggtatccatgttgtccttgatgtcctctatcaatttcatataggtgtcaaaattcttttgtgttcccgtttgggaaaaggcgattccggtattttctgcctcgtatagtttggtgagcgtgttacttatgatgaatagtttttgttgcatgacgatttcatcattccctttttgggttaaggcaatggtttgtttgtagataaagacaattgcaattgctcctaacaagagaattaggatatatcccgtgatgagtttgagtttggtaaatttgaaaggtctttgcatagcgaacagatttatagcaaatgtataaaaaaatagtcaaccaattagtaaggttgactattttagacgtgctgatgtgctactccttaaagttcgtttttatagaatgaataagtctcttctataatttccggtgttgcggcattcaattgatataaaatctcccggcaaaattccaaaggggcattaccgttagccgttactatgttattgtctcttacagcttggtcgtttatgtaattagtttcacccgtgtactgggtacctgcatattgtttgaggtaatccagcgtgttacttgtatgttttacgtggttgaggaaaccatacattccgagatacacggaggcattacagattccggcaaccagtttgctttccgcaattgctttttccactaatgatgcgatgggtttcgcctcgggcaaaaaccagttcatgccgccgatgagtataagtcctgcatgatcatccggtaggtcgttaatatcataatccggcaataccctgaatccacctatcgaggtaatgggttctttggatagtgacaacgttttcaccttgtatttaatcggacatcccggtttgacacccatatttaggcaggtggagatataagcaccttcccagtctgcaaaattgtttagtagtacaaaaattacttcttttttatccattcttttaatatttagttttatcatcttcttcgtatcccggtaacttgtacccgatctgttttctttccttgcatcctcggtcttttacctgcaattccgccaaggtttgatttattagttcaagttgcatccgggtatcgtcgttaatgtcgttgtagtcggaaaacacttcttcgatatagttttctatcgcatccattcgtttttcgagttcatcgatcttatttgttttggggctggcgatcatttggcgaatagccacaaaagcccgcattattgagatatttacattaatggctatatcactattgaggattccggataacatcgctaacccttgttccgtgaatgcatacggtagatatttcgtgtgttcccctctaccattctttaagattccaatttggaatcttaaagcttcccactcttcagctgttaactgaaacatgaaatcgggaggaaatcttttgagatttcgctttacagctttgttcaagttacctgttgtgacttggtataactctgccaaatctcgatccaacatcaccttccgtcctctgatctcgtatattttgctttgtatcaattgtaaattatccatgattatgcttgcgttgtttatttcttttcctcctcttcacatcccggtagtttgtatccgattctttttctttccttaaatccccggtcttttgtctgcagttccgctaaggtttgatttattaattcgagttgaatcatggtatcatcattgatgtcattttgatctactagaacctcttccatgtattgtttgagttcctttacttgtgtttcgatcctttcaacacggctttctatggggttggacagcatttgccggactgccacgaaagcccgcattattcccctatttatttctatcgcaggcttggagttcaaaacgctactaagcatcgctactccgagttcagtaaaagcgaaaggaagatattttatattgcttccacgtcccttgttcaaggtcgcaaattgcgtccttgaaagttcggttatttctttttttgtaagctcaaacataaaatcatcaccttcaaacctgtctatattacgcctcacggcttctttgaggcgttttgtttcgacacagtacattctgctaggtcgaagtctaacatcaccttctgtcccctaatctcgtatattttgctttgtatcaattgtaaattatccataatcacgctcgtgttgtttatttcttttcctcttcgcatcccggcaactggtacccaatccgtttcctttccttaaatccccggtcttttgtctgtagttccgctaaagtttgatttattaattcgagttgcattcgggtatcgtcgttaatgtcgttatagtcggaaaacacttcttcgatatagttttctattgcatccattcgtttttcgagttcatcgatcttatttgtttttgggctggcgatcatttggcgaatatccacaaaagcccgcattattgagatatttacattaatggctatatcactattgagaattccggataacatcgctaacccttgttccgtgaatgcataaggaaatttgcgagttcctccccaatttgatattccattttggaagatcaagttggcttttaattcatcaaattcttcctttgtgagctgaaacataaagtctggagggaatcttttaatgtttctttgaacagctttgttcaagttacctgttgtgacttggtataactctgcgaaatctcgatccaacatcaccttccgtcctctgatctcgtatattttgctttgtatcaattgtaaattatccatgattatgcttgtgttgtttatttcttttcctcctcttcacatcccggtagtttgtacccgattctttttctttccttaaatcctcggtcttttgtctgcagttccgctaaggtttgatttattaattcgagttgtatccgagtgtcttcgtttatgtcgttttggtcagtaaaaacatcttcgatgtattctttcagttcctttaattcgttttttagttcaccgatattatcaacaggagaggtatgtattaattgacgcattgcgacaaaggctcgcatgatacccctatttatctcgatggcagttggtgaattaagaacactgctaagcatcgctactcctaattctgtgaaagcaaaaggggcatattttatgttggatcctcttcctttgttcaagatcacaatttgtgatcttgaaatttcttctttggtaagttcaaacatgaaatcttctccttcaaaacgtgctgaattacgtctgactgcttgtttaagtaccctagtttcaatgccatatagctctgccagatcgaaatctaacattactttctggcccctgatctcgtatattttactttgtatgatttgcaagttagccataattacgcttgtgttgttctatacaaatgtagggaaaaacgagaatagtttgttgttttggcttatatattggctatataaaaaacaacctgctataacattttgtgttttagcaggttatgtggtaaagtggtgatccccacgggactcgaacccatatcaaaggaaccggaatccttcattctatccattgaactaggggaccatattatccgagtgcaaagctaatcaaatttttaaaaaaagggagcaatttgctcccttttttaatgtataatagataaactattttacctttttacgagtagcgtagcttacacgtaaagaattcgctttacgcaattcttgttttacgtcggttacgatacccatttttgtaaactgatcaacttttaagttattcgtgatcatgttccgttcttcctctttacgagtttcttgttcagcggcaacgaaactactgatttcacttacgtttgccagcttatcattcaactgaatacgaggttcacttccgtaagtagccacgtactggtctttcggttttccgatgaagatattactaaccaaagattttttctctagcttgctaatctcttttgcttcgggcataccgttatcaaccatcacgagaacttctcgcatcgtggtactaaccatgaagaagaataatagcatgaacacgatgtccggtagagacgctgttgaaattgcaggggtctcttttccgccttcttttctaaatttagccattacttctttcctcctttcccgatgtttttaggttcagcctcggatatagcggtaggaacaagttttctcacagcgtccatttgttcttccgtgagttcgctatatttcttaccccatttttccatggctttcatatccctaatttcattatatgctgctgtcagttcatcttgaacggcaatatacattttgtatgaagttcctcggtcactttgaagagagataattcctcttgaaacttcagcttgtccgaagaaaggaatttccttaacaactttactcggtaaatcttctctgttttgcgggttcaaaataaactctttagccttttccttcaggttctcaatttgcatcagttccccgttcacggccaacaaatcgttcttgtttaccaacacttgtaatatattacgtttggcaacaggaggtgcaatcacctgatctggtggcggcatcggtggtaaccgtctgaataatcccgaatccacatccatcgttgttgtcatcaagaagaatgtcaacagcaaaaatgcgatatccgcggtggaggaggcattaatttctggtgttttttttcttgccataatctcttttttatccttcaggaaaattatctaacgcgtctaataatttctgtaacaacaatagcaccaatagctcctattcccaagaaataagttgtgattaggatggtgtcagtgaattttaaagttcccggaacgttgtccgcaccgctatatcccggaatattcatgatagttccgtcagacatcgagtaagcgattaacacgaggagaatgatccctgcaagggcaataaagctcttcatcgcttcctttggtctggtgaataatctagcaaccgggaatattaacgctgcaacaatggcaacgccaaataaaagatatgaccaccatagtagttgttccgtgtataccggggtggaatattgtgagtttggaagttcgcctccaaaataaaataaccccaataacacgatcgtaacgacgaacattacgatggtcatgatgtttaatattttgtttattttctgcatggtttagtgtttttgattgtatttgacaagaatgtctaataaagttacggaagcgtcttccatgtcattaacaatactttcaatcttagcaatacagtagttgtagaatacttgaagaatcatggccacgatcaaaccacccacggtcgtgatcaatgcaaccttgatacctccagccaccaatgacggttggatatctcctgctgcttgaatcttatcgaaggcgtcgatcataccgattacagttcccaagaatcctaacatcggggccaatccaataaacaaactaatccaagacattcctttttccaaaagtcccatttgaacagaaccgtatgatacaactgatttttcaaccatgtcgattccttgatcatagcggcataacccttgatagaaaatacttgcaatggggcctctcgtgttgcggcaaacttcttttgcagcttcaactccaccgttgtttaatgcatcttcaacacttacaattaattttttcgtgttggtagaagccaagttcaagtaaatgactctttcgatagcgatagccaaaccgaagatcaaacacaagataacgaaactcatgaaggcggcacctccctcgatgaatttttgtttcaaggcagcgtggaaagaagtactttcgatttgtgattcgtcttctaacacggtaggatctgtcgtttcctcttcttcttgataagtttctgtcgtttcagtggtctctgtttgagttgtttcattctcttgagccattagcatagatgatgctccaatagtaagcattcctaaaactgctattagtgcaaataattttctcatgatcaatttaactgatttttagtttattaataattaaaatttaactctataatatctatttaagctgtttcgttcttgttttacaccgtgtgccggttaaaatcgggcaccaaggtataaaaaaaatgttaaaatccaatatatttgggggatatttctccctttaagcc

SEQ ID NO: 129 - DNA, 10078 bp, Butyricimonas faecihominis
ggtggtatattttgtaagtggaatagatacagatgccggaaagtcggtggtgaccgggttactggctcgctctttgagaaagagaggggtaaacgtgattacccagaagtttatacagacgggatgggtcggtatatcagaggatattctgaaacaccgggagattatgggaatcgaaccgcaacccgtggataaggatgggacgacgtgtccttacgtgatgacgtatccggcctcgcctcatttggcggcggagattgataaggtgacgctggatatggagcggattacggtttcaacccgtaaactggaagctttgtacgatatggtgttgctggagggagccgggggactgtacgtgcctgttactagggattatttcacgatagattatattcaggagtatgattatcctttgattctcgtggcgtcttccaaactgggaagtattaaccacacgctgatgagcctagagctttgccgtacgcggggaattaaggtggcgtgtctcgtgtacaatcgtttcccgaatgatagtgagtggatcacgaatgactcgattacgatattcaaacattacttggaacaatatttcccgtcgacagcgttgattgaggttcccgtggtacacggaaccgattatccggacgtggatgtcagcgcattggagggtagaagatgagaagagtggagctactttccccggcaaagaatgttgatgtggcgattgccgctatcaataacggtgcggatgccgtgtatatcggtggtccggctttcggggcccggaaagcggtagggaacagtctggaggacatagagaaggccgtatgctatgcacatcggttttattgccgggtgtttgtcacgctgaacacgattctttatgacgaggagttgccggaggtagaacgattgattcacagcctgtaccggatcggcgtggatgctattatcgtgcaggacccggccatattgaagttggatttgccaccgatagcgttgcacgccagcacacagatgcataattatgatctggagcgtatcaagtttctcgatcggctaggattccaacgtatcgtgttggcgcgggaattgtcactggaacaattacgggagattcgccgggaagtgaaagccgagctggagtatttcgttcacggggccttgtgtgtcagtttaagcggacaatgctatatgtcacattacttgacgaaacgatcggctaaccggggcgagtgtgcccaagcctgccggatgcagtggacggtggaggatgatgcgggaaaggtggtgctgaaggataagtatgtgctttcgctgaaggatttgaacttatcggctcatttgtcggagttggttgaagtaggcattgattctttcaagatcgagggacggttgaaggaggcggattacgtggcaaatgtcacgagttattactccggccgtctggatgaaattgtggctcgcaatgaggatttggcacgagtgggagccggatacgtgaagaccggtttcgaggccgatcccgagcggagttttaaccggggatacacggactacttcttcgtgcagaggaaaacgggtatggtgagcatggattccccgaagtcgatggggaagaaggtggccatggtgaagcaggtgaagggaaatcagatgtgggtagagttgttggaacccgtgcataacgctgatgggttgtgttactttgatggccgggaattgcggggagtgaaggtgaatacggccgagggaaatcgtctgacttgtaacgagagattgaacgtgaaaccgggaacgttgttgtaccggaattatgaccacgagtttgtaacacgtcttgctaaagggacttccgtgcgtaagattaaagtgaaggttgacgtgtatgcggaggatgctcggctggtactggtggccacggacgagaatggggtttccgtgatgatacggagtgacgagacgttcgaggtggccacgaatcccgcacagatggaacgtgtggtgggacaattgcggaagagcggggacacggagtacgattgttgcgaggtggaatatctcgatgaaacggtgcttttcattccttcttccgtggtgaatggctatcgtcggcaattgctggataccttgagccgggaacgggaggagcaacgggagagatgggtgcaggagcctttgaaccgggatgtgaagtatactgggagtgccgactggcggctgaacgtggtgaaccgtcttgcaacggagttctaccgggagcatggcgtggagacggtagaaccgggattcgagaaggaaaacaagcggggcggtcgggaagtaatgactacccgctattgcctgttgttcgagctggggatgtgtcgtaagacggggaaggataaggtgttgaaatttccgttgtatctttccaacaatttgggacggttccggcttgaattcgattgtaagaattgtttcatgaaggtgttatctatttaattaatgcactagtttcagcccgacaactcccgttaggatcaggaacacgaaaaggagacggtatatattcgtcgagtcatggaaaaagaaaattcccaatagcacggtaccgactgcaccgattccggtccagatgacgtatgccgtgccgatggggatgctcttttgtgccagatagagcaggaatccgctcagccccatagagaccacggaaagggcgatgaagtggtagaagtatttctcgtgtaatccggcaagtttaaagccgaggggccaaccgatttccaataatccggcacataccagtaaaatccattgcatagttgtatttattaagtgttacgggacaaagttagggcgaccgggagggaaaatacttgataattatcaagaagtctgtatatttgtttttacaataataatatcttgtatgattgatgaaaacgtgttggaacgcttgaaaccctacctgacggaagtgagttacccgaaagggtatgttttgttcaacaacgagaagttggagagaaatatctactttatcaagcggggaatggcgagggcatttgtcgaggttgatggccgggaggtcacgatctggttcggacaggagggagacgtgattatatctgccagagggtacgtgtacggggagaaaggttacgagactatggtgcttttggaagattcggaactctaccgggtgagtgggaaggatttacaggatttgtattgtaacgatattgttatttgtaactgggcaaggcgattgattgagcgggaatttgtgaggacagaacaccatctgattgccaacctctcggaacctgcagccgataggtatatgcagttattgcgggaaaaaccggagatactgcgtcgggtgcagttgcagcatatcgcatctttcttggggatttcctcggaacatctgagccggattcgggcgatcactaaaaacagaacgaagtaacgaaaagtttcacgaactgaaactgtcctgttttttccgtgtatgattttgtcaaccatgaaagaaaggcttgataaaatgggaatatatcagtgatttttactatcttgcacaaatttatgtaattattgcaaggaagttatgcgaattattcaatatatcggtgtgattcttttctttttcctcgtgtcctgcgagaaaaatgacgtggagccacagaagacaaggacgttgatggtttatttggcgggagataataatctttcggggcatatgcagaagaatatcagttccatgatgtccgcttggaagaagagttataatgcgaatattgtgatttattttgatgctcccaatgccgcaccggagctttacacgttccgatttaacggaaaagaggtggagaaacaagtgctaaaaacgtatgaggagatggattccgcagatccggaagtgctgaaagaggtgttgaacgagatgcaggatttgtacccgtcggattcttacgggttgattctcggttcacacgcttcggggtggattccttctggtgggagcggtcggagtagtcggatgttatatgccgaacccgtgctgacccggagtttcggtacggattataccggaccgaacgagatggacacgcgggatatggcaaaggcaattcctttcaacaaggagaatctggagtttatcctgttcgatgcttgtctgatgtcttctattgaagtgctttatgatttgcgggacaaggcaaaatacgtgattgcctccccggctgaacttccggcaccgggtttcccttatgcccgggtgatgccttatttctgggggaaggggacgaatttggaaaaggatttggtgaaagtgtgtgatgagttttgggattattataacacgtataatgccgctaatcggtttggtacgattgccttgataaagatggacgggatggagcatttatttgatcttactcgtgaggttttgcaagggaagaaggattacgtggctgatatataccagaaagctgtttattgttatcctatggtggaatactccaagcatgacaggttttttgatttgggagagtatatgaagtatatgaccgaggggagagaaggactttacaaggagtatcgtgattttttggataatcaggtcgtgatctataaaaatgcaacgaatccattttattatacggagataccggaagaaaaatttagcgggattgcaacttacataccactcagtatatggcctaccgagacaaacgcttattggggattttcatggtcgggtgtctatgatgtggtaacggaataggtgatgtattcctaaatcccggcttttcttggggatataatggctcgtaattttatttttgagaataaatagtctcgttgttggtttatttgacaggatatttgttcatgttatttttaattatcgtctgttaaaatggcggctatgatcgggcgataagcgggcgagtatcgggcgatggcgcctaattgtcacctaacaatcgctcaactatcaggtaacggggatggataaccccgtggaaagggatgttaaccccctcattattgccagtgacttgcaggtatgttgtgccgtactctccttaatatctcatgtgtatttcaagaggagatcaattaaaaaaatacagttcgtgtagttaacctatcgttaacctatcgttgacctatcgttaacctactaacgaaactacggcacaagtatagagagacacgcctacatcatagttcttgattttcttcggcgatcgtgtaaaacagggttgctcctgtttcaatcactgcgtccgggaagtcatactgcggggagtggagcggggcgcagttttccccggaacccagaccgaacatggctcctttatattgctgtgtgaataagccgaagtcttcgccccagctgaatggtgtctgtaattctaagtatggtaaattgttgcgaatggctgcactttttaccagactcacggactgcgggtcgttttcattggcggagaacggttccaaccattccatctcgtgttgcaagccgggagtacgttcgcactcggtggctaccagattttttagttgctcggcgtgttggtgtagcagtttgtctgtcttggctcgaagcgtggcccggatcacgccgtttccagccgacacgccgtatgcttcttccccgacgtgtatttctactatggtagagagaaagtagtcgtcggattgcatatcggtgttattccagcgtgataactcatcaacaattgtgagcatggcgggaatagggctgatacccttctgtggttctgcggcgtgtgaggtttttcccgtgagcgtgatggaaacgctcaccacggcacacgtgaaactaccttccttgcagagaacggcgtgcaacgggtagcccggtatgttgtgcagggcaaacgtcttgtcgatctggtaatagtccagcaccttcgtgtccagcacggcttttgagccagagccgttctcttctgccggttggaaaaggagcagtatgcgtccttttgtcaacgggtgttccgataacattcgagcaaaccggagcagtatggtcgtgtggccatcgtgaccgcacttgtgcgccactcccggagtttgtgaatggtggggtatctcgtccggttcttgtacagcgacggcatctatgtctgctcggaacaggacggtgggaccgtcttccgagaaaaagtattctacgagcagcccgtggccgcccacgtgacggatgattttggtcgggttgaatgcttgtaatttatcctcggcgaaacgggccgtccgagcttcgtgtcccgagagttcggggtgttggtgtagctcacggcgtatttgataaaaagtatcttcttgcatagcttttcaatttacaccgcgaaggtaaaataattaattattcgtgtggttacatttattttctatctttacgtcgaattataaaagaatgcaggcatgaagttaaataagtcgcaaggggatttgttgaaaagggtgatcgagcgatgggaggcggacggcacgattgacgtgagtacggcggatcggttgaaggaaagttacacggtgcgatctttcgagtggaaggagttggcgaagtattcgttctggatagccatcgtgtgcggggtgattgccgtggtgtcagtgttggcggatcatttgatcatggatttacttgaaagattgtttctttcctcctattctttgaccagcggcgtgtttgccgtgggagcggccttggtgtattactgggggtggcgacgacggaaacggatgccttacaaggttttcagtaacgagacaattctttttttgggcgtgttgctgacggcagtctcggtcggttacttgggggcggccatggataacgggagcgggcatttttccttgcttttcctactggcggcggtgatttatgccgtgctgggcttttacttctcgtcggtgcaggtgtgggtgtttgccttgttgtcgctgggagcgtggtacggggccgagacagggtatctgagtgactggggcaatcattttctgggactgaattacccgcagcgttacgtggctttcgggggattgctggtagcatgtcgtttcttgctggccggaaagaagtggttcacgacttttgattactctacatacgtggtgggaatgctttacctgtttatctcgttgtggttcctttctatattcgggaattcggaaagctggattcgttggtattccatgaaacaggtggagttgtgggcttggaatttgctgatccttttcggttcggtagtggctatatttgtaggtttgaaacgggatgatgccgttgcccgtgggttcgggatcactttttttctgttgggtatttacacgttgtatttctccctgctgtgggatgtcatgcatgccgggttgttcttttttatactggctgtatctttctggttgctggggcgtaaagcagagaaggtatggaacttggagtttctgcgagacccgaagaaattgaatgatgatatgaattaagttatggatacactggtaagtttaggatactgggggttgtttatcggttcttttctggcgtcaacgattatcccgatgagtgccgacgtgctgttggtaggcgtgctggctttaggggggaacgtgtggggatgcttggcgatagccacggtgggtaactggctgggagggttgacctcgtactggatcgggtggctgggacgctgggactggattgaacgctggttcaaggtgaaacgagagaagttggagcaacagaaaggacacgtggatcgttacggcgtttggcttgctcttttcacgtggttgccgatcgtgggagatttgtttgccattgccctcggattttatcgtgtccgtccgaagatgtccgctttctatatgctcgtggggcgtttcgcccgctttctggtgtgggtattgctgtatatcaagtacgctgatcgttttatcgagtggatcagttgatccggtgaccgttaccagctaccactggaaccaccgccaccgaatgaaccaccgccgaatccaccaaatgacccgccaccgctgctgaatccaccgaatccgccgctactgccaccgcccatggggaagatgaagaacccgccgcgaccggaggtgtgaccgggtgagtaacctccgccgccccgttttcggaatatgagtgacaggatgatcacgaaaacaatgaacccgatcacgatgtcaaaaggactgccttcgttctttttcttgtactcgtccgcggtgtattctccttttgataagtcgattagcacgtcagtggctttgtcaatacctttgtagtagttgtcagcttggaaagcgggaatgatttcattacggatgatgcgggaggccgtcacgtccggaacgacaccttccaacccgtaaccgacggaaatggccacttctcctttttctcttccggatttgggtttaatcagaatgacgataccgttgtcttttcccttttgtccgataccccatttttccccgagacgggcagcatagtcgttgatgtcgtacccgttgagtgaaggtacggtgaccacggcgatttgggtggaggagttattattgaagtttaccagtttcttttccagcgcagcccgttcttgggtgctgaataatcccgtgaagtcattcacgatgcgtttcggggtcatgggttccggaatatcctgagcatgaacggagagcagggttcccgcgatgacggtgaataatatgaggagtttttttatcattttgctatatattacaaattagaagttcaggttgttcgtgtaaacctgtgatgttcctttactgaaaggagatttcgtcgggaagttcattcacgtcatcggtttgataggggaagtatactttcaattgttcaccggcggtgatgacggcttcgcagatgccttccgtgatcttgccttccttgaattttgcaaccatgtttttcatgattgaatcccagaagtccgcgggtactttggcattaatcccggcatctccaaggatcgcggatttgtggtcgagtaaggccacgtagatcagtacaccgtttctttgcgccgttttgtgcatgtttaagtgggcaaaaacgtcggcagcccggtcaagtacgtctattttactacggttttcgatatgtacccggatttccccggacgtgtctttttccgcttgcttgatagcggctaccatggcatctttttgttgttgggtaaaagctttttcgggagacataagctgatgattttagattttaaattttagattccagtcgcacgaggccaacgctttttgatttttatcttttcaactacctcctctaactcccccttacacagggggaggacatgctatattgtagcattctagcattccttgcatccatctctccccctgtgtaagggggagtcggaggggggtgtttaaaatttaacttccggagctttttctgcaccggcggcagcctcaaagtaaggtttcgggaggaaaccgaacatcccggcgatgatgtttttggggaatgaacgaatgtaggcgttataacctttcacttcctcgttgaatttgcgtctttcaacggcaattcggttttctgttccttccagttgggcttgcaagtcacggaagttctcgttggctttcaagtccgggtattgctcggagatcgccatcaaacgggagagggcagaggaaagttcgccttgcatattattgaatttctggatggtttgctcgtccagttgatcaaagtttactcgcatttgcgtggcttttgcacgggcctccacgacttgggtcaacgtgttctgttcatgctccgcgtagcctttcaccgtgttcacgaggttcgggatcaggtccagacgacgttggtattgattttccacgttcgaccattgggaggatacattctcactccgggttaccatctgattgtaacttcctttgaaccacatgaagattccaatcacgatgacgataattactcctattacaatataactctttttcatgttttgcttttattttagtgttacga

SEQ ID NO: 130 - DNA, 9935 bp, Butyricimonas faecihominis
agattatatacgaaacacttccgtcacaagttattttttcttaaagatcaagtgttccatgatcaacacggtaatcacccccatcacgaaaccattccccacgatcggcttgaacaaagaaggtatcagattcaacactccctccggggcaaacgacaacaacaaagcaaccatcaacggcagccccacgactaccccgctatcaaaatccgtgatcgccttttccctcaccaacatctgtaacccggcggccaattgcgttgccatcaagtagagcaaaatcgcacccatcaccacgcccggtatcgtcaccagcattcccacaacagaagggaaaaaagcacacaaaatcaacccggccccggcaggtaacaaggtatagcgagaagcgcatcccgtggcagaaatcacccccgggctcatggaataatccaccgggcctatcacgccgaacaaaccggacaggacgttcgtcactcctacgatcccgacacctcgtgtggtacgctgatccatttgatcagcctgtaacatatgtcctacggcttgtatcgaaccaagctcgttcacaatcaaagctatataacaaaataagaaggccagaatcgtccccgcctcgaagttcaatgggaaattaaaaacagtcgcttgttccggtattatcccagctcccgttgaaaccagagtcgggaatccaaacaccccgtaatacaccaacactccccccacaattccccataacaccgtggttgacttccatattccccgtaataatttattcccgatcaccaaagccagcaccatcaccagcgtgaaaaacaaattaaacaaggcatgtatcgcatctcccaacaccagtttcaagatcaccggtgtcagcgtgaaagcgatcaaaatcaagatcaccgtaacgatacgaggcgtaaacacgaattgcaacttccccaataacccgctatatgccagcacggtcaaaaccaaaccgcccaccataatccccgtgtaaacagccggaatccccgacgacactgtagacaaaatcccaattagcaacaccgatgccggcccaatgatcagcggtaaccgatgtccccacaacacctgtacaatcatcgctatccccatgatcccgaacaatttttgcaaataaaatgtctgttctgccacatccgtgtaatgaagttgcgacacaataattcccatgatcaccacacaagggagagagacaatccaccactgcaacccgtacatcaacatgggtaaaatccccggcttatcattcaactcgtatttcatattcttcgaattttaatacgtaaaaatagcactttacagatttctattcaaaaaaaacgagaacatttaaaatattattatttctcatgcgtctacaatagaagtatccgaatgtctctttgatgtggactattctccggaaaaaaatatatgcgctcattggtctgggaagaacttgacaaagctttggcagaacttcccgatgaacaatgcgttgtattcgaattgaatgaattacagaacttttcattcaaggaaatatcagaaagtactggcattcccgtcaacacccttatttcccggaaacgatacgccattctctatctccgggaaagactttacaatttacacgaggaactgcttgatgaataagtactttcgacccgaaaccctcaagcgatcaccatccgtcatcaaaagctctatcctcatcacattttcaagacacaaggagcgagaacttccactaaaaatccgtatgtttgtaaataaagtttctaaccatttaaacaatataagcacatggacgatcaacaaaaagatcagaaagtatttcgccaaaacctagatgaaaaaggaagtttccagacgctattccaaatatatttattatttaccgaaaaaggtacccgccccgacgggaagaagatccaaaaggcattattatccaaattcgaaaaggtagatatagtagccaacgtgaaggattccctctcaacttttgctatctggaaatacatcgtggaatacaaggataagcaacgcctgcccgcacaagtattgatgtccgacttcgaaaacttcgacggaaacaatatcgacttgatgcaacgcagccagctatgggattgcccggaaaaagacgagattctcgccaattgcaaatataaaatcatgctttccgacttcatggcttccggtctcccttataaagaacgttgtgccatgttaacggaatggctggaaactaccctcgaactatttccggactgtgttgccgtgtggactccctcaagcggcaaactgctaacccgtgaacaggttttaaacaacccgtgggccgctcccacacgatttcttcatttcgggatgaacatccgtcttttcaacatacaaaacacgaacgacatgatggtggacacgctcgggctatacgctatcggtttacccgacatccaataccatttccacgatttggatcctaacgccgtggttaaccatgcctacaacgccacggcatacattttcgacacggacgcttctatcaaggacggggaaaccatcgacgggatctcggaacaaggtattgaccgcagcatacaatggaaatgccaatacgaacgatccctcatccaacccgaccgggaagtcatggacatctgtcccggacaatacgcagcaggcgcaagggaataatccgaacatttatcaaaaacacacgtacaagacaacagcaatcaaaaacaaaaaaacacatgaaagtaatagcaatcaacggaagtccccacccacaggggaacaccttccatgctttaaaaaccattggtgaggaattaaaaaaagaaaacatagagtttgaaatactccaagtcgggagccagaatattcacgggtgcatgggatgcaatatgtgtttccggaacaaaaacgagaaatgcgtaatcacaaccgactcattcaacgaactactacaaaagatcaaagacgttgacggcattatcctaggttcacccgttcatttttccggtatcgccggaaccatgaaatgctttctcgaccgggcattctacgtttccggggctaatggcaactggttccgtcacaaggtcggtgcagcaattgttgctgttcgtcgttcaggaggttcgcacacacttgacgggctgtatcattatctcacgtattctgaaatgcttattccctcatctaattactggaacatcatccacgggttgaaagccggagaggccattcaagatgcagaaggaaaccaaatcatgcgagtacttgggaaaaacatggcatggctactgaaaatgagagagcaaacaaaagatatacttgcaaccccggaaactgaaaccaaaataatgacaaactttatccggtaaatgtaaacacacctatctctttcgcagagaaattatactttatcatgaaagaaaataaatacgatgacgagaaattcttccatcaatatagtcaaatgtcccgttccatggatggcctaaaaggagccggagaatggcacgcattacaaaaaatactcccggacttccaagggaaacgagtactggatttaggctgtggtttcgggtggcattgtcaatatgctattgaacatggcgcagtccacgccttgggaattgatctttcacacaaaatgttggaagaggccaccaaacgaaacaactctcctcgcatcgaatacaaatgtatggcgatcgaagacttcgattacacgctagagagctatgacatcgtcatcagttctctaacctttcattatttggaatcattcccggatatttgcgagaaggtacgccgatgcctcactcccggtggcacctttgttttctccgtcgagcatcccgtgttcacggcttacggcagtcaagactggtactatgacgagcaaggaaacatcctccactggccggtagaccgctatttctcggaaggaaaacgagaggccattttcttgggcgaaaacgtgaccaaattccacaagacactaaccacctatgtaaatgggcttatccaaaacggtttcgaaatcaccggactcgtggaacctgaaccagataaaactcttttggattccattccgggtatgcgtgacgagttacgacgtcccatgatgttaatcatctcctcaatcaagaaataataaacttaataacgatacacaacataataatgcctatctcccgatcccgctatgaacaaaccgatagcgagtaaaataactacgccaataaaaaaaatggaagaagcgatgagcgaaaccgatcccaaaagaaacaaaatagagacaatcgaggctctccagaaattccggattataaagtagttcatcacaatttgcacgcaccgagccaccaagaatccacaaattaaatacactcccatatccacatcagccaagtaaaaaataatcgccaaaatgaccgcaacgacataggaataaacacccacactcaaattatacccggattcatggcaaatctcacgaataacttgaagatttaatagaagttgctttaacaagacaaaaccatatagaaaaaagttgacaaccgtccaaagccaaccgacctcatcaggaaagcagaaccacggtaaaccattgtaaccgaagaaaaaaataagttccatgacgccgatagctacaagtccgaggccccccacaatccattttatttccagagaatcacgaaacatccgtcgaaccagcaaagtaaagcataacgtcaatagaatcagtaaaggcaaataactaatcggtccctgtttaaacaatccccataatccacgaaaaaagtcgtcagcagattgttgtttcgttcccctaagcggcataatatactttttactgacataagcctgttttccatcaaactctacttgcgcccatgttccctccattttcaacacgtggaccgtatctttagaagctaattttccaatcacatcaaactcgcttcccgcaccggaacgaacatgaagagaaccacgtgaaaccacccggtaatctagagcatccacaactaatgaaaaaaaaatacagagtaataaaaaacaatatttcataatgatccccaatttattcactaaacgccaagtaaatatttacaaatatataatttttaacggaatctcgtgttttactaacgtaatttatcacaaacatcaggagggatgcatgaaacagaatgaataaaaaacaggttcatatttgaacctgtctcaacacgaaaacacctaattctaatacagatacaacttacgaagtttctccacatccacccccaactgctgcactaaaaacttatccattccgccataattctcgtctatcgtggttaatgccatttcgatatactctttctgcacggaactaatataatacatacattctgccatcttattatccccgtatagagctttcattgcctccatcgtcacacccgtcaactcatttgtcaacatatagtcttcaatgatcgtttctcggtcaacacctaaagctgccaaaaacaaggctgccgcaaatccggcccgatcctttccagccgtgcaatggaacattaacggagtcttgtctgcctccatcaacgtcttgaagaaagatttgtattctgcctgaaaactgattacaaactcccggttcccgtctaccagatattgtttagccccctccacaccccctcttctgataacatccgaaacatcaatggaagacaaatttccgggttcgatcggataattaatacaattcacagttgtcgtgggaaccttatccggttctgcctcttgttcgctacttgaacggaaatcgatcacagtctttaaggggatcgttgccaaatacgctaaatcatcttccgtgagactgttacattttcctgaacggaacaccaatccccacttcacccggcgtccatccttcgttttataacctcccagatcccggaaattagactgtcccaccatcggcaattgtcttaatcccaaggccgttctagctccaccggcccattccaagcaatagagctgatattttcccgtgttcaattctgtcgttcccttcgtatttccttgtaacaaaggttcatcaaaaagaatagaattactattttccccgccatacactttccactctccctcttttaatatttcaatactggttttcttagactctttatcggcctttattgttgcataagagcttatattcgtccccgaatacaaattcgtattaattgaatcatcatctgaacaagccaacactccaaccaacatggcaaaaacaaaacaccacttactcatttttaataaatactctttcataatctttttttcttttcatttaacgccacaaagaaaagcttgtaatattaccgaacgattacattcttgtgaaagaacaattacaactatttatcctcattcccttgtattataccccggaataacgtaattttaccatatgatcatcagtgcaagcagaagaacagacatcccttcattctactcaacatggttttttaaccgtgttcgggagaaacacgttcttgttccgaaccccttcaacccgaaacaaatcagccgggtcagactaacgccagacgtggtggactgtattgtattctggaccaaaaatccgactccgatgcttgataaacttaaccatctaaaagagttcaaatattactttcaattcacacttaacgcttacggaaaagaaattgaaaccaatctaccttctttcgaacaaagaatagacaccttcaaacgcctctccgacctcatcgggaaagaaaaggtcatctggcgttacgacccgatcttgacaaacgaaacctataacacggattttcacaaaactactttcttcaaaattgccacacagctcaaagatcacaccgaaaaatgcatgattagctttattgactattacaaacatatccgtccatctctctcttcccagaatatacacccgcttacactggaagagattcgggaaatggcatattctttccggcagtccatctcctcgaccccaattcaactaaacacctgtacccggaaagtagacctttccgatatgggaattcctgccggaatgtgtattgaccgggaattaatagaaagactcacaggctacccgatttccgcacagaaagataaaaaccaacgagacgtttgtcgctgtattgaaagtatagacatcggctcctacgacacctgtttcaatggctgcctctattgttatgctaacacagccaaacacaaaccgttccgtaacctacaaaagcatgatcccgcctccccgaaactcattggacaggtaaacgatgacgacatcataaaagatcgagccatgtatagcctcagacgtgatcccacgttattctgacagaattaaagccaccctttcagctcatcgggcaacatcggcattgcccccgtctgactacaaacaaaagcggaaacctccacggcaaaacgatgagcctcaaccattgatctccctttcaaaaccgcagcacaaaatgctgccgtgaaagaatccccggctcccaccgtgtctgccaccttcacatgaggggtatccagaaatgaccgtatatcacccgcaaacacgtaacttccctgcaccccacacgtaagtatcaacacctccagatcaaaccgatccatcatctccctacacctcttttctaccgattcttccgacaattctaataaatcggataaaatacccaattcttcatcattcaatttcaatatattacatcgggccaaagaatctttcaaaacctctaccgtgtaaaaatgctgacgaagatttatatcaaaaactttatacgccctcccggacatagcctccaaaaatcggttcaacgttgcacgagtcaccacattccgttgcgccagagacccaaaacaaacacaacgaacctgacaagccaatcgatcaagttctggggtgtacggcacgttatcccacgccacgccctgttttatttcgtaacaaggaatcccctctccatccagcgtaacttcaacgatacccgtcgggaaaggcactcgttccacccaatagcgtagccccttcccgttaaaattttccagaatctcatctcccaacacatcttcccccacagcactcaccacccggctatcaaaaccgaattgcgacatatgataagcaaaattagcaggagcaccgccaatcctttttccttccggaaacacatcccaaagaacctctccgattcccacgataatatcattcatcatcacgtgtatttagtcataaaatgcatatacaaaagaaagcaattgatatgaaaaatcggtatttccccaaacaaatattttaagaaataccgatttttataatcattaaccactaccaagttttactcttatattccatatcaacaatttcatcgtatggtcccatagcttcataaggtacaatcatatcatcctccttcggtaatgggaacagtccctctgctggatcttgaggcattccattagaactgatccaaaaacgataaacataccctttatcccctttattcaatgctataaacatcatgtaagcatacgcatccttgatatgcatctctactacattaacatcaggatctttaaaatcatggaacaatattcgggtattcgtagccgtattcaacaaccatattttatctttcacggcataaaatatattctcgctattaggatgcggatacacagcggaagttttatccaattcaacctcatccggaatcaccgaatgtccaagtacaacatacttatatggataaccacttgtataatcagtcccaaagtcatatttatgtactttacccgcctgatctttcataagtgcaaaaagagtctttttacaactttgtcccatataaagcgtggaaaaatcttttaattctcctatagtataatactggttactagatacgatacttaaattcatcgcaccattctcccataataagaagcgtccacctttacgatctagaaatacatattttgaaccataataatcatagaaataaccataattcgaaatataataatcagaattatccggtaatgacttttccacaccaaacttatacggagtatagcgagttgtacaaaagtgtagttttccatcagctacaataaaatactgactaaaattcttatccgtgagtaaaaactcaatatcacaacttgcctttggttcaaaaaataactctgattgatcggcaacccatgtcaaatcaaaaggactcaacttttcagctccgtcatttttcaacaccaagcaattatcataataaggactggaagaggtggcaaaataaaataaagatttagcattttgaatattcttaccattcgtctttgaataaagattatacaggggttctcctattcgggaaaactcattcgcagatgaaagatcatactcattcgtcgtacccggaaccttacacaataataaataagtgtacttactgattgcgtccgttacctcaacattaaaacgtttataagttgtaagcccagtcgctgtattcataattgaatatcgtaaatcataatttgccggagccaatgtaatttcttcatcaaaatccttacttgttgaaagtaaatgatactccggattcaatttattctggatcgcaaactcccacttaaactctaattgtgattcgtcaaaaccatttagttccaatgtcatagggatcgacaaccgttcccccatcttcaaacgataaacaagctcgtactccccttctatggttacttcgtccaccgttgtgtaatcgtaatttcctttatcctcgtagcatccagcctgcaatatcgacaggatagctaacaaaaac

SEQ ID NO: 131 - DNA, 9891 bp, Butyricimonas faecihominis
gagagccgtgtacatggagacatgtaagcacggttcgggggcaggctcttgaaaacctaccgtcgaaagacggcaaggcattgagtgccgagcctacgcatatcatcttccccgccgccgtccgctatgtcgatttgggaagcaaccacatcatagcgggcaaggcggacggtgcggagaacgtaatcagggtgaaagccacgacagagggctttccgggagaaacgaacttctccgtcatttgcgaggacggcagtttcttttcgttcaacgccaagtacgcccgtgaaccggaaatgctcaacatcgaaatgaaggacttcttggagaatgaagatacgtccgacttctcgcatacccggatgaacatccatttccgggaactggcgggtgaaagcccgctactggtgaagctgataatgcagagcatctacaagaacaatgaccggaaagtgcgccacttgggtagcaagcgtttcggcatacagttcttaatcaaggggatttacacatataacgggatgctctacgtgcacacgcagacaaagaacagttccaacgtgcctttcgacacggacttcatcaggtttaagataaccgataaaaaagtgcccaaacgcacggctattcaggaaacggtactggatgcggtacgcagctacaacgaggtgatagagattgccggaaaatcgaccgtgcgcacggtgtacgccctgccgaagtttaccattcctgacgacaagctgctggtcgtggaactctacgagaagaacggcggacggcatcagaccatacgggtggaaaacgccgacatcgtgaacgcagaagtgattgacgaactaaaaatcaaatagggaatgaaaagacacatctttataatgatgctctttgcgctgtgcctgacctcgtttcaggcacacgcacaaagatacctgccgggcatgaaaggcttgcaggtcacggcgggcatgacggacggggtgcattggaacgctggcagtgatttcgcctaccacatcggggcggcgtacagcgtttacaccaagaacgccaaccgctgggtgattggcggcgaatacctgcacaagaagtatgactacaaggatatgcagatacccgtagaacagttcaccgcagagggcggctattacctgaaattcctatcggacagacgaaagacctttttcctttcattgggcttgtcggctctcgccgggtacgaaacaagcaaccgaagcgaaaagctgctgccggacggctctaccttgctggataaggactgcttcatttacggcggtgcgctgacgctggaactggaaacctacctgaccgaccgggtggctctgctgctgaacgcaagggaacgggcgttgttcggctcggacataggcaagtttcacacgcaggtatctttgggactgaaattcattatcaactgaccgctatataataatgtatatgaagaatgtaatgtataaaatcatcatgggctgctacatcgtggccgccctcgtgcttgtcaccgcctgtaatgacaacttggatattcagcaggcgtacccgttcagcatcgaaacactgccagtacccaaaaggctgaaagtcggggaaaccgccgaaatacgctgccgactggtgcgtggcggctattaccagccgactacctatcagatacggtatttccagccggacggcaaaggaaagctggaaatggataacggcacggtgttcctgcccaacgacctttacccgctggagaaagaaacgttcaggctctactacacctcggcatcgaccgaccagcagacgattgacatttatatcatcgacagtttcgggcagatgcagcaacttacactatcattcaataatgacagcagcgaagaaggaacggaaacaataaccccctaataataaaacgacatggtaaaaatagaattggatatagaaggcatctcgtggtacatagaaaccacgttggaaacagatacagttccggcagtaggtgacatcatcattgtggacaaggactgtatttccgaacgtgacagtgctgaattatggaaaacgccgtccaatcaggtattcaaatgggcggacgaagaagacgatgcgcccgtaatggtatggttcgattgcgaaacggaaatgcttgtcaataaacggacatggaaatatgacatcgaggaagaagaaaccgtgtgcatacttggtgtaaaatttattcactatgaggatttatagttgcgacatccgtttttatcatcctcttgggaaaccgggtatggaatgatacgcaaagcgtaaatatcgggcagacagcccgccgggaagcatcggcgggctgtttccatgatagggaaaacgaaaggcttctttgttactttcttcacccgctggcaggctcacggaagaaagtaacggcggcaagcagtcgccgtcctctatcaactggttttaaggctctttatggacgtgtatttctctaaccacacctttacctgctccatgttatattcgcccgtgatgattgccgtatggtcgtctatggctacaaaccggacactttcatagctgtttacccagccttgcagggaacagacgccccacgtgtccacatcttcaaaaacactgcggtctatccggctgattggctcgccgaaaactaccgtcattatctgaaagtccggtttgtcctccaacagttgcaaatggtgcagcgtgccgaactcgtctattttgcgcccccacgcccacacatcattatacaaatcatcgccccactggtgcgggtggtcgaaacggacttttacctctatggtgtgttcgttttcttctgtgtcctcgataacgcccgttaccattaagcccgtaaaaatacactcgcaacgcctgccgataagctccttgtttacttctgtcgttttcatgtccctgaaatttacttgtttattactccgttcttcttcgctacccattcgtcacgcctgcggcggcactcgtccagcgttttggctaccgtgctgaaaagttcgccgtccgtgtggcggtagtcatattgataataaatctgtaccctgaaagcccctaaacggcatttcacgaacttttcttctcccggtgtttgggtgatgcttaccccgtttttgttaagtgactgcatgatgtcttatttttttatggttataaacttggttgttttaagcgggcagggctttgacaccccgcccggattggttgttatgccgcccggaacacaaagccgtcatcaaaccagtaatcgcacatgaacaggtcacgggcaaactgtttgtaatcgaaataggtctttgcgaactccggcaggtcgtaacattcctctacaatttcataggcgaaatcttcttcatcgtcatattccccttgatattcatcccggaaatcccgtacaaggtcgtccgcatcttcctcgcccaaatcatggcttttatagttgcaccacacgaaaaaggcttcctgctcggtgtcgctcaaatcctccaccgcatcacgcagggcgaagaagttttcagaaatccagctttcgtcgattaagccctccggcacgttctcccagtcctgaaacatgtattccgcatcttcctcgtccttgtgaagttcccggcaggcttcataaaattcttccttgtccgaatagtccgaaaggtcgagccatgcgccggacaatgaaccgttgttgtacttggcataagtgcctacataaacttttgcttccgataatacctttgcttccatattgctgtaatttttaagtttttaattttatgcggatttgagaggtgagggagttgaagtttcactgaacttttttcctgtttcccgtaaatccgactttttttttatgcgtcttccggtcgggtcggtcgttttcgtttcacataggcgtaaaagggtagtgtttagagtttgcaaggttttgggcaaaaaatacctcgcaaggcagggaagattttttcgccaaaccggaacggctcgaccttgcaaaatcgtgaagaacacgtaactacctttgcctattgaaatgattaaaacgactgtcccggctgggggactgcgtaagaggaagatttacagatagggaaaccgggaaaaagtgcctgttctctttcatcttttagggaacactccatgcgggcgggaaaggcaagggtgttgtgagcttgcttgcaatacgcttgtgcgggtttccaacggctcttttcacggaatacagtcagccatgccacgcacggctggcgtttcggggaatgtgccagttggaaaaggatataaaaaatgcgggtagtcggtggactgcccgcaaggtggaagaatgtaaaatgcttggatatagattgttatgcggtatttagttaccgaaatcgttacctattcgtttttgtcacggttataggtaacgaaacctaccggacggcgttctttctgttgtttcgactggctcaaaagctgggtaagggcttgatacagttcgttgaactgcgcatcggtgcttacctccagttcctcgatgcgccttgacagttcctcgtaaccgattgccatttggcgcatgaggacgaaagcccgcatgattgaaatgtttacttctatggctactttggagcggagaaccgaagaaagcatggctacgccctgctcggtgaaagccataggcatagcaacgccgaagttgtaagcagggggtatcacattttgtgacacccctatggataacagcaagttagcttcctcttgggtgagaacaaacataaaatcacccggaaaacgctcgatattgcgcttgaccgcctgcttcaaggctcgtgtttccacttggtagagttctgccaaatgataatcgagcatcacccggcaacctctgacctcaaaaatcttgttttggataatctgcaaatccataatcgtatattttaggagatttagcaatgttggaataatagtaaggactggtcacaaattgtgaccagttcccaataatcaagattacatggcgacttccttgtaaatcttctcgatgccgacaaacttcttgtcaagcccctgcatatcgctgcctatcttgctgttggtgatgcgggcgtaaatttgcgtagtttctatgtttgtgtgtcccagcatcttggacaccgtttcaatgggtacgccctttgacagcgtggtggtcgtggcgaacgtgtgccgggcaaggtggaatgtcaggttctttttaataccgcatatatcggcaatctctttcaagtaggcgtttagcttctgattgctgattacgggaagtatcttcccgtccggcaacttgcccttgtacttcttcaaaatcatcttgggaatatccagcaggggaacattcacgtccgtattcgtcttttgccgcttggtgattatccaaaggttgccgtcaaaggacttttggatattctcctgccgcaagttggcgacatcgctgtatgccaaaccgcagaaacaggaaaagacgaacaagtccctgacgtgttccagccgttcggaaaccattttctttttaaggatgatttttatctcgtcctccgtcagataacccctgtccactttctccagccggattttgtagctggcgaacgggtcgcccaccagtatgccgttgttacgggcaatgatgatgatacgcttgaagaactgcatgaacttggcggtggtgttatagccgcacttgcaggcggtacgcaaatacaactcaaaatcggtaatgaacatcgggcttatctcctttatggatatgtccgatacgttgtacttgctttggataaattcagcgaggtggcggcgggtcacttcatacttgcggtaggtcgctatcgtcttggatatgcccacaagctgcttcacatcgtcattgtgcttttggaacaatgaaaggattgtttcgtggctctcgctatgacctaaaaactcgtttttcactttctcggcggtcacgtagttgtcacgccgctgcatttcgtggtaaatggtattcagggaagaacgtatgtcgtccaaaagggcgtttatcctcccggcatccctgcctttggctttgcccgcagcaatgctccagttgtcgggctggatgctctgtttcgtactgaactggcaaagtttgccgtctatggtgatgcgtgccataatcataacctcgccgtttttcttttcagaacctttcttcaaataaaaaagaaccttgaatgtcgatttcataactcaaaatttttagttgcaaaattagtttttacctctcattttcgagttatgcagactatggactaatatagtcattatcaggtcatttatggacaattcgttaccgtttttgtccggcagggaataggtaacgatttagtaacgaaactttgtcttttaccgtacttttgaagtcttggaagcaggactttcgggcaataaaaaaagccacaaatcattgatttgtagctttttgtccgtttgctgaccatttctgtccagcacgttcagcggagagggagggattcgaacccccggtacctcgcagtacaacggttttcaagaccgccgcaatcgaccactctgccacctctccaatgcggatgcaaatataaggactttatttgactttcaaagcgatttttgagtttttttattcaaggcgtatttcaagtagaaataaccgcaaactccagcaaacagggagcctccgatgataccgatttttgcctgattcaataaaatggctccttccgcgcccattcccgtgtaggaaagagtcgcgataaacagggacacggtgaatccgattcctcctaatagagatactccgaaaagggagtgcatatccattttgtccggcatagttaaccagccgcattttataaagacgtaggtgaacgagaagatgccgatgagttttccgagtacaagggaaacaaaaatcgttaccgatacgccttctaaggaggcaagcgtgaatccttcgaacgagatgctggcgttggcgaatgcgaaaaggggcattaccacgtaattcacaagggtacgcaggtcatcgtccatggcttgcaggggactaactaccttgtctgaggctgactctatacttttcaatatagaaagttccgagttgcttaatatgatgtcatttgaattctccggtagtcttttcaaactttcccggatgctgttcacgtacttgtatatgtgtagtttcggacgagccggtactgtaaatgccacgatgactcccgcaattgtgggatgaattccggcattaatgaacagacaccaaacaacgataccgaaggagatgaaaaacagtttattatgaatcccctgtcgtcctccgatgtacaaaagggcaacaatgatcattgcagcgattaaatactccacggtcaggtgcgagctatagaacaaggcgataacgatgatgccaccgatatcatccacgacggcaaaggcggtgagaaatattttcaggctcaaggggactttcttgcctaggagtgagagaacgcctagggaaaaagcgatgtccgttgccatgggtatggcagctccccgcatggcaggaccggatggactgatcagccagaaaaacaggaccgggatgatcatgcccccgcaggctgccacaaccggaagtaaggctttccggggagaggagagttccccaacaagtagttcccgtttgatctctaatcctaccgagaagaaaaagatagccatgagggcgtcgttaatgaaatccagcaatgtcatcggattgccatcatgacgatcaaagagattgaaatttccgatcgtgagtgtgatatttttagaaagtaaaatattgtaatattcctgtaaaggggaattagcgataagcatggcggcaagggccacgaataagagaactatccctccatttattttcgtttgaatcagtcttctaatggagaatttaaatatttctttgaccattgtcctgtttgttagttgactatgttgtgtgctgcaaatttaataaaagttgtataaatttcaaataaaaagggtgttttctgcacgtcgggtcaatccttcttccaattcgtgctggtgatataaataccccgcatcttcgtaatattttgcctgtttggggcattttttgatacacgctccgcatttgatgcagatacctgtaaattctcttacattttcatagctgatagatcccatggggcatacttttgcgcaacgcttgcagtcattacaacggtcgttggtaagcggtttcactttacggatgtctaccggggtgccttgtcggtcgcgaggtgtgtaatatccccggtaggggtagggggttccggaaaccggaatggggtgtgatagcgtgtctgtcttgtacttttcactgattttgcgaacgaattcatccacgatgtccatgtctttcatgtcgggtcggtcttttgccagtatccgggagaaagagtgttcacccacgaatgcccccgcagctatcgtgtggagtccgttgttttcaagaatgtctcgtaattcgattagcgcatcatcgtaatcccggttcccgaaaagcacgactggaacggctaaagccccgttgccttgcatcgtgttcaagtagggtaacagtacgtttggaactcgcccggcatataccggggtacccaacaccacgagatcggagtccgtgaatcgcaaggattgtgtccttgcctttggtaaggtaaaatcgtattcttcgagatcggtttttaatgctcttgaaaggcccttggccgtggcggttacgatcttgcgggttgtccctgtcgggctgaagtacacggcccggatcttgttgattattgtcatttgttatatgatttgaaccattcggcaaagcgggtaatccctgtttcgagtgatatttgcggggtatacccgtagtcttcctgcaagcgggtagtatcggcccatgtttggtaaacgtctcccggctgcatcccgacaaactctttacgggcctcttttcccaagttcttttccagcaagtggacgaagtccataagctggatgggggttccatgcccgatattgtatatcgtggcgggggtaccgggtacatcttcccgcaggatccccggtgttgacacgattttctcgattcctgtcacgatgtcctcgatataggtgaaatctctggagagatttccgttgttaaaaatgcgaatcacctcatcgtgttgaatggcgttggcaaaaagcatgggagccatgtccgggcgcccgaagggaccgtataccgtgaagaatcgtaaaccgatggtttgtatgccatagagatgggcgtaggcatttgccatcaactcgtcactctttttcgtggcggcgtaaatgctgatcgggtgatccacggtgtccgtctccttgaatggaacagattgattgttcccgtatacggaagaggacgaggcgtatatgaatttcttacaattcgtctttttgcaggattccagtaaattaatgaatcccatcacgttactttgcacgtaactttccgggtgtttcaagctataccgtactccggcttgtgcggcaaggttcaccacgcagtcgaaagtatgtgtggtgaataatttatgaatagcctcggcgtcacacaggtccaactggcagaacgtgtaattcgtgttcagggaagatacgatttctttgccgggaacgggatggtctatgccacaggcgtgtaggcggtcgtgtttcaaggcaacatcgtaataatgattgatagaatcgattccataaacggtgtgtcctgcatccagtaatttctgaacaagataaaaaccgataaaccccgctgttccagtaattaagacattcataatacct

SEQ ID NO: 132 - DNA, 9857 bp, Butyricimonas faecihominis
atttaattctggaagatttttataaccactttattagcaagcagttctgaggataaggtaaaaatgaggtaatgatttggcaaccctgtctatttctacgttctgctgtgagttgctgtcaatgtctctcgtcttggtacaaaagtagcaataaaaatcggatacacatcaaaatgtcccatgatttttatcacaggacgttttttatcttcgctgaataatccggtttaaccgttacttctattttcggcaagttgcgggctatgattgctgaaatttatactttaatccatactcttccaacttgctatacagcgttgtacgtccgattccgagcaattcggcggcaaccttgcggtttccgtttgcctgcttcaacgcgcgtaagatgcgttccttgtcctccgcatcgtttcgcaaggcgaagctgacaggtgaggtcggtttcgttacggcaagttccagatgctctttcatgacaactcccgtctgtgcctgcaacaccgcgcccattatcttctgccgaagctcacggacattacccggccacggatgggtcagcaatgtcttacgggcttccgcatcgaacccagtcacgctacattccaattcattgttggcaatctcacggaagaactccgccaacggcatgatgtcctcctgacagtcacgcaagggcggaacagttatctcgaagtcgtgcaaacggtacagcaaatcctgtcggaaacgtttttcaatgaccgctttctccagatcctcgttggtggcggcgatgatgcggacattgaagctcttgtccgtcttgtcacctatagggcggtatctccgttcctgtatggcacggagtaacatctgctgggtttccaatgcgagattgcctacctcatccaagaacaatgtgccaccctctgcctcattgaagtatcctttctttgtgctgtccgcacccgtaaacgcgcctttgacatgtccgaagaatgccgagggcgcaaggtctttggagagtgaaccgcagtccacaggcacaaacggtttccctgcccttttgctcttatcatgcagatggtgggcgatatgctccttgcccgtgccgttctctccgaatatcagcacgctcatatcagtaggggcaactaatcttatctgttgcatgattttctgaaaggcggaactgtcacgggcaaaaacgggcatacgatttcgtccgatactccgttctttcaggatggtatgaagcagaggcataagtttatcctccacaagctgcttggggatatagtccagcgagccgagtttcatactttcgactgccgtatgcacttcggcatagttggtcatgatgattaacggttgtgtcatgccttccttgcgcatccagcgcagcaggtcgatgccgtcaccgtcgggtagtcgtaggtcagaaaccacgatgtccccgtctgaggcttgttgcagaagtttcttcgcggtcgagaggtggtaagcctgcacggtacggaatccttcccgtgccagcaggttgcagacaaactcgcaatacacgatattgtcctccaccacgatgattcttgttttatccattttcgtatttttcctttcttcttttgcctgccggataatttcagcacctttatccagcacagccggtcaccgctttgcatatcgcttcgtcatctggagtggcacttccatgaagttgggcgtaaagttccctcaatggctggtcggcacggagaatctgccatgaacttcgcagatggtgtgtaagtgtgtccagttcttggaggtctttacgctgttctgcatccttgaccgcctgcatttccttttcggtttccgctatcagtttgtcctgcatgacggattcattgccataagatagcagagtggaaaaatccggcttttcatccaatatgctgcttaatgcgcatttatccgtaatctccatcagttcggatatggagaacggcttgaacaggcatccggcaaatccacgccctataagttcctccttgctgcaactgcccgaagcggttgtcacgactatgggaatactcttcgagttgcctacattggatgagcgcaacagttccagcagttcaaaaccgcttatctcaggcatattcagatccgtcagaagcaggctgtattccttttttcgtatcagctccatcagtaccgaaacattggtacaggtatcgcagtgcatcccttcctgggcatacatttctttcaacataaggagaagtacctcgtcattgtcgatggcaatcacatcatggcagatatgattatggcgcatttgcgcttgaattgtctgttccggcagttcctcggctgtctgcatgggaatttccaccgtgaagcggctccctttgcctttctcgctttccaagcgtatagttccaccgagcatcgccacaatacgctgcacgatggacaatcctaatccgaagccgtcttttgcggcggcatttgaaagacgttcaaatgcaccgaatactcgttgttgctcatcttcggtcatgcccgtaccggtatcttcaacgataagtttcagcaaaccgttatcataatccgctgccaatgatacactaccgttatccgtgaacttgatggcgtttgacaacaagttgttgccgatttgcaggatacgttccttgtcggtcaaaaccaccgcatcggtgtggctctccactatcaaagtcagccccttgttcatggcaatgggcatgaactccgtttcaagaatatgcgtgattgcggaaatcctgcaaggggaaaggttgggttgctccttgccgttgtccagacggaagaaatccagcagcgtgttgagcatctcccgcatacgctcggaagattgccggatattatccacatacatggtgcttttatccgcgctacaacttttctgcatcagtccggcatagcctcattttgtcaatcgtattttttcgtggtagaagtagtttacgatgacaggtttgcctttttccgagcgtccgtatggcagatcgtttatacgatacgggaagccctgctccttggcgtaatttgaaatgtcctgctccaatgcctgccagtattcaagcctttttttattgtaaatttcctcgtaaagcggtatgaggtcaggatacttctcacggatatacgtcattatcccgcctttgaactgcccgcgtaaattcaggttttcaagccagattaaatcagcataatcttttacctcctctattattgccttcacgtctgttattctggggaatatgggcgagacgaagcatacggtgcggatacctgcctcgtatgtctgacgcatcgctttcagacggcgttcaatgcttacggcgttgtccatatctgcgcagaactgctcgtcgagcgtattgacagaccatgacacagtcactttgggaaaactcttcaataggtcgagatcgcgaaggacaagatcggactttgtgcatatcataatctcggcatcgcttcctcgcagctcttcgagcagccttcgggtacggtggaattcttcttcatacggattgtaaccgtccgtcacagaccctattacaacacgttcaccgtcgtatttatgaggattcgttatcggcttccagttttttacatctaaaaacgtaccccacggctcggtgtgcccggtgaaccgtttcatgaacgatgcgtagcaatacctgcaggcgtggggacaccctacataagggttgaccgaatatcctcccaccggcagagaggatttggtcattacactctttacatctatttcctttattgtatccatattcattgtattcgtctggtaaattgttccggcaattcctgaatcattctttcgtcgcccataatcggcagcaaatcctctttcatgaacaccggtatgccatgagcctttgcctgttctgcaatgctaagcacccattcggggcgcgaatatgactttccttttcggtttccggtctctgtgcctatgacaatccagtcaattccctcgaaatcaatctcgccgatatcatcgaagagaggttcaaacgtgacatggtagtgtcgtgctttgatattctttttcaaatcatcaatcctccttttctcggaactgcgcgtgacggtcacgcccatccatacgttctcgtcgtcagaggagaaactgattttgtcagggcgcttcgtcagaaagatataggcgtgctggggattgctgctgatccgctcgaaaatttctgcgttccattcaggcttccaatcggagaaatcgctcattcctgtcatgagccacacatgaggacgggacgtatcgatgatgcgcagttttcgttccatgtattcaggcacggaaaagtcgtcggtaatgtggaaacggcggcagttgttacgggcatagcagtaagggcatcctatagtgcaccctaccactatgttcatgttttttatcagggatttaatgcagacactcataacacaactgtttctccgtcctccgggataatcagccggctcatgtcggcttcgtgatgcgttgcctcattgcgcagaattgcacgggtggtctggcaatggtcgatggcatccatgtgtacggctatcagcttgatatgcgaaggcaattcgtcaagtatctgcatcacttcgttctcgtcggggatgataggaccgtccgttttggaaaattcgggaaagattgcacctccggagtttaccacgatatagtcaggattgaaccgttccacggtgtctcggatacatgcttcccatcggcagtcacccattatataaacggtcgggaagccctcggcttttagcacataacctgatacaggtcccatcatctgcccgatctgcccgaaaccatgatgtccggtcgtgcggtaaatggatatgccgtctattgtttttatttcttcgatgggtatcacatttgtaaatccgtcgtttctgatggcgtccgcgtcctggggctgaacgtagaaaggaatttctttgggcaaatgtgtggggacactcggctcgtaatggtcgatgtgattgtgggtcaggagcaccatgtccacgcctccgataatatcctgaataggaatggtgaggtgtaccctcggtgttttattcacaccgagggccgatatcaaagtgcctttgtcggctaaaacggggtcaattagcatggtgtgtcccgcatacctgattttcaaggtggcattgcgcaccaattgtactgtggatgtctttttcatgactatatgtcttgttattgattacgggtgcaaagttcggaagaatccggcgaaacatctatgcctgaaaaaacggtaattatgccattttgataaatgaaattattatctttgcaaaaacgacaaggatatggacgagataatcaaccctgatcgactggtcagcgtaccgttcaacaagacacgctgcggcgtggatttttacatcaatactgccataaacaaggacatcggacttgtgctgacagaaaacaagcggtttaagacagacttcttcagcttctactttttccgtaaggcaaacggatatttgctactgaacttccgcaagattgaactgcgcgacggcatggttctcctgctttcaccccatcagcaacaagagtggcatgtagatgagacggcgttggattacacgttccttatattccgcgaagatttcatgcgtacttttatcgccgacaagttcttcgtttttcgccttttgtattgttaccagacagatacgccgccttacatcaatgccacacatgacgaaatgaaggaatatatgcggctgctcggaaagattaagtatgagctgatgaatccagtgtccgatacgtacaatatcattgtttccttactatattatcttttgctgattatcaatcgtacatacgctgccgcctattgcttgcccgctgaaattgctaaaaacaatttcgcttttcggttcaaggacttgttggaacagaatatccgcacccaccagcgggtgcaggaatatgcagacatgcttcatgtcagtcgcatcacactcaataactcagtaaaagcccaattcggagtatcagctacccatttgataaaacaacgtctgcttgaggaactgaagaacgaattgctattctccaaccgcactgtcagtgaaatggcggatgatttcaatttctctgatccgagccatctcatgcgcttcttcaaacagcaaacaggcaaaacatttactcagtacatgacggattacaataaaggcatatacgaataacttcttaatatagtcgatagcggctatcgaaatatggttgttgatgttcaggcgtttttgtactgcatgaaccattttacgatttctggatcttcgtgcgagccgagtaagaaaggcttgtcggtatccagcgtctttatccgtgccatgtcgtcggccgacagggtgaagtctaatatgtcgagattctgcttcatgcgttccggtttcacagacttaggaataattatgcacactgatatttatcgcgcccggacaggtgttcggtgcggaagatgacggcatgcagttccaaccagatggctacctgcttatgttccatcccgacctgctgcggaatacacctctcgggcggataatgcgtgaatattcgttcttttcctacgagacaaacgaggcattgcaccttagtgtggaagaacggcaaatcatcatggattgcttccacaagattcaatatgaattgaaccatccgatacaccgtcacagcaagaacctcatcacagacagcatcaagacgttccttgattactgcacacgtttctatgaccgccagttcatcacacgcgacaaccaaaaccgagacatcctcgcaagatttgagcggttgcttgacgaatacttccatgatggggctgctaaacggataggcttgcccactgtacagtattgtgcagacaagctctgcctctcgcccaactatttcagtgatttattgaaaaaagaaacaggttcaaccgccctgcatttcattcatgacaagtctattgaaatagccaagacggaacttgcatctacagacgacaccgttaatgaaatcgcctataatctcggttttcagtacccgcaacattttacccgactgttcaagaaagaggtaggttacactccgaatgaatatagagcgcaagtgtcgtgagaattggattagtacagaatattagaacccaacacctctcttgcgcttaactttcttccttctgcgaagtatatccaccatttcctgattggcttccgcatcagcagcgttataagatgagccactgctttttagcaatccccaagagccgttgaacaactcgctttgtgccgtgccggacggtgcgcttggtgtagccgtttcatatattccggctgttattcccatacgttccctgcatctgttgtgctgcaaagccgcgtcaatcttggaataactgaaacgcctgtccactttggagccgttgaaatggtagccattcatggagaatacaacaccctgcacctcgctggtctgccccttatgcttgaaatatacttccactccctgccgtttcaggttggcgataagcacgttccagttgccgcatctgccgacttccattttgatgatgtcgtaaagcgcatatttcgtcctgtctggctctttcaggcggttgcgtttgacattgtcctttccgccagccatatgcaagccgtatttcaaggtcaattccttgcagatgcgggtactgcgcagacgctcgtgcctgtccgatatggtattgccgttgttgtctatgcggttgaaagcaatatgcacgtgcggatgctccttgtcgaaatgctgggcgatgaagaactgcgtattcttgattcccatccgttccatatattcaagcgcgatgcctgccatgatacggttcgtcagccgtaactcatcctctttggaaaaactcaacgcgatatgtccgacaggttttgtcaccttatcgttcatccgtgactgggcattgaaactcatggcgatagtttccagattttccataaacaagccttcgcttgctactatctgcgtatccttcttcttgtcgatgatgtaatccaccacacccttgaagtcgcttccttttacgattttcgccatcatatccctatcttggttataagttcatgaatccttgccactgccaccttgcagtcccaccgttcatcgtggaagcctccggcgtttgccttacgcgcaagctggttgagattgttagccatgccgcagagttggcggatgtatccggcatgttcctccgacagccgttctttcacatgaccgttacggaaacattccctcatgtactcgcttggtgatacgcccgcctcatgcgatcgtgtcagcaggcggaagtagtcggctgccgtcattttcactgcgatacggtatttctgtttctcggttgcttccttcttggggcgacctcccttgttgcgttccttgtgttcctttgtctgttccatattttattccttttaattcggttactgattcaactgtatagaccgacgggatgccacctcctgcaatttggatggtgggtggcaagcggtttcggtacacccgaaacacaaacttgctacctcccaatccttaaggaatgagtttcgggcatctcccgtttttctcattcgggatgtcataatcccaaccctttcttcttgggttttacgatagttcttggcggtggactaacggctaatttctgccggattccacgcaggtaatcgttcaggtctttatgccctttgtagttgtcggagaagtcgcggatgcgtccggcgaacttcctttccaattcccgatacgcctttcttcccgcctcgtcattgtcgagcatgcagtggatacgtccatacccgtgcagcacatctatagctttggaaacattggcggtcgaattgaggatgacgtaatcctgcctgtcaaggtcgggcaagttcgagcagttcctcttccgcaacgtgaggaatgaaagatagtccatcatgccctcgaatacaaggcatttctctctcgcttctccctgttgccgaatatggctgatgtctttgggtgcgacacagcctttgaaaaaacggttacgcacttcaaatcctcccgccacattcggaaaaccgatggcgaaatagggcttgccgttatgggtgaagtggagctctttacattgcgcctttgccaaagcgatgtttatgccccgttcctgcaagtatcggagcaatgccggatgggtgagttcgcccacctccaaatgttggaaactcggttcggatgcctgctggcgaaaagagaaagatatgggacggatgtgtggtgcctgttccgctatcttgccaagcagataaggcacatggtcggatgcgtacagtacccctgcaagtgcgatgatgttaccacctcttcccagtccataatcgaaccacaggttgcggtcggtgttcaccttgaacgaggcttccgtttcctgacggaacggggatttataccacaggcagtttccctgttgctttacgggcgaataacccaaactttgcagatagtccgcaattttgatttgttttgcttcttggatgttcatgatataatttctatggatttgatgatgactgtaaaaacgttgatttgatgaatgagatatgtattgtcctatacgttaatgctttatattctcaacatcttctcaacaaaccactcacaaatagagaatccaacaaactgatgctgtttccctctcaacttttcttttcgattgttgagaatttgttgagagtgtatgctgtttattatc

SEQ ID NO: 133 - DNA, 9819 bp, Butyricimonas faecihominis
aatttagtgagttcctcaatttaaaatctaaaatttaaaatctagaattatagggtttgttttaagatcttcacaagcgagtctctcgtttgaatgaaacgaggcatattttccggtgagatcggttcttttgggggtgaactcatttttaacgggttgatgggagttccatttttatatacccggaaatccaaatgagggcctgttgccagtcctgtactaccgacatagccgatgacatcaccttgttttacccgtttgcccggttggatccctttagcaaatttggaaaggtgcatatatgttgtggtgtacacgctgttgtgtttgatggttacgtagtttcctccaccgttagcttgataggcttttttcacgacaacgccgtccccgatggtgtgtacttccgtccctgttggggctgcatagtccacgccatgatgcgccctgtatcttttcagtaccgggtggaaacggttattggagaaaccggaagaaatacgggaatattttaagggggcttttaaaaaggttttttgtaagctatttccttcttcatcaaaataggccagtttttcgttttgttcaaaaggaatggcatagaagtctttgccggaattggtgaaaatggcggctttcacgttaaagtcttgcaggggtttgtcttccacgtatgattgttcgtaaaggacacgcactgaatcgcctttggcaatgccgtaaaaatcgatgctccatgcgtagatatcggatagcgtgacagcgagcatggggtctgcttgggcatcaaccatggcattccatagattggagtttataattatattagctgttttctctttggtcacgatgtcttttttgcccacgtaaacatccgcagtttccttgaaatctatgacaacgtattctaaggcatttttttcgtaaatgaaaaattccggggtgcgaaggctgtcttgtgccaagaaaagagtgtagttttgacctcttctgatacttcgtacgtcaaagatatccttgcagcgttgggagatttcatggattttggctggtgataccttgtatttggaaaggattaaagagagattctcattttttcccacgataccttcttctataataaagttttcatcggggataccgtatttgtaatgaatttgttgttgttcggtcgtgtcaacaacttcctctaccgcactagcctctaatattgcctctttgtttcctctgttgctgggccaaaaaataataatacctaacacgagccctatggctgcccaaatccaaatccatttcgtttttttcatcttttccgtttgattcctaatgttcactcaaaatccgggatgcaagttaggggattcctcttgaaactgcaataaggaaggaatgtttttttatccacatgatttgcaatgtgtgaaaagattcttaatgttgttattaataaaaagttaaagtcatttttttaatattactcctattagtattttactatttttgacaaaaaacaatataaaaaaatgttcctgattttttggtgtgtatttgtttttgaagtgatgatgtaaaagttgagaatgttattttcttctgaaaatgcaaaatggtgattaatgtaatttgatgtaaaccaacttgttaatgaatttgaatatcttaaaaatttcataaagttgatttttgaataacactaaattgtttttggaacgtctttttataaagtttatacctgttgttgtagataatattaattttaataacaagtttatggaagagccaattgtaaaagtcgaacatttgtcacatcgttacagcatccagtgggcggtaagagacattagtttcgaaatcccccggagggggatatacgggttgctagggtctaatggggccggaaagtcaaccacgatgaatattattagtggagttatcaaacaaaccgaagggcaggtttttatcaagggtattgatgcccgtaagagaccggttgatgcgaaacgccacatcggttttttaccgcagaagccgcctttgtatggtgatttgacagtggaagaatatttgattcactgtgcaagattacgttgggtggccgataaggatattattccggcggtggatgaggtgctggcaaagtgtggtattactcatttccgtaaacgtttgatcaagaatctatccggtggttatcaacagcgggttggtatcgcacaggctatcgttcataaacctgatctggttatctttgatgaaccgacaaacgggttggacccgaaccagatcatggagatccgtcatttgatccgggatattgccaaggatcgtacggtgattctttccacccatattttgactgaggttcaggccgtttgtgatcatatcttgatgatcgaggaaggtaagctcgtgtttatgggaacggtggatgaatttgataattatattatcccgaattctctctatgtttcaatgatagatccccccgttgccgacgagttggcaaagatcgagggagttcttggtgtggaagagttaggaaaccggaatttccgtattcgtttcacagaagcacaggaggttattgaccagatcgtgaaattaagcgctgctaacgattggcgtttgtcagaggttcgggtggagaagagttccctcgataatatattcgcagaattatctaagaaagcacattaaaaaaatcgggttatgtttaaaatgatatataatatagcgaggacggaattgcagatgttgttctattctcctgtggcatggctaattttagtcgtatttggggtacaatcgggaatgctttttgccgaccagttggccgggcttgtgagtgcccaagaaatgggatatgatattcaaggttccacgatcagtatttttgccaacagatggggaggtgttttcaccacgatgcagaattacctgtatttttatattcctctgttgaccatgagtttggtaagtaaggagttgagtagcgggtctattcgtttgttgtattcttctccgattacgaatacccagattatcgtgggaaaattcttctccatgatgatttacggtcttatcatgattggtattttattcttgattaccctttgtagctgggctatcgttaaggattttgaattatccatggttttaaccgggttgttgggattatacctgttgatctgtgcttacgcggctatcggtattttcatgtccagtttgacttcttaccagatcgtggcagctatcggtacgtttgccgtgttgatggtattgagcatgattggaggatggtggcaggattacgattttattcgtgacgtgacttattggttgtctatgccgggtcgaagcggtaagtttatagccggtttgatttgtagtgaagatgtcctttattttgttatcgtggtatgtcttttcttggcgttgacaattattcgcttgaactcggttcgtcagaaaattcggttcgtgatcactttgggaagaaatatcggtgttattttcttggcttgtttcttgggatatttgtctgcacttccgcagatgaaactttaccatgatgcgacatcaacgaaaatgaacacgttgaccccgaatagtcaggatatcgtggcgaagttggatggtggtatgacaataactacttacattaatgctcttgatccgggtgcatcttggtatgctgctccttattttctgaaaccggatatggagcgtttcgagcaatatttacgtttcaaaccggacatgaagttgaaatacgtgtattattatgataccacggcgaatcccatgctggacagaagattcccgaacgcaacacttcgcgagaagatggtggaggtttgtaagatctacggtttggattccaacaagtttatggcaccggaggagattcgaaaaattatagatttgtcgggagaaaataacacgttcgtgcgtcagatcgttcgagacaatggtgaaaaagcatggttgagaatatacaatgatatgcaacgtttcccgagtgaaaaagagatttcagccgctttcaaacggatggtgatggatctcccgaaggttggattcgtggaaggccatggagaacgtagttattcaggtggtaaagaccgtgattatagtgcgtttgctaatgataagggtttccgttatgctttggagaatcaagggtttgatgttgcaaaagttacgatggatcagcaagtgcctgaggatattaatattatcgtgatttctgatatgcgcgagtggtgtaccccggagcaggaggctaatttacaacagtatattgaccgggggggtaatttattcatcttgggagagccgaaacgtagagacgtgatgaataatttgtttgccaagttcggttacgagatgacaacaggagtgctggttaagagagacacgaacctgcaagctgacgtgattctttcctacccgacgaaagaggctgatagtattgcttatgattttggggcaatgcgtagtcgtcgtatggttatcacgacacctagtaccgccggattggagcaaattgccgataagggttacacggtgacgaatatgttcaaaactgacacgatcggtgtttggaatgaattggaaacgacagattttattgatgataccgtccgtctgaacccggctatcggggaggttgagaagatctacaataccgtggttgcgttgtccagaaaagtgggtaataaggaacagaaaattattttgaccggtgatgcggattgcattagtaacggggaattcggacgaagagttccgggcgttcggacggcaaacttctcgttaattaccggaagtttcttctggatgtcggataacgaagtgcctattgacgtaagacgtcctgccctgccggatgataaggtgtatgtggaaaaaaccggaagtaaggtgattaaatggtcgtttatgatcatattgcctctattgctagcgggaataggtatcttcttgtggattcgtagaaaaggaagataaaagatgctgagtttatgatcgggtaattagaaatcacccgatcataaattgtaatggtattaaaaaagattctataatttagggagttaagagaattaaaatatgtatatttgtaaggatgtacatttttaattttcaatttcaatttttaattcatacaggatgagctttaaaatagacaaacagacgttggatgatctggctattttcgggaataaccgaacgaagtctgtttatgatattttcaaccgaacccgtacgcggggtggtgcgaaaattcttgaagagatgtttttatatcccctttcggatgcagaccagattaacgagaggagtgatgtgattcgttattatcgtgatattgaggcagaattcccgtttcgtggtgagatttttgacacgatggaattctatttgggtaacacggacaggcgtacacagctgatgacgcaggataacacgttaggacggaaattcaagaatctcgttgggactgatacagagtatacccaaatccacaacgggattgtttgttgtatagagttgttgaacacgctggatgccttcttgaagaattccaaggcggatgctggtaacaagaccatagcggagttgacggctagtttacgggggttactgggtaacgagaagtggtcctggtatgtttccgagaagggaaagaagaaactgggttacgagcaggcggtggtttacgaccgggtgttgcgtttcgaggaacgggataagctgatgaagattttgtattacgtttatttgctggatgtttacatggcggtggccaacgtggcgaaagaacgtggttttgttttcgcgaaagctcacccgaatgacaagaacacgttggttatgaaaggtgtattccatcctttccttacgaatcctgtcggtaacacgatcacggtggacgagaatagtaacgtgattttcttgacgggagcgaacatggccgggaaatcgactttcatgaagagttttggtatcacggttttccttgctcacgtgggatttcccgtccccgcgaaggaaatggaattttccgttcaaaacggaatgttcacgacgattaacctgccggataacttgagtatgggatatagccatttttatgccgaggttttgcgggtgaagaaggtggcacaacaggttagacaaacccagcatttgattgtggtgtttgacgagttgttccgcggtacgaacgtgaaagatgcttacgacgcgacggttgcggtgacggaggcttttgccggaatccggaattgcacgtttatcatttcgactcatattatagaggcgggagaggtactgaaggaaaggtgtgataatattaatttcgtttatttgccgaccaagatggagggaagtaagcctgtttatacttacacgctggctcccggtatcacggatgatcgtcatggtatgatgatcgtgaataacgaacatattattgaaatcattaaaaatggagaagcatgagttttgagacagataaacagaccctagatgatctgaatcttctggggaaatacaagaataattccgtttacagtttgtatgtcgggacgatcacccggggaggtgaacgaaagatggaggatatgttcctgcatccgttgacagatgcgaagtcaatcaacgagcgttctgccgtgttccgttattttagagatcatgattttggttttcctttcgggaaggacgagtttgatgtcgtggaacaatatattgccggggctagtggaaagcgtgcttttatgaatatgctgcaaattatgcgggcaaaagctatgttttacatcagccatgatccggaattcgggattatccgggatcgtatcgtgacgtcgattgaatttttccgaaaggcccggacttattttgacgagttgggacgtgacgtggccggtaatcctttccaaaagatcgcggaacgcgggaaagctttgttgatcgatagccgggtggcgaagttattggagaattctcgtcgggagaatcccggtttgatggatatgatttgttttgacaggaatttgcggtgtatttctcacaagaacttcaaggaggtaatagagttgttacaggagattgacgtgaacgtggtggttggtagcgtggcccgagagaagaaattctgctttgcggaggcggctgatgacggggagatcttggttgcgatgaagggtttgcaccatcctcgtattgatggggcgatctcgaatgatttggaggtgactgccacgaagaacgtgttcttcttgacaggagctaacatggccggaaagtccacgttgatgaagtcgttcggtatcgcggtgtacctagctcacatgggattccccgtggcggcaacttccatgcagtttcggattcaggatggtatgtacacgtctattaacgtgccggataatattaacttgggttacagtcacttctatgcggaggttcttcgcgtgaagaaggttgctattgaggtgagtcgtgacaaacgcttgatcgtgattttcgacgagttgttcaagggtacgaacgtgaaagatgcttttgatgccactttagctgttacggaggcgattgcggagagaaagaactgtgcgttcatggtttctactcatatcattgaggtaggacaggaactcgggaaacgttgtaataacgtgacgttcgagtatcttccgaccgtgatgaaaggtaagttaccaacgtacacgtataagctggagcaaggtatcacgagtgataagcatggtatgattattattaataacgagaagattatcgagattattaaaggagaggttgcctcttagtctggtaaagatttcagaataatatattgatcccgggaatcgtaatggtttccgggatatttttttgttcgcaattataaattgatttctattcgcttttttacttttaatgtgattatatttgtgttcgtcaaaacgtaatgcaagatcgatgttgaatgaaattgaggttggtttgatttgtttatcagagagaaagaagtttaaagaggtgtacgaagagtattttaccgctttgaagtatttcgctatgcgttacgtgaaggatgaagaggtggcttgtgatctattgcaggatatttttgtcaaattgtgggagaagggagatcggttcgagaacgagatgcaattgaagacttatctgtaccgggttgtccggaatcattgcctgacttatgttcgggatacccaaaggaaagagaaacgtatggagggtttcgaggtggaagagacagaggaatcgtttgtacaccagatgatcgaggccgagatatacgctttgataaatgatattttcgaggaactcccggatgcttgcaggaatgtttacatgaagagcttggaaggtaagagccataaggagattgcggaagaattgcacatcgctatcactacgattaaaaaacacaagacgaatgcgaataactatctgcgagagcgattgaaggggctgttgtgctttatgatgtacttggggatttaatcatcataaatcttttttgaaaaaaagttcttttcagagtactaccatttttactttttggagttcttagtaaaagtgatagtaagaaatgatcatttattgattgtcaaggaagagagaatgatgataaacaaggagattgaaaatttaataattaaggctcttttcaaagagattacggatgacgaacagcgacggttggacgagtggctgaatatatctgaagggaatcgtattttctttgatcgcttgcattccgagaggtatctgaaaggtgcgatcggtgatcgtaaccgggaactgagaaaggaaggttggaagaggttggaggaaaggactattggtaagaggagtcacaagatccgtatattcgtgctacgggttgccgctatgttggctttgcctttgttggtgggaggtattatgtggtacatatcagagcgtgggggagcagatttgcctttggctaatcaggaaatcaagataggaggttcgaaggcggtggtaactctatcgagcggggaacagttgtctcttttcggggatacaatcgtatgtgtgaatgatgggttggcgacgttggttaatatgaaggacacgttgaattttatgaaaagtaatcatccagtcgttgctgataatagttataacgtgattcagatacctcggggtggggagtatattgtgcgtttggaggatggaacaactgtttatttgaattcggagtccgagttgagaattccggtacattttgggaaaggcgagaggttggtttggttgacgggggaggcgtatttcagcgtgaaacacgaggcggagcggaagtttgttgtaagaacaaacaaggcggatatagcagtgttgggtacggagttcggggtgagagtttattcggaggaagatgagttgctgaccacgctggtgaaaggttccgtcgaggtaaagagtgatcatgatgtacaccgaattattcccggcgagcaagctacagtggataatacggggaaaattgaggttcgggaggtgaacgtggatgagttcgtggcttggaaatcgggacgggtggtattcgtgaatgctcgcttagaggatattatggatgaattacagcgttggtatgattttaatgttttctattcgtctccggaattgaaagagctacgtttcacgatggatattatgaaatataaggaggtttcagagatattcgagttgatggagaagattaaaaaagtatcatttagcgtgaatggaaataatgtaatactaaaa

SEQ ID NO: 134 - DNA, 9807 bp, Butyricimonas faecihominis
aaataactattgcttctttattaagacctagaaatcatcacatttaatatattactgatacgcaatgctctaaaaatatttagttatttactataacagtcaatgtatatttcaggtatacctgataatcttccattatcatctggtctattactgccaacggaacgtccttgttatcccggaatcatttgaagctgccgagtgcggtatggtagttcttggccgtaccgatgtgatttaattggcagagtcgctcgatgagattctccatgaatataaaaagggtattttctttttcggtgcaccggaactccataattatatcttcagatgaataacctcgtcgtagcagatcgaatctttcaataatcctgttcagcttttccaaattctcctccagttttcggattattgtctgaataacggttatccgttcgccagccggtgccgaaacaggtcttgactgtttatcatcccattcatgagagaacaccttataaccggttgtgatttgcctgacgacacggcggtgagttacaaaataaacgatagtgcccggacggccttcgactgttgacgggcggaatttcacctttactgttgtcatacttatatttatttaattggtaatgtttcattctcgtcttaacttgcggcatataaaaatggtcaacgtgacacagacaacgagaaaagcagcggtacagccgagtacttcccacagcaatatgctatgtataagacgagcgttcgcggcgcaggtacaaacgaaagccgccgcgagggagatgattgcctctaccatacaccagaaagcggttgcggagataagcacacggtcattcgccgagaggcgtccggctagccttgcgcattcccgttccatcctgtcggccatcttccggcagattttctctccctcctgttcaagcgtctttctcgcttcctcgccgagtgtgaccgtgcttgccccacgcagggaagaaacagccccgtccattttgggcagggcttccgaaagtctgttttcgagcttttccacgttggcactaagaatgcggacagcttcataattgtttttcagcgcatcgattatgcggtcttgctcctgcattttttcggcagtcggaagtgccccgtctatttccgagaaatcgaattttttattcataggctgttatctttttcgtcctgtcttcggtttctttccgattacccttgccgcttcacgggcgcaccggcgtgcccattcccgttcgtcctcgtcctcgcgtcttccccaaggcaggtcgttggaactgccgccaccacctcccgaaggaaccgccggagtatcgagcatcccgacgaaaagtgccgcagccatgtccgtgaggtcacggctgttggctgtctcccggtagtcgaactcgtcattgaatacgtccaacgcttcatcgggaatgaagaaccggcggctttccccgtcgatgtcgatatggtacgggctggtaccgggacgatagccggtgtattgcggaaccggtgtcgttccttgtgcgtgaaccggaatcgtccggggtgtagtcggtatagatttccctgcggcgggctgtgtcgaaacagtccttgtcttgggagccgcgtgcagctttttccacgtgctttcaagtttggtcgccatgaggttgcgccccctgccgagttcggaagccttgtatctggcgttgcctttcttcagcacgtaaccgcgcaatatcttcttgttgtcgcgcagctcccaaaactcatatcccttgctccggagtctggccacgtactcgtcccatgaccagctttccatggattgcagggtttccatgcagtcccggttcacctgcccgatgttcgtctcacgtacttcggcggcagtcgtccagccccgtttcagggccacacgctcggctgcccgctgtgcccgcaggtgtatgtcatggtcgttgttgatattcccccgttcgtcgatacggcagaacgcaccgtgaaggtggggaatgccgctcttggattccagatgcagccacaccgtgcccttgctgcctttgagggcggttttcggggaataggtcttgccgttcttgtcaagcagttcgatgttgtcgaactcatccgtgaagtcgtcccacaacctttgccagtcgtcgatggtaaagtctttggtgtgttccggcgcagggctgacctcgatgcggatgacggaatttttgacccgtttggacttctccagcgtcagccgcatagaatcccatatacccgtggcatccagaccgggcggcagcagattgtcccccacgtggaagatgcgttcgggatgtttcttgttcctcgattctcccgtgatgtacctgatgtcatttatcccgtgggagatggatttcgctttccctatcatggctcgtcctccctgtcttcaccgttccttgtcccgtcgggcaggcggttggaaaaccgtaccttgtcgagcacgtccgtgacacgctcggccagcctgccgagttccttgagccattcgagcatgaaagggtaactgttaaacatctgtctgcgcttttcggggttcatgccacggagcgcggacgtgtagttcacgaggtcgctgcggcatcctataagggtctccatgaccgcctcctgccttgccgtcagcctcgctttcggcctgtagttgaaagctcttgccagcacgtagctgctgacggtcatgccgcactcggcggcaaggcggcggatgtactgtttctgttccacggtgactttggctccgatgtattcggtgcggctgccgccggacggaaatgatgtgtcttgcttattgtcttctgtcataactgttgttttataagggttaagcggtgcgagcctgcgagcgccgccaccggcgaactgccagtgagccgcgagagcgccaagggatgactgaccgaagggaggtgataccttggcatatctcgaaactgaaagacgttttcacctctcctgcggcgtgcctccgctgccggataaaatgccattcaaaggccgttcagatgccgttcgaataccattcagggcgggattgcaaaggtttacgacgtggaagttctgaaagtccgtccattcctcgacacaggtcatggaagcgacggaagcggttttggaagcgtccaccgctatcatgcccagcttttccatcgttgcaaggagattgcggattctttttctccctatgttccattcctccgcgagtctggtttccgagaactggaactgtccgggctgcaattcctgcggcctgcggaatgaatcgcccctgccgggggacagtcgcatccgtgagagcaggtcataaaaaagagtatggttgccgattgtattgccgtcgtcatctttcgttgtccctccgagccattcgattgcctctgcggtaaagtggatgcggactgtacggaagccctgcggctttttgaaaagggatgtttccttgttcctcttgttttcttgcataattcaataaaaaataagggaatggagtatcggaaaacctacaacagtttcaatgagatagtgcgtgcgggagtttccttgtccgtccgataccccgttccggttttgacatcagttccggttcacgttggcggcgggttgggattgcaggtgtccccgtgcgtcctccaccgccttgaagtcggaagagattttcatcagcacgatgctgacgcggcagagctggccgatgtcaacgaaatccttgacggcttccaacagtttttgcgcacgttcctgacggtgtttcatcacggcctcgttacttgttccgttttctttggcaagcccgtgattgagaaagcggttgacagccaacatgtccgtcgcctcaatcgttgcggtatcgccgttgcccgtcccgtaaccgaccattacccgtatggaatcggcctcgtagggggaacagccgcgaagaaagtccagaatggtctgtaccttcgcgctgattacgggtctgctctctttctttctctgttccttgttcggggattcctgaaccgtggcattcctgatacccggttccatgttctttgaattgtccataactgcattgttctaaaaaaggttgatgaatcatttgtttttctcatgtgttaccagatagtgggatgcctcgctgtcgatctcgacctgcgatttcacccgtacccgtttcagccatgcgtcgaggtcttccttggcgaagaagcacagcttgccgcccggcttgtagtaagggattgcgcggcgcatcatcatcttgtagagatagcttggcttcagtccgaggtaacgggctgcttccgtggtggtcatcaaattacgttcactttccatatacgttcatttttattgttacttgtactttcgtagaatcggaatctgctgttttttcagacttttcctttcttctgtttccgatgcaaagttaagtttgctccaaggtgggccaatgggggacgaatggggaaagtgcatgaaaagaaaatgcgccataccgttgtgtatgaacggtatagcgcatagctataatgggaagataccgggctgaatggggaaacgacgggcggttatggggtacctttcagccgtcttgcgttttcaacggccttgtcgatggatttgcggaaatcttgattctctttggtggcagcattgttgcaaacatcgctgcggtgcttgtcgtagtaggatttggatatgccgcagcgtttcaggaactcttccgaccagagtttcccgcgctctcgcggcctgatggtacgggcgatggaaaacaccatgtaacagatgcgaaggttctctttcgggcgcacgatgacctcccgttcggtgggtttcaggttcaggaagttcacgaagtcgctgcccgacagatactcgaactggtagtcgttgcacacctcgtaaatgaacaggcacagggcgaggtcaacggtatccatccatgcggtggtctcttgcagcaggcctgcacggttcatgggttgccctccttcacgcgtctgatgtcggagatgatgcttccggcgattccttgcagacgctccaccagcacgtcgaggaataccggtttgaagcaccagacacagaaattccggtcacgctcctgctgccattccttatatgataggtttgcgtgtgcatgagcttggtcatattttgcctttgctactccgcactccgtgtcgagcgacctgtattcttccgaatccagaggcaggaaatccaaccggttactcattgccgaatactcgcgccaaagttctgtggcggctgttttcgcttcctcgtaccggtgttcaaaggggcttagatattcctcgaaaagggcttcaaagttcactgtctgcaacggtgtcctgtcgagtgaaaggtatttgttcgtttccgaaagaagggaagaagaaaagtccagaagttgtccggggttctcctttaccagacaggctgcctccttgacaagaaggttcgtgtcgttgaaatcctgatagaacagggacggcggcaaggcctgttcaaaagacaagacgccttgtccgtaagttgcaagaagcgtgttcacttcgtgcaaccgttgtgttatttgccgtatcatcataatcgtcaggaattgaaaaggtcgtccatcgtcacctcgctgtggacgatgcttctgttcttgccattggccacaccatacgtcgtgataaaggtatgaaccagtgtcttgttggtcttggtaagttccctgaacaaaccggaacggtcacgcaaccggcgttcgtattcgggcttgatacggtatgtgtccatgcagaatttcatctcgcacaggtgtatgatccggtcagcccgctctattatcatgtctatttgtccgccgggcattccttcctccttattgggcttgacctgccatgtggacaaggatgtagccatgccccttattcccaaagccgacttgatctgtttatgatgtctcatgcagacaagctcgaaactgctacccatccagtcgaatacatttccggaatcaagatgattgctccaccattcatcatcgtgtgagaggttgtcggcaaggaacttgaaatagaacagcgaaaagaaatccgtaagcctgtaaacggctccgcgacgtttgttgccgtactgaagccatttctctatcatatcggacctttcaaggttttttatcgccttggttatgttgctgctcttcgatgatagtgactggaatatgtccttgcttgtcattcccgattcgtgttcgctgagtagttgtacgattgacgtgtacaggtcggcattgtcgaaaagggcgttgtatagctcctcgaactccagtttcaaaagtgcgccttcattgaaaaacagccggtctatattctgggaaaggctcaacgcggggtcaagaaggctgtaataaaacggaacaccgccaagcaccatgtatgtctgggtaagctggtaacgatcccattcgatgcctctggtagcgagataccgctccgtctcattcagggtgaacggggacagatgcaggttacacgtcactctggcatggaggcctcccttgttggcgacaatcttgtctttcatccatgaggtcgcggaccccgtggcgataagcatgatgttccgctgtgacatggcccagccgttccagaagttttcaagggccgacacgaatatggattttcccgaatccatccaaggcatttcatctatgaacacaatccgtttacggtcagcgggcagggacgacaggtattcttcaagggcataaaaggcttcatcccagttgcttaaatgggagaacttttttcccgaataactgttgagcacattcaggaagttgttcaactgtctgcgggtggtcattccatgcgcaccgacatatttgaaatcaaactcccggtcgaaaaattcttcaatcaggaatgtctttccgatacgccgcctgccgtagactatgaccagctccgatctgtccgagttcaggcatctttccagttccgcgtgttctttgtcgcggccaataagtttatccatactttcatgttttgatgcaaaattacgcatttggaattgcccaagcaaattttagaaccacttatttgatattatctatgaaatattacgctgtaaattcagatataaggttttgtgaggtttatgaactgcgtccataaatctgaaattatctatccaaatcaagaagataagttcaggtttatgtatctgataaacagatatgccgagttttgacctcttcggattgaaatctggccggaaaggtcaaaattcggcaattattcaaataaggctgaaaacggtggtaatggagtacaacgcaggatgtcagccaaatacgttatcaaccagattcaccgcttcaactttcttgctgtcaacgattttcgcgtaaatctgcgtagtctttacgttggcatggccgagcagcttgctcgtggtataaagatccgcaccgagggtaagcatcattgtggcgaacgtgtggcggctcgtgtgataggtgatttttttattgattcctgccgttgccatccatttggccagtaccttgttgatattgggttctgccgggagtccggcaaagacatgcagcccgtcttccgcaccgttcctttcaggcagccaacggacggcatggcgggaaagaggcaagtaaatcggtgtggtagttttttgcatcacggttgacatccggtattgttccccgtcctgaacaatatctttccatcgtaaggcataaacatcgctcaacctcaaaccgcagtaacaggcgaaaaggtaggcacgtttcacgtcttcgcgggggcattccgtgtcaatcagaacttttatttcgtcaatggtcaggtattcccgtttggattccggcaccttgatacgttctgtggctgcaagtgtcattatcgggttctccgggataacctcggcacggacggcggcgttgagtgcggtggagaaataacccacgtagtccgctgcactcttgggtgaaagcggcttgtcccaccgggtcttgtaggtgtgctgaatccagtcgatgaaacccagacaccagtccttgtcaatctctctcatcttcacctttttcttgtaaaggggaagtaaccggcagactgttcgtaacagtttcagtcctctcgcgccttttcgttcctgttcggcaagataggcttccatccagtcgtccagtagcattttggaacggacggatgtctttttcagtccggccttcgagtgagtcagttcgatgatgcgttttgatttgatggcctctaccgccgcttttgtggcccggttctgctccttgaccataggattgatttcgggcaacaggtacagtttcaagaactcgtaactgcgttttccgtcaacatagatgtcgagataataggattccgaaccgtcggcgagcttcttcgtgcgcacctttaccggttccttgagtctggtcgatttctttgttgttgccatatataataatgtatttagaatgcgtcgtcaaccaaggtgattgcatcgtcctttttcttgtctactatttttgcataaacctgtgtggcacgcacggaacggtggccgaggattttggaaacggtatagatgtccgctccgagcgtcagcagcagcaccgcacatgaatgacgtgccgtgtggaatgtcacgttcttctttacgcctgccttatcagcccagttcttgagactgacacaaaggttgcttgtattgggcagccctccaaagacaaggccatccggtgtacagccattacgttccggcaaccattttaccgcttgggacgaaagggggatataaacgggattggtggtctttgtcattactaccgacacgagccattgcccgcctgatatggaaatgtcacgccaacgcaatttccgtatgtcactgatacgaagtccgcaaaaacaggaaaacaggtatgcctgccgtacctgctcgttaaaaaatggcgtggctatcattttctttatctcctcgatggtcagaaaatcccgtttgctttcgggaactttgattttctcggtcatctccagtttgtaccaaggatttgattcaatcagtctctcacgtacagcctcgttcaaagcggtacgcaaagtggtataataggaatgagccgtcttgggagtaatctgttttccccatgcggtcttgcaggaagaacgaagccagtcgatataatcaatgtaaaactgtctgtccacatcacagagcctgacatctgcacggaatttcagcaagtttttacgggcgttgtcgattccgttcaggtcgcgtgcttcccggtgttcgtggttcttgcggacaatggtcatccagtcggacagcagcatatcggaagatttgctttccggtactgttcccaccttcgcattgagcagggcttctgtccgttctcgctgaatatcttccgccttgcggagtgtctgcgcattttgccgccttgctttggcagatgtttccggcatgaggtagagttgcagaaactcgtactcatgcccgccgtctacactacggtcaagaaacagggataaacgtccgtccgccagtttacggtgacgtaacttgaacggagatttctctattaatgatttcttttttcttcccattgtatatcaatgatttatatccatatacaaaggtaacaaataatccggatataagtatcgttttaggtaacaaaaatgtcgaataatagagatttttaaggaatacaacagaaatcatcattagttaataatacat

SEQ ID NO: 135 - DNA, 9774 bp, Butyricimonas faecihominis
ggaataccttttacctgttgcttgtcgtagtattagcaattgtaattttaaaaacatcgtgtatgggagatcagaaacaagatgaaacgactttgaagtcaaaggctgttttggaaaatatagctgaacggaaaagtgttcggaagtatttgaataagagtgtggaggaagataagatcgatgccatggtgaaagccggtatggcggctccttccggcatggacagacgtccgtgggagtttgtggtcgtgacggatcgggaggctcttgattcgatggcagcgaaattgccttatgctaaaatgttgacaaatgccccgttggctattgttgtctgtggggatacgacacgttcttcttactggtatctggattgctctgcggcaacacagaatgtattgttggccgcggaggcattgggacttggtgccgtgtggacggcagcttatccttacgaggatcggattgatgttgtacgccagaatacgggattaccggaaaatatcgtgcctctttgcgtgattccgataggttacccggatggcccacagaaagcgaaagataagtttgacctgcaacgggtgcatcggaataaatactaattgggagaggttatatccacccgcttgtctatgtctgccccgggggtaagctagggatgggctaagacaagtaccaagcatttacatggcatgaacatagcaagtacaatctccagtgttcttgctatgttcatgctatgaagttgttgtcttcttgtcccggtctatcggtagacaagggctagctaatatcttagaaaagtaacaagctgaaagccatcagcgccatacctgccaccagtccgtaaatggatagatgatgcgccccgtattctttggcggtgggcaaaagttcatccagtgagataaaaaccatgatgcctgccacgagtgcgaataggacgcctaggataacagaattgattccgataaaagtgtagatgaggaagaacccgataattgctcctaagggttccgataagccggagaggaaggatagcttgaatgctttcttacgacttccggtagcaaagaaaataggaacagatacggcaattccttccgggatattgtgtatggcgatggcaaaggcaatcgggtaggcaatttcggggttcgatagcccggcaatgaatgtcgctaatccttccgggaaattgtgaatcccgatagcgagagccgagaatattcccatacgcattaacttcttgtcatgcggttgcttggcttccatgctttccacggatttcacctcgtgcggattctcatacgagggaatgagtttatcaatgatagcaatcagacccatccctgaaaagaatgaaatggccacgataacatcggctattttctcggagtagttttctcgcaaagcctcttgggccgtggggaatatttccacgaatgagacataaatcatcactcctgcgctgaatccgagggagagggacaggaatttcttgttagtttttttggtgaggaaggcaatagcactcccgataccggttgataatccggcgaataaggtgagggcaaaagcaagtaatacgttatcccaagatagttccatcgtttatttcgtgtagacaaaaaagccagaaagggtctgtggatcttttctgactttctgtgttattgtcttcagagttatttcagtgttgatataatacggtgaagacgtgttaaagtttcttcttttcctagaatttcgataatatcaaacatatgcgggccgtcggcagaaccgataatagccaaccggaaaggattcatgatttttccgaatccgatttcttttccggaaacccactctttcacggcctcttccgtgtttggagaggtgaaatcggccactttttccagtacctcaatcaactcctgcataagtaccggagtttcttctttccagcttttcttcacgcctttctcatcgtaagcctgaggggcatggtagaagtactgggatgagttgtagatgtccgcgacaaaattggctctttctttcaaaagacggcaaatcttttccaatttcgccatgtcataggaaatcccgtcctttactaggaattcgtttaactgaacggccagttccgcgtcacttttttgtacgagatatttgtgattaaaccatttagccttgtccggattaaagcgagccccggatttattcacgcgttccagcgagaattgatcgcacaattcctgtaacgtgaagatttcttgctctgttccgggattccatcccagtagagccagcatgttgataaaggcttccggcaggtaaccgtcttctttatacccgtgccatttttctcctgtttcgggatcggtaaattccatcgggaataccgggaatcccattttatttccgtcacgtttgcttaactttccgttacccacgggtttcagaattagcggcaagtgagcgaactccggcatggtatcttcccaaccgaaagcgcggtataataacacgtgtagcgggagagagggtaaccattcttctccgcggatcacgtgggatattttcatcaagtggtcgtcaacgatgtttgccagatgataggtaggcatcccgtcggccttgaataaaactttatcatcaagtaacgaggtgttgaaatgtacttcaccccggataatgtcttgtaaatagagatcctcgttttcaggcattttgaaacgaatcacgtagtttgccccgctatccaacaatgtcttcacttcttcggtactcatggttagcgagttcttcatgttcttccggctgatggcgttgtacatgaatgtttcgccttttgactcgcaggctgcccgttgtgcgttaagttcttccgcggtgtcaaaagaatagtaagcattccctgattccacgagctgtagggcgtattgtttgtaaagcggtttccgctcgctttgacgataggggccgtattcacctcccacgccgacaccttcatcgacggtgaggccgcaccattttaatgattcgataatatattcttcggcacccggcacgtagcgggtttgatccgtgtcttcaattcgtaataaaaaatctcccccgtgatgacgggcaaataaataattgaaaagagctgttctcacacctcctagatggagggctccggtaggactgggagcaaatcttactcgtacttttctatccattgtttattgattttgaatattatgcctgttcgtttgttttctgattttcgtcgaaatcggaatcctcgtctgcagaaggttccgtgtctttcgctgttttttcctgttccagtaattgatgcaacaggtctttggcatatttaatggcataacgttccgcctcacttttggagtttatgccactcttgatttgttccgcgtaactgaacgggctgtccggcccttcggtaagaaggtacagggtaaaattactatgccgatcccgacttttactagtcagtccaaaccacatttcaatcgtgcgatcttccaagtatatgttgcgcttgaacttatacattaccttctatttttaggcgggtttttgaaattcagaataccaacggctacggctagagaagccatggctcccacgtttacatataccgccgtgcggtctccaccatgatacatgctgagtacgctggaaatcatgatcaagaacgcggctaaaattaataagtatctggctattcgcatactggtgatgaataattgtgttcaattgagtttttaaccgggttggcataaatttcaaggaagatattattcaagatagaacgattaccttctaatttttccaatttttcagccatgacacggataaagttttctttttcctcgtcattgtatttggacgcgaatttattcgtgctgtgaagtaaatcgtaggcgatatagttattcggccacaatttgaagttcccttggatgcgagcatccatgaatgcggctagttccgcaatccggtctccgttgttggcttgctcgtcgatctcgattagttcatgatcgatgggaggggtgatggcaaaatgtacccgccctttgaatccggataagccttgttgcatacttcgcatatcggctgccggggtttttacgtattcgcccacggtcttttggtacaattcgtctgttttcagatcgtcacaaggttcccattcgtaggaaattgaaaccggaacaacccggagttctttaaagttttccacgaaatctttgggaccgctcatacggaacattttcaacagactatgttgtgtccggtcgtccccatttttggtacgtccttctttttgcgcgatccagacagaatctttattttcataaatgacatcccgtaaataatgagaacgtaggttggcactggtaatcatgtctcttaccggtaatccgcgttcaatgatgaaacaagcatccaatttaaccaggtcggtaacccatttattgattaataaattactcccgatagctgcctcgcagtagtggcatcctcgttcacacagtagcacgttaagtatggccgaatccaaaatgatgtcccggtggttggatacgaaaaggtaactcttgtctttctcgatatattccaatccggtggcagtaactcctttggtcgttccggcgatcaaccgttgaatcgtcgggccaaagaattgagcttgaaattgctctctgctcgtgatgccttgtaattgttcttgtattttgcttttatcaacccttgtcatttgggagaaaagtgtcagaaattcttctgcttggctcaggcgctctacggcggccggaatttcttctccgatatagggtctgattgcgttaaattgggaatccgaagtcatgtcgtaattttagttattagaaatcacgaagcaaagatagataagaaatttgacaattgaaaattgacaattgaaaatgaggggagaaagccctagtttatatggattatccattgggatatggataaaaaaattgtgatttagtcattcttgatatcaaggtcaatgactaaatcacaggattttttagcttgcagctgtgttatactcttccgggatatacttcgagtgctttggctaatgtttccatggcacctttcaattcctcgattttgagtacgtaagcgatacgaacttcatctttcccaagtcccggggttgaatagaatccgctggccggagcgaccatcacggtttgtttgttgtattcaaactcttccagtaaccattttgcgaaagtatcggcatcatccacgggaagttttactacggcgtagaaagctcctctgggtttcgggcaaacaactcccggcattttgttcagggcctctaccatgaaatcacgtctttcgatatattcgttgtacacgctttcgaaatattcggccggggtgtccagtgatgcttcggcaacaatctgtccgattgccggggcgcacagacgggccattccgaatttcaaggcagccgccataacctctttgttgcgggtaaccaaagcaccgacgcgcaatccacattcgctatatctctttgacacggaatccaacaaaatcacgttttgctcgatacctgccaattgcatggtagagaaatgtttgtaaccgtcataacagaattcacgatatacctcgtctgcgtacagatacaaatcgtgtttcttcacgattacagctagttgctccagttcttccttggaatataaatagcctgtcgggttattcgggttcacgatcacgattcctttcgtgtggggagtgatcactttctcgatttcgctgatcgggggcagggcaaagttattctcgatagaagaagtaacggtttttacctttacaccgcacatcaaggcgaaagccgtgtagttcgcgtagaatggttcggggataataatttcgtcacccgggtttaatgtagacatgaaagcgatcgtgatggcctcagagcctccggtcgtgatcatgatgttattttcatcgatattgataccgatgttctggtaatatttggctagtttttttctgtaagagatatttcctgcagagtgagtgtattcaatcactttttcgttacaggtttttaatgcctgcaatgcaacatcgggagtctggatgtccggttgtccgatgttcaagtggtatactttgatacctctttctttagctttgtccgcgaacggaacgagtttgcggatgggcgaagaaggcatcgccattcctttttctgagatctgtggcataagttatttgagtttaaatttatcctgtacaaatatagacatattgagtgattttaattcaatctgccattttttttaatttgtctcgatttaataatttaattttcctccccttcacttcaaccagtccttcgttctttaaatcagaaagtaggcgaattagcgtctctgttgcggttcccacgaagttacttaaatcttcccgggtaacgttaagttttaaagtcccgtcttcttctaccccgaaatcggacgcgatcaataacaggatttctgccaaccgggctttcaccgatttttgtgcgatttcccggatatatcgattcgcgtcacccagttctttacaggcaatctgcatcatctcgtaggcaaagctgggactgtgggtgatcatgtgcatcaaagatgcattgggaatgtaacacaggatgcaatcggacatcgtttccacggaagtacaggcggcctcgttacgaatgaccgagcggaatccgaaaatgtcaccttcttttccgaaacggatgatctgatcttttccggctactccggtctggaaaattttcacgatacccgagaaaaggaaatagcatcctttaatacgggctccttcgttgtaaatatattctccttttttatagaatttgatggcattatccacgaacagggcctcgatttccgagtccgtcacgtttttaaatgtcagcttgaatttactgatacattcgcttacgtctggtaataaagcctcttctttcatagtcaagtcgctgttgtttatatggaacagattgtttgataaatggattcacaatcatatccacattcatggtaaagttgttgttgtgttccgtgttccacgaaatgatcgggaatacccagtcgcacaatttttgctgaatagccgtggtccgccataaattcaatcaccgcactacctaacccaccaacaattgttccgtcttccaaggtaatgatttttttgaatttatggaataccccgtgaagtaattcttcatccagtggtttgaggaatctcatatcgtagaaggctacggaacgatctgtcgttttttgtatggctttcaacgcctcattcccgatggctccgatggaaagaatggcaatatcgtttccctcaatcaggcaacggcctttaccgatggttaattctttgaacggggtgtgccagtcaaccatggtcccgttaccccgcgggtagcgaatagagaatggtccttgatccggcaattgagccgtgtacatcatgtcacgtaattcctcttcgtttaaaggagaggcgattgtcatgttcgggatgcaacggaaacttgctaggtcgaaagccccgtgatgtgttgatccgtcggctcctaccagtccgccccggtcaaggcagaaaaccacgttcagtttctgaagggccacgtcatgaatcacttgatcataggctcgctgcatgaatgaagagtagatgttacagaacgggacgtacccctgtgccgcaagtccggcggagaacgtcacggcgtgttgttctgcgatacccacgtcaaaacagcggtcaggcatctctttcatcatgatattcaaggagcatccactgggcatggcgggggtgattcccacgatcttggaattggtgtgtgccagttccaaaatggtatttccgaacacgtcctgaaatttaggaggcgtgttaggtttattctctttgatcagttctccggtttccttgttgaactttccgggggcgtgccaagttgtctggtctatttccgcttgtttgaatccttttccttttaccgtgatacaatgcaaaagtttaggaccttttatatctttcaaatctctcagcaccttgataaggtggttcacgtcgtggccgtccacgggaccgaagtaccggaaaccgagagcttcgaacaggttactttgacgtaatacgagtgatttgatgctattatctattttctggataaagttccgggcgcccggactgatcttgttaatccggccgagaatgtgccagatgtcatccttgagcttgttgtaggtctttgaagtcgtgatgtccagcaaatactcgttcatcccgcctacattcgggtcgatagccatgttgttgtcatttagaataaccagcaagttggagttgtttattccggcattattcaagccttcaaaagccaatcccccggtcatggcaccgtctccgatgatggcaaccgactggcggtcttcctctccgttcattttggctgcaacagccatacctaaagcggcagaaatagaggtcgaggaatgtcccgttccgaaagcgtcgtatttactttcacttcttttcgggaaaccactgagacctttatattgccggttggtagagaaattatcccgtctcccggtcagaatcttatgagggtaggcttggtgtccgacgtcccatacaatattatcgtaaggagcatcaaacacgtagtgtaatgccaccgtcaattcgacaactcccagtccggcaccaaaatgccccgggtgttccgaacactcgtcaatgattttctcacgcagctccttgcataattgaatcaggtcgtcttccgggacctttttcaaatcatcgggagaatttatagtgtttagtatatttcttttttcctcactcatgattagttattgaaaacaattggggaatttgttttcttaattctccattttcaattagtacacgattgttccgatgttttctcccagaatgacctttttaaggttacccggctgatccatgttgaacacgataatcggtaaatgattttctttacacatggttgttgccgtcaagtccatgactttaagtccccggttgtatatttcatcatacgtgattttatcaaatttcgttgccgtcgggtccttttccgggtctgccgtgtagattccgtccacgcgggtacctttaaacatggcgtctgcctcgatttcgattgcccgtaagctactggcagtgtctgtcgtgaagtaaggatttccggtacccccgctgataatcgttacgtgtccggattttaaatattccatggctttggctttcgagtaaaattccccgataggttccatgcgaatggcagttagtactttgttcttacagccttcgttgtccaaggcggagcttaaagccaaactattgatcacggttgccaacatacccatgctgtccccttttacccggtcaaaacctttatttgtgccactcagtcctctaaaaatatttccacctccgatgacgattccgatctggattcccatctctgcgatttcatgaatttgacgggcatagctttccagacaccgagtgtcaataccatatttttgctcgcccattaaagattctccactgagttttaacaaaattcggttatattgcatatctttgttcgtttaaattttataacaaaaaccagaaaaaaaaacgttgttcctgcacgtaaaaacgtaacaacaaagc

SEQ ID NO: 136 - DNA, 9765 bp, Butyricimonas faecihominis
gtattgcatggtatatatttttaatttagaatttagagtttagaatttagaatgccccctctaaggggtgttcaaaagtcattttcaaactccctccccccttcggggtactccctctataaacagagggagagttgaaataccctctgtcttcgagaagagtcaccagctcctcctctgtttatagaggaggtggcacgaagtgacggaggagttttttgaaattaaatgacttttagggaaagccccgacaggctgcattgttacattgttgtgccttctcgcgtccgtctctcccactgtgtaagggggagccggagggggtagttaaagcgccggccccgtgcggctggaatctaaaatctaaaatcattaaatcacttaatctaaaatcattaaatcactaaatcggaaatcactaaatcactgaatcgataggatctaaaatcctttccccttgatccaatccccgatctctttcaaagccacgggcgaaaaagtttcctctatcgtgccgtataaagcgggtgaacctgattcgcaagtctggaaaagatgatttaacccgggtaattccttcacggtcacgctccggtttctcccagcctccaaacctttcttgatgatccccaagttttctggcaaaacttgcaggtcacgactcccgttcaaagccagcaccggacatttcacgtccctcaaaacgggaacagggtcgtatttcacgaagaaatacatccacggggacagcacttgtcgacgccaaagttcggcacctcgctcgtccttcatgtttaccggcaatttccccgtttgggctaaactatccatgtacgctttcaaaagcggttcggcctcccggctcgacgcgctcgacagcacgatgtcaaaacatcggcgattcacggcagccaagtaatccaactccccggcagtcgctcccgtcacccgtcccatctctttttgctgttccagtaatatatggtcaccccgtagcccgggacccgccaacagaacgatgaaagacacgtccccggaacgactggccacgaggggagcgaccatcccaccctcgctatgcccgataagcccgatatttcgcacgttccggtcattctttaaaaagcggacggctgcctccacgtcatcggcgaaatcaagcgtggttgccgtctcgaaattcccggttgactgtcccactccccggtcatcaaagcgcaacaccccgatcccttgccgggtgagataatcggcaagcacgagaaaaggtttatgccctaacatctcttcatccctattttgcggcccgctaccggaaatcaacacgacaaccgggtaatgatcgcccttttccggtaaagtcagcgtacccgccaaggtcaggcccgctttcgtgttttcaaaggtcacttcctctacccggtatggataaggaggttttggttcttgtggacgtgaaagagccacctctccatccactcgcgttaattccaacggtaatgtcaacccgctttgcatgaaagttccttgtatcctatcggccccctgccatttcccggagaatttcatcccaagggccggtgccgtgatggtcaacacgctatccgcgtactccgttttccccgtgggaatcccctttgccccctgatcagggctatccatcttcgtcgtccatgaatccccggagcgggaaacatgaaaaacaagccttaatttcacgccctgaatattcaaagttccaccccaatgtccggcaatatcctgcgcattcatgatcatcgccacgaggacaaaaaatacggatacaaatactcttttcatgctatttcttgtttacattattcaacaaatatacgagaaataattacaagatatgcaatttcacgccaaacgagagactcaggatgtcccatgttctcacgtatttattcgtggcgctactgatgacgtaaagatcacaggtactcaactcgtaaaacgccgtgattcgacgaaagggggaatgaggccccagatcgaaagcaattcgctgtccggtaaagatatgaaagcgtacacgggtcgagaatttataatagttattcgggtatttctccggttccttcacccagaaatcatcggataacaccgtgttcatgtacagtcccgtcaccagtggttccaaccaccacttgccgccgagactaacctcccacggcgcgtaattttgtttcaacgtgaacgtcactttcgccttgttggaagaaaaacgaggaatcaagccgaacatgatctccgtttcccactgtttctttcgcccgtaatcccaacccacgccaagggaaagcaatcccatcgaaccggcatattgcacgttctggtacttcgggatcatacggttccacccggacttgtattgttgtaatttacgctgatgccgttccgcccgtcgttgctgccgatcatcttccgtcattcccaacacgctcgtcaccagtcccatgaacagggtcacgatgccgactctaataatagaccacttcatactcgtaccctcccggcgttaaggtgaataacaaataattcttatctttcatcgcggcacaaccgatatatggaatcccgtcctcgaacaactcttcatgaagtagcgtgtgactgtgtgcgtgcaaacagaactccacccccggaaattccagcaacaaggcatgaaaaccacgggccacgttattgttgaactccacgttgaaaggttgcacgtgcatcaccggaaccgtccggggacatcccaccgtgtcctgcaattcattgtacatgaaggtgaagtctggcaccgggtgcgagtagtcgaattccaaggcattcgtgttcatgcaaacaaatttagtattccccgccttgaaagagaaattctctttcccgtacaccttcaggaaaacatccatcccgttcccgagaatatcgtgattccccagcaaggccacgtaagggactttcagcttccccataatatcccgcacccacaggaactccttcgtcaagccgaaatcggatatatccccgccgtggatcacgaagtccacgtcatcccgcttgttgagcgccttcacgaaatcttccgtctcgtcataccaacgctggctatctcccattaacacgaaccgcaaggtgtccttcccctcgcaaatctcctctatacgagctatattcttcgcgtttatacccgtttccccgtgcaaacgcacatcgtacggatgatactcgattaaatcacacccgcatagtagtagtactattccatataaaatcactcttttcattgcaataccagtttatgctttcgataatgcaaaaaacagaccaaagattatttacacgaaatcgacacggttaccattttggaaaaataccctaccaaaatgaaaaggttttatcattcatcgaatcacccatcatttcgataaacactgattaacaggcaaataaagcaaaccatattcatctcgcatattttttgctattttgttggtcgttatggacaaggaacagaacgttgaacacttcctcagtcttatcagaaaggctaagagaggtcatttaaagatatatatcggcatgattgccggggtcggaaaaacttatcggatgttacgggaagcacatgatttgcttaccgcgggagttgatgtacaagtaggttacgtggaaacacacggtcgtgttgacacggcagccaaactggaaggccttcccgtcattccccgcaaaaaactattttacaagggcaaggaagtcgaagagatggatttacaggcaattttacaaatacacccggaagtggtgattgtcgatgaactggcccacacgaatatcgaggggtgcgtgaacgagaaacgctggcaggacgtgcttgacttgctggacgcggggattaatgttatcacggccgtgaatatccagcacatcgaaagcctgaacggggaggtacaggacatttccgggatcgaggtaaaggaacgagtccccgatagcgtgttaggacaggccgacgaggtggtgaacatcgacttgaccgctgaagaattgatctcccggttaaaagccggaaagatttacaaaccggataaaattgaactggccctgcgtaacttcttcaaatcggaaaacatccttcaactccgggaactagccttgaaagaggtcgccctacgggtggagaaaaaggtggaaaacgaggtggtggaaaatatcggcctacgccatgaacgcttcttagcctgtatcagtagtcaggaaaaaacaccgcgcaaactcatccggaaagtggcacgcctagccacccattacaatagcaaattcgtggttctccacgtgcaaacccgccacgaaagcgctgaccgcatcccactggccaagcaacgttacctgatcaatcatttcaagctggcatcggaactgggcggagaggtacttcaaatacaatcggacgacattatcggaaccatcatcaatgtttgtagggaaaggcagatcagcacggtttgcgtgggaaaacctaatatccagttgctctcgtacgtgcgttctgcccttcgatacaagaggttattgaataatctggctatattaaatgtagatttaatcattctcggttcataaacacggaagaattcttgaaaatatcattaaatcgaattaagtttaggggtatgaaaataaaaacgaaattaacatcgggaatcggtctccttttcatgatcatcgtgctactcggagttctggcgatcagttacattgataaactggccgacgacacgaaaaatatcctgtccgataactataattcgcttgattacgcgaaaggtatgctttatgccctcgataatcttgaaacggaccgggaagcgttgaatatattcatggagaacctcgaaaaacagagactgaatatcacggaaatcaacgagtcggaagccaccgaccgcttggcccgccatttcaaattgctggacgagaatcctagcgaacagaacatccggcaactccggctggatctgaaccagatcatgagcctgaacatggcctcgattcaacgcaatagcgtgattgccgaggacacggcccggcaggccacgttatggatttctattatcgggatatgcagtgtcgggattgccctcgccttgctcctgttgttcccctcgcaaattacccgcccgatcagcgagttgacacgcgggatcgtggagattgcccaccgcaattacagtaaacgcctgcatttctactctacacgggaatttaatgaagtggcaacttctttcaacgatatggccgaacgtctagaagagtaccagcaaagttcactggcgaccctgttatccagcaaaaaatacttggaggctatcgtcaacagtattcatgaaccgattatcggtttgaatcatgaccgacaaattcttttcgtgaacaacgaggctttgaccgtgttaaacctcaaacgggaacagatgattcaccaatctgccgacgagttatcgttgaagaacgacttgttacgccgccttattcgcgaactggtacatccaaacgaaaagcacgagccgctaaagatatacgccgacgacaaggagagttttttccaagccgtttacgtaccgattaaattaacggagaccgaaaccgagggagaaaaacaggttggcaacgtgatcttgttaaagaatatcacggaattcaaagaactagattcggccaaaacaacttttatctccacgatctcgcacgagcttaaaaccccgatttcagctatcatgatgagcttgaaattactggaagatcaacggattggcagcttgaacgacgagcaacaatctctcgcgagtagcataaaagaaaatagcgaccggttgttgaacatcacgggggaactactcaaattgacccaagtggaaaccggaaagctgattttaagcccgaagatctcgaaaccgatcgaattgatcaactatgccgtatcggccacccgggtacttgccgaacgtttcgggtgtaatatcgaagtggaataccccgaaaagattcataaactatttgtagatagtgaaaaaatagcttgggtgatcacgaatctcctctccaatgccatccattattcgaaagagaactcccggatcatcgtgggagccaaggaagtggaccagaccatacaaatattcgtgcaggatttcggaaaaggaatcgaccccagataccaccaaagtatattcgaccgctatttccgggttccggggaccaaagtacaaggtagcgggctaggactagccatttctaaagatttcgtggaagctcatgatggaaaaatctgggttgaaagcgagatcggaaaaggaagtaaattcaccatcgcatttccagtccgataaaagaactaaaaagtaaaagctaaaagttggctctccttcaacttttagcttttactttttaacttttaacttatcaacgtcgcccgggtataagtgattaaatctttcgggtttagccggatttgtaatccccgaacacccgcactgatataaatgtattcgaactttaaacaactttcgtgaataaacgtggggaactcttttttcatcccgataggcgagcaacctccccggatgtacccggtaataggcaataattccttcatcgggatcaaatccgctttcttgttcccggacgctttagccgccactttcaaatccagttcatgatcacccggaataacacaaacaaagtaaccaccccgatccccatgcagtactaacgttttgaacacctgttcgatattctcccccaactgtgccgccacgtgagccgcggccagatcattttcatccacctcgtaaggaattaactcgtagtcaatcttcgctttatccagcaaacgaacagcattcgtcttatttatcttggccttcatatctacacgattttacttccatacaaaaataataattcccctcgttttctacctaaattttgccattcaaacgaggggaattttcgataaaagattttcgtctattacaactctaacccaaatttctgtcgaaagtatttctcactacttattttccaaactattctctatacgaagtaatataagttcataatgagctttatcatcgctatgagctattcccatcttacttttcactaaagcacgaactttttttaacacaattgtttgataagcaggaatctcactaatcagatccaccttaatttcactctggaaaagagaggccgattctccaaaacctgtaggcaaacacgccgcagcaaccgatcctttaccataatgattttcaattttttgcaatttctcataaaccagagggatattcattgcaggaactaacccataagtttttatctcctcaaatgaagggaatatttgataactttcacgatcagtaaagaatgaactaccttttttacctcgttcaaaatcttttaacgccatatcaataatggatcgttgcaaaattttatcttcaactgtcaacttacgtccttggatcgttggagcgaaaacccctacatacaagtcattgaaatattccctaatagagtaaacatcttttcctttagttacatgattcgctaaagtaatatgctgaggtaccgtattcaataatatttttgctgcagctagggctatttcggcagaagaattaatacctaattcaaaattttcggttaattctgaagcattgatccaagaacaattttgaagttcacgcaatacccaagccagagaattcttttgtacagaacgtgataaagtctgcacagattttatatcagatgtaccctctttcacctgagacaatcgtatcccccctatctgatacataacattattaagataacggaaatactgattaacaatttccccgtaaagttctgaacgatggtttatatttttctctccatcaatccaatcgttaatgttggaaagtatatatttcaaattttttacgccataagtaccagcttttactgggtcatctcccaagtcttcttcaagactagtcggatcataacgtccatccacttgttgtcttccgtaacgataccaagggtcattagccttttcatcaatccaacgtccggcaatttcagcctcttcccacatatttttagcctcggggatgggggtatacaaccatttaatcacatattcatcataaacacctaaattcggaggtgtcaattttacacctttatcttctggttgcgcaatataattatagcgggcataatccataatagaaggagtcgttccatatttttgcgtgaaagaaaccgaacgcaaagaatccacaggataagcatttgaagcagccatattatgcattaatcccagcgtgtgaccaatttcatgagcaatcacatactcaatggattcatcccttacgtcatcaggcattttgctcgttctcatacgagtatcaacttgcgctgtttggataaatctccagaaattattcaatttgattatatcattgtacacaataacggaagcattcagaatttctcccgtggtaggatcaacccagctaggtcccattgcattaggtgttggattaggagaatagcgaatgcaagaatatttcaaattgtcaggatcaaattcaggatcatcttttgggaaatcatatacttgcataacatttttgaatcctattttttcaaaagcttgattccatcgcaaaacagctttacgaatagcaggtttccactcctccgggaaagcatcatccacataccagactataggtttcaccggttccaccaattctcctttttcccaagcttccatgtcggatggttctactcgccaacgatttaccaatgcgaatacccgcataccatcctcttcttgtgccaaatccactttcaacaatcctagcgtgggatgtccgtatgtcgggaaaacaccaatccgagaatcttgaactcttggtttcattttctcttccggcagcaatatcatagaaatagttgaactacttgccacatctccaagagaaaaactcatcatcattacgtttattgaaacattaagattttgcttcaattcaattgaagcgttgtcaccaaaaactttcatcttgccaaaataaggttttccagtttttcctttggatatattgattccttctcctcttgaaaacggagatacatcgtcattcttaaacaaatccgttgcgtcaaaaataacggctgtactatcctcattgtaagtttccatcggaaaacgtttatactccatatctatgtagttttgtcgcatagccttatgcatatttacatcatctgatgtacaaacagccaacatattaggttgcttaactacaattgttgaatcctgtaaatcaacttgtaaatgcaatggagcattaggtttatacccgacatttacaaattgaggattactgactcttgaaagcgtactccccaatagaatttctctccccatatgttttaaaggatactccacatatatcttttccccgttccgatgaaatgccaaaaattcacctctcacagtttccaatcccggtctttccatgaactttttatacttactttttggtttctctttcttggattcagactgttccgttttttccgtttttttcttcttcttccagtctgctccatttacaacaaggcaaggaatagccaaagctacaactagtagcaacacatacatttttttcattttcaaag

SEQ ID NO: 137 - DNA, 9653 bp, Butyricimonas faecihominis
atatagagttatgtcaacaggaaagattggagtttcaacagggaatttgttcccgattatcaagaaatttttatactcggatcacgagatctttttgagagagattgtttcgaatgcggtggatgcttctcaaaaaatgaaagtattggcttcgaacggggagtttaaaggtgaacttggtgagttgaaggtaagggtgaaggctgacaaagcggcagggacgctgacggtatcggataacggtatcggtatgacgcaagaggaagtggagaagtatatcaaccagatcgctttttccggtgcggaggagttcatgaacaaatacaaggataacgccgcggccattatcgggcatttcgggttaggtttctattcttcgttcatggtgagtgaccgggtggagatcgtgacgaaatcttataaagagggggcgaaggctgtaaaatggtcatgcgagggaaatccggaatacacgttggaggagacggaaaaggccgagagaggtacggatattatcatgtatatcagcgaggaagagaaggattttttggaagatgctaaggtgaatgaattgctgaccaagtattgcaagttcttgccgatagagattatttccggaaagaagaaagagtggaaggacggggaatacaaagatacgacggaagataacgtgatcaatgatacgaatccggcatggacccgtaaaccggctgatctgacggaggaggattacgagaagttctatcgcgaattgtacccgatggctcaagatccgttgttccatattcacttgaacgtggattatccttttaacttgacgggtatattgtattttccgaagatcgacaacaagttcgagattcagaagaacaagattcaattatatagcaatcaagtgtacgtgacggattccgtggaaggaattgtgccggagtacttgacgttgttgcatggtgtgatcgattcaccggatattccgttgaacgtgtcccgttcttatttacagagcgatcgtaacgtgaagaagatttcaagtcatatcacgaagaaggtggctgatagtttgaatgatattttcacgaataagcgggaagactacgagaagaagtgggatgatttgaaaattttcatccaatatggtatgttgacggatgagaaattcgcagagagagccaagagtatcttcttgttcaagaacacggaagggaaatacttcacgtatgaagagtacgagaacttgatcaaagccaaccagacggataaagataataaggtggtgttcctgtatgccacggatgctaaagaacagtacacgtatatcgagactgctaagggtaagggatatgatgtgttgttgatggatggtcaattggatacacattttatcaaccatttggaacaaaagaactccgatcaccgttttgtacgggtggattcggatgttatcgacaagttgatcccgaaggaagagacgaaagaggttgctttgagtcacgaggaacaagaggaattgcgtgccgtgtttacttcccagttaccgaaggaggaaggaatgtttatggttaatttcgaggctatgggtgagaatggtgatccggtgatcgtgacacgttctgagttcatgcgtcgtatgaaagagatggcagccatgaatccgggaatgggattctacggggcaatgggcgatcagtacactttggtggtaaacacggatcataagttggtgaacgcaatcctagagaacgagaaagaggaaatgagtgctcagttggagccgattaatttcgagatcaaggagactgaaaagaaacaggcagaactggacgagttgaataagggtaagaaagacgaggagattcctcaagtggataaagatcggaagagtgagtatagtaagacaatagccgatctgaacaagcaaaagaactcgttgctggaggagtacgggaaaggtaacaaggttgttggtcagttaattgacttggcgttgttagcgaacgggctactgaaaggcgaggcgctgaacaggtttgtaaaacgaagtgttgaactgattaaataaaaaattaagccggacaggtcgtccggcttaattttttcaaaaataatcactactttcgttgacgaatttcgtataaattaaaaaaatagaagttatgcagattatttatacttccggaaattacaaaagaactatcgttaaatcgatcgtggcgattgttttaggtcttgtgctcgtactgtggccgacagaagtgttaaattacacggtaaagattatcggagccgtattttgtgttaccgggattatctcttttctggtctctatgcgggatcagaatgaacgttcggctaggggactgacttcttttaacgggatcggaagtattattttgggtattctattgtggtcgatggctgattttttcaccaacatgttgatgtatttgttgggatttatcctgattgttgcgggtatcggtcagttggtgatgttgacttctgcgaggaaattcgggcatatcgctccgttgagttacgtgtatccggtaattattttgttggccggattgattgtttttgctaatccgttctcggcgaaagaaggaattataactttcttcggtgctgtgacaatattttacgggataacggatttgattaatcattataaggttaatcagttgcgtaaggagacacatgaaaccgagcaacaacagaagatgggaggtggagagattgaggatgcggagtatgaagaaatagaataaatgaagatttacgattttaaattttagattttaaattacaggataggtgcgtgtgatcgaaaaggtttaagaaaagaaatagataaaatggtgcatattattaacaaggaggattcggtttataatcgttttttagcagaacttagggataaagaaattcaaaaagatccgttgcgttttcgtcggaatctggaacgggttggtgaggtgatggcttacgagatcagtaagacgtttcgttattcaacgcgacaagtacagacaccgattaacgtggctgatgtcagattggcagacgaagaggtggtggtggcatccgtgttgcgtgcaggattaccttttcatcaaggttttttgaactatttcgatcgttccgggagtgcttttatttcggcaagaagaaaatataaagaaaatcatattgattttgaaattcgtttcgattctatttacacgccaagtttggaaggaaaacagttattgctggtagatccgatgttagccacgggaggttctatcgtggtggcttatcacgagttattgaaacagggaggaaggcccgcacacacgcatattgcggctattgtttccagtcgtcaaggtatagaaaaacttacagaggctttgaaagatgagccggtaacgatctggacgggagcattggatgagcatctgacagagagttgctatatcgatccgggaattggtgatgccggagatttggctttcggggaaaagctgtaagagtaagattttgtgattggcgattaaatgatttcgtgattacaaagagtattggatggtaggagggaatcatggaatctaaaaagataaaaactaaaagataaaaactgaaagttaggagaaaagcattatctttggcggtatggaaatgaataaatatttgatagcagctttgtatgttgttgctggatgcgtggcaaccctgccgataaatgtgcgtggggggaatgtatccgttaggacagattgctatcgtttgttggtttcttctaccgaaaaggtaatcacgatttctactgagaaaagatccacggaggatttcgattatggcgatttctacaatcagagtcacgcggaaaccgtggatgctgtaaaagtttatactacttattcgtctgttgtactaccgggttggaaagtcccggaaattgcagcaaatcccatccgggctcccgggaaaatggaatgatttcggatttatgattttagatttacgattgaatgactaaaggagatttgtgcttggtcattttcaattttcaattttcaattttcaattataaactatgggatttaacgatatattaaaaagtctttttggtaacaagtctgatcgtgacttgaaagaattattgccgatcgcgtcaaaagtaaatgcagagtgggaaaagatcaaaggcgtgagccatgatgagttgagacagatttcagctgatctgaaagcaaagattcacgctcacgtgaaggaagaagaggatgaaattgcttctttgaaagcaagagtagagaatgagaaaccttcgatcgaggaaagagaggaaatttataaccggattgataagctggaagaacagattaacacgaagttagaggatgttctaaacgaaatattacctttggcgtttgccgtgatgaaagatacggcaagacgtttcaaagaaaataaagagatcgtcgtgaaggctaacgattttgatcgtgatttggccgtaacgaaagatttcgtggaaattgacggtgaggatgccgtttacttcaactcttggttggccggaggtaacgaggttacctgggatatggttcactatgacgtgcagttgataggtggttccgtgttacaccaaggtaagattgccgagatggctaccggtgaaggtaaaacgttggtagctaccttgcctgtattcttgaatgccttgactggtcgcggggtacacgtggttacggtcaatgattacctggcaaaacgtgactccgagtggatgggacctctttatatgttccacgggttgtctgttgactgtattgataagacagagccgaactctccggagagacggaaagcttaccaggcagatattactttcggaacaaataatgaatttggtttcgattatttgagagataacatggctattcacccggaagacttggtacaacgcaagcatcattatgcgattgtcgatgaggtcgactccgtgttgatcgatgatgcccgtaccccgttgattatttccggtccggttccgaagggggacattcagatgtttgacgagtacaaacctcgtgtggagaagttggtgcgtatgcagcgtgagttggttgcccggattttcacggaagctaaaacgttgttggctagcggtgatcggaaacaagaggaacagggggctatattgttgttgagagcatataagggattacccaaatataagccattgatcaagttcttgagtgaacaaggaaacaaggcaaccttggtgaaaaccgagaatgtttatatgcaggagaataaccgtcgtatgccggagattacggatgaactttatttcgtgatcgatgagaaacagaactctatcgatttgacggataaagggcatgatacgattacggccgcgggtgaagatccgaacttctttatcttgccggatgtgggttctgaattggcagagatcgataagatgaacctgactgaggaagagaagctggagaaaaaagaccagatggtgcaaagttatgccgccaaatctgagcgtgtacacacggtgaaccagttgttgaaagcatacacgttgttcgaattggatgttgaatacgtggtgattgacaacaaggtgaagatcgtggacgagcagacgggacgtatcatggaaggacgccgttattcagacggtttgcaccaagctatcgaggcgaaggaaaacgtgaaagtagaggctgccacgcagacatttgccacgatcaccttacagaattatttccgtatgtaccataagttagccggtatgaccggtacggcagagacggaagcgggtgagttctgggatatttacaaattggatgttgtggttatcccgaccaacaaaccggtgattcgaaaggatgctaatgactacgtgtacaagacgaaacgtgaaaaatataatgcggtgatcgaggagattacccgattggttggagaaggccgcccggtgttggtgggtacgacttccgtcgaggtttccgagttgttgagccgtatgttgaaattgcggggtatcaagcataacgtattgaatgcgaagttgcatcaacgggaggcagatattgttgcagaggccggtaaatcacaggtagttacgattgcaaccaatatggccggtcgtggtaccgacatcaagttaagtccggaggtacgtgcagcgggaggtttggccattatcggtacggaacgtcacgattcacgtcgtgtagaccgtcagttgagaggtcgtgccggacgtcagggagacccgggttcttctcagttcttcgtgtcattggaagatgatttgatgcgtttgttcagttccgagagaatcattcgggtgatggaccgtttgggacacgaggaaggtgacgtgattcagcattccatgattaccaaatctatcgagcgtgcacaacgtaaggtggaggaaaataacttcggtattcgtaagcgtttgttggaatatgacgatgtgatgaactctcaacgtgaggtgatctacaagaagagacgtcacgctttgttgggagagagaatcggagtggatattgccaacaatatgtatgatgtttgcgagacattggtggaagaacacaaggatgctaatgatttggaaagcttccgtatggatgtgttgaaatattttgccgttgactttgatataaaagaagaggatttccagaagacttctgccaacaatttgactgagagactgtacaaggaggttcgggatacattcagtcgtaagacggagactatcgctaaacaggcgttcccggtgatcaagaatgttttcgagcagagaggagaaatgttcaagaatatagtagtgccgtttaccgatgggaaacgggcttacaatgtcgtggctaatcttgagaagacgtataaatctgaaggtgaggagttgatccgtgcttacgagaagtctatcatgttggctcatatcgatgacgcatggaaagagcatttgcgtgaaatggatgatttgaaacaatccgtgcagaatgcaacttacgagcagaaagacccgttattgatctataagttcgagtcattcaacttgttcaagagtatggtggacaaaatcaacaagaatgtcgtgtctactttgatgaagggacaaattccttttgaggctcctgaagaagtgaaacaggctgaagagaaacgaaccgatttaagcaagatgcgtacgggacgtagtgatgctcctgccgctcagaccaatcaagctccccgtaaaaccgagcccgtgaaagtgggtcccaaggtaggacgtaatgatccgtgtccttgcggaagtggtaagaaatacaagaattgccacgggaagggggaagaatagactgattcggtgattaagagatttgatgattccgtgattatgcaatcattgaatctcttaatcataatcactaaatcacaaaataattatggtttcattatttatcaattgggatgttagtcccgaattaattagtttaggtggtttctcgattcgttattacgggttattattcgccttggctttcgtgtgcgggtataaggtagaggagaagatgttcaagtcggaagggttgagccagcagtggttggataagttgtggatatacgtggcggttgccacggtgatcggggcccggttgggacattgtttcttttatgattgggcatattatagcgctcatccgtttgaaattattctaccggttcgattccaaccggaattccgttttaccggatatcaagggttggctagtcacggggctgcaatcggtattattgccgggttgtggtactattccaagaaggtaagtaggaaatcaatattctggattttggatcgtgctgtaattccaattgcgttggcaggattttttatccgtatgggaaatctgatgaattcggagattgtcggtttaccgactgatctgccttggggattccgatttgtacattccggaatgcctgatccgtcgacaccccgtcatccggcacagttgtatgaggcgatttgttatctgatcagttttgctgttttaatgcatttgtattggaagacgaaagcgaaagatcgtcagggctttctttttggaatgtttttggtactgatctttaccgctcgttttgtgatcgagtttgtgaaagagaaccaggaagaatttgaaaatgccatgaccttgaatatgggacaatggttgagtattccttttgtattgatcgggatttacatgatttggagaagcgggaaaaagataaaagttaaaaactaaaatctaaaattaaaatggcatataatccggagtttatgaaggaggcaattcgtattgccgtggagaacgtggagaatgggacaggaggaccgttcggggcggtagttgtacgggatggtaagattatcgcaacctccgggaatacggttgtgccggataatgatcccacggctcacgcggaagtgaatgctattcgtagggcttgtaggcaacttgattctttccagttgaaaggttgtgagatttattccagttgtgaaccgtgtcccatgtgtttgggggcaatatactgggctagacctgaacgggtgtattatgcctgcacgaaggaggatgccgctgtcggtggctttgatgattcttttatctataaagagatcgtgttggatgggcctatgcgttgtatcccgtttgagaataaacgagaagagggtgcgggagaggaattcaggctttggcagacgaccaataataaaacgagatattagaaaaggagagtcaaaatttttttgactctttttttatatcctctctttttcgtgttctaaatgaaattgttattccgtttaaatttgttatatttgtgaatgacaacgtggtaggtcgtgtgtagaatttaattactcaacctaaatttagaattatggaaaagaaattggactttggtagcgtgttatcgcaaggttttttggtgggaatgaaaaatctgccttctcttttgggtgcaattgtattatggcttttgacgatctggattccttacgtgaatgtggggaccacgatagctatcatgacgattcccattaaattcagtaaaggagagattttttcccctctctgtattttcgagaaacaatattatcgttatatgggtgagttctttttgacttgtgggtggtacacggcaggggtgttgatggccatgatttttcttgttgtacccggtatcgtgttggggattatttggagtcaagccctttatcttgtactggacaagggggtgaacccggccaaagcgttatcattgagtaataaaatgacttatggcaacaaatggatcatttttgccgtgatgtttgttgtttatctagcctttttagtggcatccctgttattgacttggattccgtttatcggggttattattgcattttgtttgatggttatttatatggccatgatattgggttgttccgggatgatatatggtaaattgttggaaaatttgacagaagaagatcttagataagatcgcgtaaatattgaaaaagacgccgtgtccacgagattgcggcgtctttttttgttttgtaggttgcgaactttctctttttttattaaatttgtaaacat

SEQ ID NO: 138 - DNA, 9641 bp, Butyricimonas faecihominis
attgtaacattattgatagcaggaatgctgacaacatacactcaggcttgtacccgtgtggtatacctaggtaaaaacgggatggtcgtgacaggccgaaccatggactggaaagaagatttaaaatccaatatttacgtgttccccagaggaattgaaagagcgggggcggacaaggggaacacgattcattggaaatcaaaatatggaagtgtcatcacggcgggatacgacatcggtacttccgacgggatgaatgaaaaaggtttggtcgccaatctcctatacctgacagaatccgattattaccgtccaaacgacacccgtccggcaatggggatcagcatctggacgcagtacgtgcttgacaattttgcaaccgtggatgaggccgtaaaagagttaagcaaagagacattccggatagacgctccggatatgccgaacggggcgaaatcaactttacacctagccatttccgacgcatcggggaatagtgccatatttgagtacatcaagggaaaactcatcatacacgaggggaaagaatatcaggtcatgacaaactctccctcttacgaacaacaaatcacgctaaataattactggcaacaaatcgggggcctagtgatgctaccggggaccaaccgggcagtagatcgttttgtcagggcatcattttacatcaatgtcatcccacaaaccgacaatcaacgagaggctgtagccggagtttttagcgttatacgaaacgtatcggttccgcttgggatttctaccccggctcaacctaatatctcttccacccgctggagaacggtcgcagaccaaaaaaataaagtatatttcttcgaatccacgatcacgcccaatgtattctggattaacatgaaagatctggacttttccgcgggggcacctgtcaagaaattaaacctcgcaaacggagaaacctacgctggaaatgctgccaaggatatggtaaatagtccctcgttcaaattcctatttgaagtgatataaaagatttgacaagagggagaattctaagtcttctccctcttatttccttatcattgcaactgccggattcgtacatcaattcccgcaacatctttcaaggaagatttcaattcttccacgttcgtctcccccgtaatgataggggtaaaggacattaggttttatcaccagtgccgcacgatccgcttggggaaccgtcatcgtgtaaggttgatttacaagcagaaaagcgatatcaatatccttcaagtcttgcatttccggaatatcttcagtatccccagccacatacactctcgttcccccgaacgtctttaaatgataacaagcatcagatcgcaaatttacgtccggcctacatccaaaggtatgagttatttctcaataaattataatgtcgaaaccaactcccgttgttttcgaaagaaatgaatacgttgcaaatcaccactttccgagatcaaggtagaaaaacgcttcaacgatgaaatccagtttttcacgctatcaaacgttttgtcatccagagaagccacagaattcaaggtaaaagcttttattaatgtcaacttacacttccgggtttggacatacgagtaggtcgtgtcaaaattaatattggatatgtagaaactgatcctgttcccgttatcgaattttccccgggcagctagtcgctccgtgtaatccaagaactgatataattcctctttcaattcgcgtacatcatcatcagaaatcaaattcacactcgaaaaatatttaatgtcgttaatcaagtacacgaagatcatgttatcaaagatgtagcaagaatcctttacccgctgggtttctataacaaaattcttttgaatttgtaccatccgctccgggaaaataatctcgtgcaatggctgcacggcattcaaaccgtcatgctgggctttccacttgaacaggtaaaaacgagtcaggaatttatatttcaaataaagcgcctgtggaaggatattggtagacgaagccgcctcggaataagcattcggctcaatcgaacggaaaacatccacaaaattatccatcatatcaagatcaatttccaacgggttgataaattccgtcaatttcaactggaagggccgacttttaggcgaaaccgactccaaaatcccgtcaatcgagatattcatttctttagaaatttgcgccgtttccaacaaggtaaacgggacatccccccgtaggcgccgataaatggcctctttgccaatacataacaagttccctaaaacatttgccaaattttcttcatgaggaatcttctcccggatggctttcaataaattatcatgtaaaacttcctgtttcattttatctcgttctataatcatcaactataatcataaacctatcaaacttccaccatattatcgaaaaacgcctcaggattttgccgatcagcatactttcgcctttggatagacatttcggacgaaaacatattgggatattttaatttcccccgactaagatatgtttttttctaaataaatgcaaatgtacttcttctcttctgagataaaaaactcaattctacggagaaaaatttccaagatgaatttgtaaaaaacaagaccatttttcacttaacaaagctctcagcgctttttgtttcaaaaatcgaactgatgtatgtcaatataaatcaacattttcaaaaatggatacaaaaatccatcttcccgatctatttagaaaagatctacataaatttccacccggatttctatccgaattcacaaagctctgcctaattttgttacaaacaaacgtctaatgaaaaacacattaatttacataacaatgatttgttatatcatctacggccacatccaattccacatccagaaataatccggaatgtcagacagggaatctgttcctatttttcctgtaaaacggattataccaatatcgtgtcccttggccgggcgatcagctccagagcaacctcaacacctacacacagcctgactgatcgccatttcttttttcattttcaagaattataatatactacattttttataactttgtgatcatgaaaaaattccaagcaaatgctaacatttattatctctatcggtctattaatcgttgcttattttacctacggtaaatttgttgaacgatttttcggagcctcatccgcaatagagactccggtcaaacgcctagcagacggcgtggattatcacgagctaaaaccttggcgcattttcgttatccagtttttgaacatcgcaggcctaggacctattttcggggccatactaggagcggcttacggtccgatggcttacgtgtggatcgtgatcggttgtattttcatgggagcgactcacgactatttttccggtatgctttctatccgccacgacggaacaagcctacctgacattgtcgggaaataccttggaaataacgtgcgtaaattcatgacatttttcacaggattcttgttattggccgtgggggtctctttcgtgaacgggccggcggatttactcggcaacttgacaaacatgagtatgacaccttggctatatgttatctttgcctactatattcttgccacgttgctccccatcgataaaattattggaaaaatataccccttcatggggctggcattaatattcatggctgtcgcggtgggcggctatttactttacgggggattctccggaaaactctatctcgaagaattaaccttcgacacgatgaaaaatatgcacgcagatccggcaaataacattcttttcccgatgctatttatcgtgatctcctgtggggccatttccgggttccatgccacgcaatctcccatgatggcacgttgtatgacagatgaaaaatatgggcgccccatcttttacggagccatgatttcagaaggaatcgtggccatgatctgggctaccgctgccatggcatactttggaggtgcggaaggcctgaatgccgctgccacggcaggaaaaacgcctgcgattatcgtggatgcaatctgcaattcgtggttaggacgttttggcgcgattatcgctattatcggggttgttgtttgcccgattacatccggagacacagcattccgtagtatgcgattgatcattgctgacgctttaaaattcaaccaaaaaccgatcaagaatcgtcttatcgtttctatcccgatattcatcatcgcctatttactttgtaacgtggatttctccacgatatggaaatacgtgggcatcgggaaccaagtgttagccaccatcacgctatggaccgcagccacctatttggctaaaaaaggaaaagctcattggatgatgtctatccccgccacgtttttaagtatcgtatgtacgacctatttcttgatagccccttacaaagtgggtggcttgtatctttccccttctatcagttacccgataggagcaatcgtgggaatcgctcttttcgttctgtttatcacgaaaattactagaaataaataaaacaaggccgcccgtgcgtgggcggccttcatcacacaaagaaaacattattaattcattcgaatagctctaactgcttttcccccacttcttttctctccctctgcattatatttctcttcttccattttcgccttatccgctccaagcgtatccccatttttggtcaacaagcgagctttagaattcatcaaattagctttggcaaaataatcttttgtctgggtacatctggcatcgatccaatcgattccctcctgcacgagagtcttgtcgtcacaaccggctaacgcctcgatattattttggaaatacatttgctcttcaccattcctgaacacgttgtacttgaatgcctcacgcatactattcaacattcctttataatcacctttccgaacatactcggcggtgtataaactagccaaagctcccgggataaaagcataatccaaagactgaagtaatttaatcaactcgccatttctagcctcgtcaaactccccgtttcccggacgccaatacgtaatttcagccacggctcccttgatcgaattttccaatttatagtcaaccacctctttaccggccacttcatagaaacgtccaatattcgcaatcacttgacgtataggctttgataatggatcgctcacgttctttttgatcaactcccaattatccttggtcacaatctcatcatccgacaaggcattcaaatattcagcggcaacagccccttgtttttcctgcatgtaagcagaggataacgccgtcaaataacgacttaataaatccgtattccgctccccagcctcgtatcgcttcgtcaagcctctcaaattattttgtggatctttcgcaatcttcccaccttccattaaccattcggcggaaccggccccaaccatcttatgaaccacctgctgcgtgttcgggtccacgaaaaccaaagttgggaaggccttcacttcaaatttatctttcaacatcacaccatccgcatccttttccatatcatacttcacgttcacgaaatccgcattaaactgattccccacgtcctcacgggtaaatacctgtgatgacaacatcttacaaggcccgcaccaagaagtgtaacaatcgataaatatcaactttttctctttcttagcctttttcaaaactttcttccattctttcgtctgttcgaaagtaatccccttgctttgagcctctgcgccccaaacaatcccggccatcaaaacgattaatacaaataatttcttcattacataaaactttaattgaacatcctctcgtaatatcactatttaaatttcttctgcaagctggcaataatcgtgtcgaactcctcggtcattcctttcttgaattctggcgaaagttcgtcaaacccattgtaaacagacaacacgacctcacattttttgtctcctttgggatgaacttcaaaagcataaacccactgtttatcgcccgtgtaatccgatcggacgacaaaataacaaatcttgaagacatcataatcaatcacgctgatatattgactcctttttttaccatctttcccggtcaactcgattttagcattcaaagctttctcctcgcaagtaaattccttcacacctgaaaacttcttgtaatttgccggctccgagatgtaatcccacactttttgagcagatgctttcaacacaatctttttctcgatagcaggcggtattttcttcgctgccgtcatttgtgccgaagccaatccggacatgcaacacatcaatacaaaacaaagtaatattctcatttcctttaccattatatattctaaaagaagtagggagatgcatgcaaagaactgtgtgataagaagaagcatttactcccaaccttacacgccatccccctgccccttttttactacattcccatagcgggcatcgccacgctcttctttttaccactaagtaattcctctagcttatccgtcaatgcctttccccgcaaattctttgccacgattttcccctccttgtccaaaaccaaaatataagggattcccgagaactggtattgtttcatcacgtcttttccagccttcggagcctgcgcttgagtccaaggcatattctcttccttcatggcttttctccaagcagcatcatctttatcaatcgaaacactaaagaatgccacacccttgttgctatactctttataagcctctttcaagtgaggaatttcagcccggcaaggtccacaccaagaagcccagaaatcaagtacgagaatctttcctttaaaatcctgcggtcctaattttttctttccatcaggagtagggaatgaaaattccggggcaactttcccctcagccaaacgctctttttgagctttcgcctcagccatttctgccttatatttcaacaaaggggcataattcggattcttactttccaaacgagacaatacttgttgcaccaactcctcgttttcctcacccctcaaagacggcaacacagctaacacgctattccggtcagcataatgctctgccaaaaatctcattctcgctctcgattcattgcccaacatatcgtaaaacttaccggaaacttcctgctttgcctgatcatcaatccccggaatacgatatactccttgagagataccaatcattaactggtatcctcggtatccatcccagttcattaaattcatgacctcattgttcggtccacctttaatatacacgtaaggcgggttctttatttttatcttagccgtgtcctctcccctgaaattaatttccaaatcctcgtcctctgcccagaattgtacagattgccacttttgacagtccaacgtgtaaacacccggtttatccaccttcattttgaattcgtatgtcccgtcatctttcaccttgcatgaatcgataatcgtcttgtcgaatccttgccgttcaacaatttccatattgaaccgattataagggaacttcacttttcccttgatcgtaatcgtcttttgagcgaaaacactacttgtactaaccatcatacaagcgaataacaataatcttaaaatctttctcatattatctcattattaattcattaaatttcgaacaacaacataccctattgtttaagctcttctgccagtttttcaaaataggtacgaaaagacatcatattccctttcccttcggtctctcttttagcagatgtagccgcagcctcgtcaaaccaccgagcagcccgtaaccgtaatgttttatctttacaattttgagtcaatcgcaatccccagttatataaaatcaaatcggaaactttacctttctttagctgtacttcccccaaatcaatatatgttttccaatcctttaatttttctgcatttaacatacgggcgcttgtagcaatactttcccatccctctactttcgattttttcatccatttcacataacgatcaaaacctttcttatccagaaccatttctccgtttttctcatggacaaacttattggcaccgatggaccataccgcagataatttacgttttaccggttgttccccgtaacgagagataaactctgactgattagcataaacatattgaaacagatcactacttacatcattgacgaacttgacaaatatattccaataagcctcttcattcaattttcctcgatccaacgtggcaaaataatttaggctcacctgttgagcttcctcgcccagatttgccatatcaagcacatttaaataagtttcaataaactccggctccctattcccgcatgcatattcatgttgcataaacgctacccccttaccattcaaagcaacatttccttgttccaacaactctttcacgttcattccaccaaccacacaatgcaccattgctccttctgtattgataaaatttaatgtcgggtaggccttcacgtgatatcggtctttcagctcttttccttcccctttctccatgtcgactttcacgttaataaatttctcgttaaaaaaaactgccacttcaggatcgacaaatgttgtctgagccatctgtttacaagggccacaccaagacgtatagcaatccatgaaaatcaatttattttcctgacgggctttttccaatgcctgattccagtttccctcgaaaaattcaatcccttttgccttttttaaagcctcctgcccataagcaataaaaggttctgcctctgtataacctcctgccaaatgtaccaatttcccatcaccattcacgaaaacaaaagcaggatatcccctagtcccatacttttctgctaactccttttctttcccaaaatctaatttcaaattgataaaatgttcgttataaaaatcagccaccttatccaaagaaaaaacatttttcaccatcattacacatggttgacaataggctgtataagcatcaataaaaatcaacttattctccttcttcgcttttaccaacgcttctttatacccaatctcttcaaaaataatagaacgtttattacttctcttcacttctgccgcctttaccgctttttgaccggtttccaagaaagcttccggcttcttagccaaaataaaaggactaataactccaagaatatccccattaggcataaaaaaaccatatgtcgggtacatattcatcactaatttaggagcaaatgctttaccagcttctgaccccatatcaatatgaatagcgataatattttgatcacaaaaatcccgaatccctgaagaagaaaataatttacgttcagcggcctctctacttttttgatcttccagagtacgagcctgcatcattgcatcaaccaaaataattttaccttctttttgcgccaaatcagcagcttgttcccaagtcagatcccgaaaaacagacttatatttttgagcgtttacaggcgatacaaaacccattaacagacaaacgataacaccacttattaaattcaattttttcatgtccctcatatctaagggttatgcgaagataagtccgcataaccccatatccttttatctataatac

SEQ ID NO: 139 - DNA, 9582 bp, Butyricimonas faecihominis
attcaaggatttaccaaattataggaaataattttataccttttggtataataccttttggtataaaatcattctaacattcacgaattaccttatcggatgaccttttgctttttatctctcatttattcaccttcatccacttcaccgcatccgcaataatcgtattgtccgattctctccgatcatccagtgtaatcgtggccttctccttcgggaaatcacgctcctttactcgactcgttttaacacgccaattccgaacaaaagtggcccgataggtttctctcacctgcttctcttgaaaatacaaatttccgagcaagcacgttacccccaaatccgacacgataaagatataaaaaataaaataaaaaaatagacaagtcacatcccattctcacacccacgatctaaacccacccaataagagaacaaaaaaactacgactttacatctgaaaaaacagcataaagtcgtagtttaaaatcattataaatgctctacaagaacgttacatgaattataccagatgcttaatcaactcctcccgatctccatacagcatatcaatcaccggaatctcgattaacgtgtagcatcccggctgttgtttcatggatgcacgagctgttgccacgaggatttgtccggttaaagccgggttattgattttcatgtcaaattcgaacaactggttctgcgttttgccggaaacacccttgcggacaagattcacgccgtggcccatatctttcaggttatcgacacactccacctgcatcacgtgcgtctcgtcatgcacgaaataaggatcggtcttgatcgcctcggccacttgtttgaaatcgtacccctctttcaactccacgtacaccatccggcgatggattcccgttcccaccggaatcgtcatggataacgcagctttcacgccttccacggctttcactgcaaccgtgtgtcccatgctcatgccggggccaaaattcgtataagtaatccctttcggggcgcaagcttctaacaaggcacgaacgacagaatcacttcccggatcccatccggcggaaataacagatactttcccatgctttttagcaacctctcccagacgtttatgcaaaccggaaatctccgtgtgaatatcgaaactatccaccgtgttaatccccatagctaatattttcgaggcatacgactccacactacgggttggggtacacaaaattgccacgtctacatccttgatttgagcaatatccgacacgacaacatagtccttcaattcggccggcacgttcgtcgcatcccggcgtactactcctgctacttcaaagtcgggggcagcttgcagtgcctcaagcacgtaactacctatatttccatacccgacgatggctgctctaattttcttcatctgtttttgctttttaaattaacaccgcaaattacgaaataattttttcccctacaaaacacaagcgtaacgttttcacccatttgttaaactttcaacatctattttccccttgccattaaaatacaacatacaccactgcatcttttcaccttcccttacatcagtcctgccaaacccgttttatccctttattccctagaacagacactcatcgaaaccataacgaccggatgcaaaacgattcattgaatatcagtgcattatccatttctctatgcaaaacaacattcctgcaatatttctttaaatacctgtcattccatcatcccccgataacccatagaacattctattcacaaaatccttaaaaagacttataatccgattcacgaggcgaaataaagaagaatttcttttttttattgtcaaaaacggctaattttgcctttcgtttttaataacaaacagttacagaataaatacataaaaatctattatggcagagaatgtaaacgaaaagcttttcagtgaatttgctcccaacaccacccaagagtggaaggacaaagtcattgcagacctaaaaggggctgacttcgataaaaagctggtttggagaacaaacgagggtttcaacgtacaaccgatgtaccggttggaggacatgaaagacctcaagaacttagaatgcttcccgggagaatatcctttcgtgagaggtaacaagaaaaacaacaacgaatggctcgttcgtcaggacatcgtggtagaggatgtagctgaggcgaacaagaaagcgttggatgttctgaacaagggtgttgactcactcggattcgtgcttacaaattgcaagaacttcacgaaagccgatatggctgccttgttgaaagatatttgcttggaatgtatcgagattaacttcgttgtatgctgcaacaaagttgctatcttgaatatgttcaaagagtacgttgcagagaaaggtttcaaccctgaaaaaatacagggaggtatcaatatcgatccgatcagcaaactcgttttagaaggaaaattctgtgacccgaacccgttcagcgtggtaaaggctaccacggaaagcacttccgaactgaaaaacttcaaaaccattgaggtaggtggatatgtcttcaataactcgggagcatccatcgttcaggaattaggattcagcttggctgccggagtagaataccttgacaaattaaccgatgcaggaatggacgtgaaggacatcgctcctcgtatgcgtttccactttgctaccggttccaaatatttcatggaaattgctaaattaagagcagctcgttatttgtgggctcacatcgtgaaagcttacaatccttgctgtgactgcgtttgcaagatgaatatccatgctgaaacatcagaatggaacaagacggtatacgatccgaacgtgaacatgctccgtactcaaacggaaaccatgtccgcaacaatcggtggtgttgactcgttcacggttcacccgtacgactatatctacgagtgccatccttcagaactgggagaacgcgtagctcgtaaccaacaattgttattgaaagaagaatcacacttcgacaaaatcgttgaccctgccggaggttcatattatatcgaggaattaacccaattcatcgccgaggctgcttggaaactcttcttggaagtacaagaacaaggcggtatggtgaaagctcttgaatcaggattcgtacaggctgccgtgaaagctacagcacagaagagagatcaggacatcgctaaccggaaagaaaacttcttgggtacgaaccaattcccgaacttcaacgagaaaatggataaagagctttgtgcttgcatcctagagccggaagacaaaaccgctcccgacgctgttgttgaaacgttgaaaccttaccgtggaactcaagctttcgaagctatgcgtatcagaactgacttgtttgcaaaagaacaaggtcgtcgcccggtagtttacatgttcccgatgggtaatttggctatgcgtaaagcaagagctcaattcgcttgtaacttcttcgcttgtgcaggattccaagtaatggataacaacggattcaagactgttgaagaaggtgctaaagcatgcatggacaacaaggctgatatcgtggtaatctgtagctcggatgacgagtacgctactatcgcaccggaagtatatgcagcaatgcaggacaaagcaatcatcgttgttgccggtaacccggaatgcagaccccaactagaagaaattggcatcaagaactatgttcacgtgaaatgtaacgtgctggaagacttgaaagcataccaacaaaaattgggaattaagtaattgacgatttgtcataaatcaaaaattgaaagatgaaaccaaatttcaaagatataaatatcaagtcaacagagaaagctaccactgctgctgcagaatgggaaaaagctaatcacattgagaaaaactggttgacacccgagctgataccggtaaaacccgtgtacacggctgaagatttaaaagggatggagcacttggattatgttgccggaatccctccatatttacgtggtccctactccatgatgtacccgatgcgtccttggacaatccgtcagtatgccggattctctaccgcagaggaatcaaatgcattctatcgtcgtaacttggctgccggacagaaaggtttgtctgtagcattcgacttagccactcaccgcggatatgactcagaccacccgcgtgtaatcggtgacgtgggtaaagccggtgttgccgtagactctatcatggacatgaagatcttgttcgatcaaattccattggacaagatgtctgtatccatgacgatgaacggtgccgtacttcctatcttggcattctatatcgttgccggattggaacaaggtgctactcttgaccaattacaaggaacaatccagaatgatatcttgaaagagttcatggtgcgtaacacttatatctacccgccgaagttctctatgaagattatcgctgacatcttcgaatacacttccaagaatatgccgaagttcaactctatctctatctccggataccacatgcaagaagcaggtgctaccgccgatatcgagttggcatacaccttggctgacggtttggaatacttacgtgccggggttaacgccggaatggacatcgacgcattcgcacctcgtttgtcattcttctgggctatcggtatgaaccacttcatggaaattgccaagatgagagccggacgtttgttgtgggctaagatcgttaaacaatttaacccgaagaacccgaaatctttggcattgcgtacacacagccagacttcaggttggtcattgaccgagcaagatccgttcaacaacgtggggcgtacttgtatcgaggccatgggagctgctttgggacacacgcaatctttgcacaccaacgcattggatgaggctatcgctcttccgactgacttctctgcccgtatcgctcgtaatacccagatctatattcaagatgaaactaccgtatgtaaatcaatcgacccgtggggaggttcttactatgttgagagcttgactcaagaattggttgaaaaagcctgggctcacatccaagaaattgaaaaactgggtggtatggcaaaagctatcgaatccggtattccaaaattacgtatcgaagaagcagccgctcgtacgcaagctcgtattgacagtggcgaacaaaccatcgtgggtacgaacaaatatcgtttggaaaaagaagatccgatcgatattcttgaagtggacaacacggcagtacgtgaagcccagatccgtcgtttgcacgaattgaaagccaaccgtaaccaagccgaggtggatgccgcattggatgcgatcactcgttgtgctgaaaccggcgagggcaatctgttggaattggccgtagacgcagccaagaagagagcctctttgggagaaatctcttatgcatgtgaaaaagttgcaggacgttataaagcagttatcagaaccgtgagcggagtatattcaagtattgccaaggaagacgaagacttccagaaagccaaaaaactggcagaccagtttgcagaaatgacaggacgtcgtccgcgtatcatgatcgctaaaatgggtcaagacggacacgaccgaggtgctaaagttgttgctacgggttacgcagaccttggtttcgacgtggatatgggaccgttgttccaaaccccggaagaaaccgctaaacaagccgttgaaaacgacgttcatgttgtcggagtatcttctctagcagccggtcataaaacgcttgtacctgccgttatcgcagaattgaaaaaattgggacgtgaagacatcctcgtttacgtgggtggtgttattcctcaccaagactaccaattcttgttcgatgcgggtgctatcgccgtattcggtcccggtaccaaagtatccaagagtgcaatccaagttctcgaaattttgattgacttggctaagaaataatgaaatgctatcaggcaagggaagggagtccataaggctccctttcttgactatacctcacccctatctacactcaaatcctcctgtcttatcaatagagacacccagtttattttggaaaattaaggcgttgactacttgttattccttatatcaagctatccttgaaggcaaaattatacccacgagttgactttattgcccctaatcaacagaaagattatgatatttttcaaatttcgtacctttcgaaaaacaatcgggtaaacaatgtgcggcataacacaatttttctttatcagaagccaaatttttgtccgcacaatatttttttataattgccgtcgcatttaaaaatccattcttttctgattcagtcactacagagatttcattataatcatcgtccagaatatcctgtccattagaagtgacgatcatataaagtttttcatcaacgcctcccacttctgccgaaaattgccgatactgctcgtctgtcaattctaggaaattctcttcaaccggaagaaatcccaattggaacaccagttgaagagcctgtcccgtatttccgattaataaatcaaatacattcatatattacctataactgttcgacctcctcgggtcgcaatcccgtacttcgaataattgtttccacggatattcccatctttttcatgtttcgagcaacttcaagaataccttctgtacggccttctgcccgaccttctgctcgaccttctaccagtccctcgaatttagccgttcccaacacgtcgttctggatcatgatcgcatccacatgacgatcataagcggcccgctcacttggatccatatcatagtaaaccagtttttctcttgcctcttttaatcccggtgtggtcgtgtccggacggatgtgatcgtttttcaaataatccagccactcttcaagcggggttacagccaccttgtcaaattcgttcactcggattaaaaaatattcgggaaatatctcggagggaagacgacgaaccaaggcatcacgttctttcattgttacctgtaagtggtcgccggtgtgaactcccgtgaacgtgttctggccgtgatacaagtaatcatcacctttaccgatatcgaaatagagaatactgatagaataaattttcttcacttccgagtaaagttctcccagttctatatgctcgataatggccttggccgcaccgtaaagaattcgttccaagaaatataattcccgcgtcacctgaacttccacgataatgatctcgtcctcgctatcccgagccttgatgtccacacgattaaacttgtcattgtcgtcctgttgattgctctcgctttccaatatgtcaagaatctgtatcgggcgattcagtaaaactgtcagcaagccttccagcaccccgaaattagccttgttgcgcaacaagcgtttcacggcccagtcaaatcgaatgtatttatccatcactaaatcgtttgattacctacttcaaaggtaaacatttttaattacttttccaaggcttgtttaatgtacccggcataacctgaaagtcttttgcataaaaatggattgtaaggtaaataaactttctacaccagcgtcgtcaaatgccggataaacaactcttcagcagattgtacccaagctcgaaaaacccctgaatctgcattatggctcggaatatattccacgaggcgggaaacatcgaaagtcgtactctcgattcccgccccggctccaactgcatcggcagcattgatttcctgttccacgtgggtaggaatcatcatgaccggctttcccagatacatcgcctcgcagacggattcaaacccggcggtcgtgacataccccgaacagccttgcatgtattctagaaacttgacatcattaatccggtggaaagttaaacgatcgtttacccgaaaaaccggaggagcagttttcttgtcccaaaagaagtgagcctcctgatcgggatgggatttatgccactcttttacctcatcggcatacccgggattcagcatataccctaaaatatatcccttatcccgcgggtcagcttgtaacacctcttcccgtaaaagtggcggtacgacggccattctctcccggtaaaaatcctttaagggatagaatgaaagagccaatgttttcgtcgccccgatactacacaacgtgttattcagacgcaataacatttcttctcttccggtcccgttcccgtattggaagtcaggatgtttcatcagaaactggtgagcgatacagacaaaaggaacatgttcccggaaacgcaggttcatcagcccggccaaaatctcgtaaaagttaattaccacatccggctccgtcttttgaatgtgacgatggatcagattcacgcttttactatattcccgcaatttcttcaccgtgatattaagtaatatactttttgtcagtttcaccttcttgtgatctttcccataacaaaaactcgggctggtaaaagtctttacctttgccccaattttctccaaaaagaaagcgggaatctcccggttactgcttttcccaaccagcacttccacgacctcatgaccatggcgacgtaacatttgcgagagcgaaatggcctgtgtcagatggccccttccctctccttgaacgataaataaatacttcataccgctaatcccgtgtgtaatacagtttcagattccgaatctcgtacctctgtcaaagccttttcttcgatatacacgttccagtttccatcgtaatcctcggtcaaggcagagagagattccatccagtctcccgaattcaagtaaagcacgttcccgatcatcttcttctccggatagtggatatgcccgcaaatcaccccttgacaacctttcttcccggcaatatccacgatgtgtttttcgaaatcactgatatatgaaaccgaagctttcactttcaacttgatttcccgggcaatcgaataatagggcaaacctttcttcaatcgacggcgattgtaaatcttgttcgcccacaacaagaaagaatatcccacatccccgactttcgccaaccaactcatggaagaagtcactttatcaaacacgtccccatgtagcacgtaataacgtttatccccactcgtgtagatgtaatccttcaccacggaaatattcgagaaggtcaaggggatcactcgatccaagaaatcatcatgatttccccgcacgtaaataatcttcgtgtcatgagagatgtccagtaacaccttgataaaattcgtgtggcgccgccgccatttactgtttttccctcgcataagcgaccacccgtcgataatatcaccacataagacaagggtatcgcaagagtgttgttttaaaaaacgggtaacctctttcgtcttcgaccatttagaaccgaggtgaatgtccgaaagaacgattgttttgtaatgttgctgtttcttaggcatatattcattcctaaattacttatacaaaggaagaattgtattgttaagaaacgattaccaaaatatgaaataaatgtttcgacatttcccgtataaata

SEQ ID NO: 140 - DNA, 9571 bp, Butyricimonas faecihominis
cttgtattaagcacaacaatactccttgggcaaaatactaaattcacgctcaacggaaaaatagaaggcatgacttccggtagcctctatttcggacacacggataacaacgggcaatacctgaaaaagacaattccagtggaaaacggtaaatttaaactagaaggaaatatttccgaacccacgcaagtgttgttgtgtttagattcaactatccagctcatggacgatccgaatctagccgatttctggatcgaagccaccaccatgcacatggaagtaactgtcggggcatttaaagagtttaaacttaccggttcgaaaacaaatgacgaagagcaagaattaagacgtctccaagctcctatacgaaaagaaatgcaaccgcttctggatgcttaccgggcagaaaaagatcacgagaaagccgccgttatccgtgaacaattcgaaccttataacgaccgaatgaacaggatcacagatgaattcatccgaacccatcccgactcttatctagccccctatctcatgcgcttccggttgatgtcgttgcctgccgatgaagttgaaaacgcctataaccaatggacggaacgggtaaaaaacagtagttcgggcaaggaaatagcaggggagatagttaaattaaaaaaaggttctccgggaagtgttgccaccccgttcaaccggaaagatgtcaacaacgaaacattcaacctctccgagttaaaaggtaaaaaatatgttcttctggatttctgggccagctggtgtgtcccttgccgtaaaggtaatccacacttaaagacattatacgaaaaatacgcaagtatgggattcgaaatcgtgtgtatcgcgtctgacgatgacaccccagaaaagtggaaaaaagctattgaagaagacgggatcgggcattttcgccacattttaagtggcctgaaaagcacggctaacggctacgacacctccgaggacatcggagaatggtatggtatccactcactacccacgaaaattctaattgataaaaacggcaccatcattggacgttacgggggaggaggcgaaccgcaagagaatttggatcaaaaattaatagaaatattcgaaaaatgaaaaaaatgacaattatcggattaatcgggttaacaattttagcctgtcaatccaacaaggatggttacactatcaagggaaatattgaaggtgctggaaacggaaccgcaatcatgacaattcccgtcgggagagaagaagtcacaaccggggacacggtaaaaatgaaggacgggaactttaccttcacgggaaaactggaagaacccaccatgatcgtgattcaaatttgcccagataaggaaaaaacggcatcctttagctttatcggggaaaataacccgatcactctcgctggaaaatgggcagatgttatcgaccaatacgggtatcggggtataccgaatgttgatgtgacaggttcattaaacgaaaaaatataccaagaaatcagtaacgttcgggaaaagttgatgcaagaaccccgctttaagaaatacgcagaagtacaaactaaattgaatgaactccataatggtgaggataaagaagccttctacaagtatcaagcagaaaccgaggcgataaccaaagaattcaacaatgaggtgcggaagcaacaaaaagaattgatcctgaaaaatgacacgatagaagcagtagcatactatttaaatttccttcagaatgacatggagttagctgaattggaacaagtattcaaggccttatctcctaaagtacaaaacagctcattcgctaaagatgttagagaggaaattgcagcaagaattcgggtgcaaccgggaatgccggccccggacttcacgctggaaacacccgatggagcaaaattatccttatcagatttgcgagggaaatacgtgattctggatttctgggcttcttggtgtcgtccttgcagagcctctttccctgaaatgaaaaaactatacgcagaataccataaaaaaggggttgaaatactcggaatcacgaatgatagccggaaaaccgactggcttaaagcgttggaagaagacaacctcccgtggttacaagtcatcgatgaatatccgatacgcaatacacctgccaaagtagccacgctctacgctatcccttaccttcccacgttgatgctgatcgacccggatggaaaaatcgtcgggaaagcaaaagacaagcacgagctgaaaacgtggctggacgaacggttagcaaacaagaaataagagatctttatttcttgttgattattctaaatcataaaaggtaaataatccttcttcatttattgacaacctctctctgtatacaatagggagaggttgcctttttatatcactctttaaactgccttgaaaaaattgcatgaaattcatcgaaacaaaaaataaggctctacaccctgcatattccgagaaattgactatctttgcccaatttttaatcaaaccgcataaagataaattctatggcaatctatttggacgatgtatcaagaactttcggagaatatctgcttattcccggtctgaccacgaaacagtgtatcccaaccaacgtttcattgaaaacacccttggtgaagtataaaaaaggcgagaaatcagccattgaactgaacatcccgtttgtttcagcgattatgcagtccgtttccgattctggattggcaattgcacttgcccggaacgggggattgtcatttatcttcggttcgcaacctatcgaatcacaggcagaaatggttcgcaaggtaaagaaattcaaagccgggttcgttaccagtgactccaacatcaccccggaagccactttggcagacgtgcttgctttggtgaaacgcacgggacataccacgatgggagttacccatgacggaaccccgaacggcaaattattgggtatagtaaccagccgggattaccggggagaaaaagacccgaaagacagaaaggtgaaagaattcatgactcccttctccaaattaaccgtcggagaaatcgggatgaccctgagcgaggcaaaccaaatcatctgggatcataaactaaacaccttaccgatcatcgataaagatcaaaaccttgcttacttcgtgttccgcaaggactacgatagccacaaagataacccgaatgaattattaaacaccacggacaagaaattactggtaggtgccgggattaattcccgtgattacaaagaacgtgttcccgcgttagtagaagccggggtggacgttttatgtatcgattcatccgacggtttctccgaatggcaaaaagaaacattacaatggattaaacaagaatacaacggcaaagtactcgttggtgccggaaacgtggtagatcaggccggattccgttatctggtggaagccggggctgactttatcaaagtgggcatcggtggaggttccatctgtatcacccgcgagcagaaaggtatcggccgcggacaggcaacagccgtgattgacgtggccaaagcccgtgacaaatacttcgaggataccggtatctacgttccgatttgtagtgatggcggtctcgtacatgactaccacatggtgttggctcttgccatgggtgccgatttcttgatgatgggacgttatttcgcccgattcgacgaatcccccaccaaaaaactaatggtgaataactcctacgtgaaagagtactggggagaaggttctaaccgcgcccacaactggcaacgttatgatatgggcggcagtgaatccctcaaattcgaggaaggtgtggatagttacgttccatacgccggaaaattaaaagacaatttggacgtgaccatcggtaaaatccgctccacgatgtgtagctgcggagcaacatccatctttgaattacaaaagaatgctaaaatcaccctggtttcttcaaccagtatcgtggaaggcggtgcccacgacgtgatattaaaagatcacaacagataatatcgaaaatcccggattaaactccgggattttttattctatctttcttcttgctgacaagtgttgcaatagtaaatactaccccccaaataattctcttttaatatataatccccgcagtacacgcaatggctccccactgtatccttagacaagtaaggaacgtacccccctttttgatcaaacaaatccttctcggaacaacgtcctcccagtcggtatatctcccgcaaaaccttcttcacacacccgaaaagctcttcccttttcgcctgtgaaagaaccgcaatcttcgtcttcggatgtacccgagccagatacagaatatcttgcaacacaccatttcccaaaccgggaatcatctgatcagtggcaagcaacgccttggcactctttttctgcaccccttcgtcattaatcaaggacatgaaatacgccttgtcaaaagcatccgacaacacctgcggtttatttttagcccctccgtaatatgacatcaaaccaccctcgaaagaatcccccacgaaacaccacacggcgccgtacatcctcacggaaacgattatgcaactctgatcttcaaacccgatcagtaactggtgcttgttcggtaacttcgcctcaggctcgtaataccggaggtttgccccgtcgctaaacaccaccttggcatcccccacgttaatttgcaccattcccccgtaagcacaagccccgtccaccgtcttacctagcaacatccccgggtatgcttccgggtccccgttgaaaaaggtaaacttatgcggggtgtagcaaggtataacatcagtcacgacctttcctttgataaccccgttcaactgttccgacaaacaaagcgcttcaggtgcttctatcataattccatcatttaaatttatactctttcttcctcaaatataatcgaaaaaatgacacaaaacattttattgcttatcttcgttacatcaaaaaacaaaaactatgaattacaaagtgacacattaccctacccggcaacgtttcgaaatcgagctggaaaacatgacagcttatgctgaatacaggttaacggacaatagtctcgacatcattcacacgttcgttcccccggctttagaagggagagggatcgcaagcgcgctcacggaaaccgcttatgattacgcgagagccaatcacctcaaaccggaaggcacttgctcgtacgcgaccgtgtggttgaaacgacatccggaatatttacaatagaaacattattcaaggctactggcagacacaccctccggtgttctgcccgtgactcgggcgtaatcccaccattcatcgacacgaacactggaacaagttaccactcccgctcgaagacttatcggtaacttactaacgaggcagcgacgcgagtacatggtaacttatccggaatattaagtttagaataacccggaacacgctcccttattcactccccatgtatcgacaataaatattaaacaattccttgggcatcttcaacaaatgcttgaacttgatacggctatcccccttctccacccatgtattcaagggaacttcatgaataatccggtcataatcagcgtgtttttcccggattcgtaagattagttccacgtcgaagagccaaccggaacgaaattcctcgctaaatccaacaggtatcaactcacttttcaaaagcttggccccgcattgggaatcatacacgggaagttggtataacatcgaaactaacgtggcaaacccccgccccaaatagtggcgatacgctttcctttgcacgttagcccccaagcgtttcaaacgggcccccatcgtcatgcatactcccggtttccggtccatcacctctgccaacaaatacaaatcctccaatggcgtggccagatcggcatccaagtaccccacgatcttgtaacgattcaaggaactgacatacaacatcccactcctgacggcctccgcctttccccggttatccgcattgtcaaccagcaagaaacgccccggttccaactccacggcccgccgtaaaacctcggaagtattatcctgactaccatcgttcacgaaacaaaaatcaaaacgttcttctctacccacgaattcccggaagacctccaactccaaacgttgcgcctcgttataacacgggatgatgacacatatcttttccatttataatcgttttatttccgaatctccatttctttcgacaagaaacgctgtaattcaatcgcctccctgttcttcgggtccagttccaccgccttttgagccatttcagcggcagtagcccggcgtcccgcggcaagttcacatagcgcacgtaacaatacaaactcgctatcctccttaaccccgctcatctgtttcaacaatttctcggcatcctccatgcgtttttgctgaatcaaagcccggagttcaatcttctgcaacgcctctttatcccgcccttgctcgtgtaacaatgacgagacctgttccagtaacttgtagttattcacacgacagtaacattccgccaaagaaagcaacacccgctcatccgcccgtttggctctcaccaccttctcgtaaggttctatcgctttcgaataactcccgtttcgccgtagaatatccccacctaaggccaacgcctgcacgtttccaccgttatacctcaacgctttattgacatagtccaacgcctccttatcctttccctccgtgtagtaaatcaaccccttcacataataagaagaagatgccacatcattttgggccaacatcgcgtcaaccgcctgatgagccgtcgtgaactttttcaaatccaaagcactcaacgcccggatattcaacgcatccatcaactgcggttgccatttcagagattcacccgtacaccgaagagcctcctccggcttgccgatcgtgtagtacatccgggataaacgcatccacatttcctcgttccacgggtgatccttcaaataattctccaatttcgcgatcgcctccgggtacttcttctgttcctccaacttgatcgcctcgtaatcatccctagacgttctctcacccaccacgcacatcggcaacccatcggcatccaccgagtacaaaaagccctctttcaccgggaaaagaccatttttcaactggaaactattgatatacacgttatcgaatatcatgtaatcccactccttgctgaatttatcgtaataccgactatacacgatggttacattcgtatctttccggaaataatgttgcagattcgcactatgattcgtcacgatccggagaggacgtcccttataatccacgttcttcttgaaccaatccacccctttcttcaaggaattataataatagtctgtttcgtaatccccgtaagcacctcgcaatcctcccaccaactcgctaaaataaacatagtcattgggatgattcacggccatgtgacgtgcaggcaggaataacaacccaacaaacacgaccaccataacgcccttcaaatatttaggggaaacagataacattaacgtccagaaccgggctgccaacaacaccatgaaaggcatcacgaacaacaaatgacgaattcccccgtacaaatttgatttctggtaaatcacccaaaacacgggaaataccagtgagaataaaatgaagaacgacaacagagagaattccttcttccggaaagccatgaaaaagaggtaaccgataaaaccggccaccaccactaagggagacccaatcatcaggtatttcggggcgtaatggacaggcaacatattcgacatcatctgttcgccctcgaatatcgtgcgcaacccgatattataattcgtgaattcctttaacgacacaaccacgttagtaaacgggcgagccaacgcgaaaggccacgtgatgatagacaagaaatacccaacaaataaaacgagtataatcaaaaacagaatgttttcgacttccttacgatatttcataaatttataaaactccttaaatccgacccacaagatgtaaaacaaaccgccatacatcaacaagtacgggaacaaaagcaagcccccggaacgggttcccagtgccaaagcgattcccagcatggccccgatcatgtgtcgtagtttgaccacgggataacgatcgaacatccgcacgaagtagaatatggcaaccaagtatcccacggcaaacggaatgtccttcaggttattcatactatgcccgaagaaacgaggcgaaaaaaagagtaacaacatggaaatcagtccacacaaccctcccccgaaacgcattcccaacagaccgatcgcaattacccccaaagctcccaccaaggcacacacgacatggcgcacggcatagacatcatccgcaccgatcacgttagccacaacggccgccacgacctgcatcgaattaccgtaaagatgtaaagccgttttcggctgattcaacgcggccttatctcctttcgtgaagaaatcaagcacataaccggaatgccggtgatcgacaaactcgtccccgctaatcccgtaatccttgctgatataaggcatgtaaaaaaagacgaacaaaccgaataacagcataagcattcggaatgtcatatcccgacgagaccgaccggaaacatcaaacaaggtggtaaagaaacggcctgtggtcaaaaaacgaaaaggtatcttccaaaaataattcacggcagggttcgaaacgttttccgaatctttccaagtaacaggcacctccaaggtcccgaatttcacgaaagctttctgtaaactgtaactcacagcccgcaatagatttccgtccaagtcatccccggcgtaagccttcatgaacaaagacttgttaccgatcaacacaggagaatccgtgatactccgatcacctcgccacaggactgcatccacaaacccaagccacagcttacgtttccggttactcacgtaataaacatgatcctttcgttccgtttttccgtaagcttgcccaagagcgttcaacacgggcagggccacccgatccagatcgacaagcattatatcctcggcctgtacctcttgtaacacgtttagaaactcttcatgctgacaaccaacccgcagcaggatgatattctcctgcaataattctttattggcatttaaaacgggtaattgaaaatcggcatttctcgtgaaaccaattacctgaatagacttatttacgacttcttccactgtagaatcttttacacaactagttaatatatctcaccgcccacttacgacctttaacgggtataaagatataaaataagttatcaactcccaatactctttctgccatttcattgtcagattgaaacgtcttgaccggttcgatttatgacgttctgtcagtaaacgtgacaccagtcacatgcctgtaagagatttttatgaaaataagtcttatttgggaactggcacaccgtttgataaaagataaatgttcttgaaactattcagggac

SEQ ID NO: 141 - DNA, 9568 bp, Butyricimonas faecihominis
gtactttttcttttcatgatcctctaaaagttactatatttgtaagttacaaaataaatatttcattcaccaaagaaaattattcatgcaaaataaagttgtaattattacaggagcttcttctggcataggtaaagcgcttgtttatgaatttgcaaaacgtggagcaaaaattgccatgggagctcggaatttggatgaattacagaaaatcgagacagatttaaaatctcggggtgttgatgcgctttccgttcaaacggatgttactcgggagttggattgtaaaaatctggttgagaaaacagttgaacgatttggtaaaattgatgttcttgtaaacaatgccggaatatccatgcgtgcgctatttgaagatttggaactggatgtcatccggcgtttaatggatgtgaatttttggggaacggtttattgtaccaaattcgcattaccttatatattaaaaacaaaaggtagtttagtcggaattatttcagttgctggcttccttggactacccggaagaaccggatattctgccagtaaatttgccgtgcgcggattcttgaatacattgcgagttgagaatctaaagaaaggattgcatgttcttgttgcggctccgggattcacggcatccaacatacgaaaaacggctttagtagctgacggacatcaacaaggcgatagcccgcgggcagaaaataaaatgatgagtgcagaaagatgcgctcaaataattgtaaatggtgtagtgaaacgtaaacgggaaatcgtgatgacactggttgaaggaaaaatatccgtgtttttaagcaagtggttccctagcttgttggataaacttgcttacagccacatggctaaagaacccgattcaccgtttaaataacgaaaaaaagcacatgaggaatcttgtacttgttacttttatatttctattatctataaattccctttttgcccagaaaagagaacatatacgtgttgtgcctaaattgtctcattcttacgtgttaccattgaaacataacaagacagattctctttatcatacacgccctcagctcaaatatatttatttacgctataaaaatcaacatatcgatgatccgcttgtgcgttatgcattggataacttgaaaaaagaaagaatgaaatattatgagttatacaaggccatcaacacgttaagtgattatgctgaaaacgaacatattaaatatatgctcaattacgtgagaaactactttgaaacggtacaggcaaaagaagaggcaattcgtcaaattgaagatcgtattaaaaaagacagtgttgatttttataaagaacacccggaagattccgtacaatacgataaactgttgaaccaaaacttgaaggccttactctcctttatggatcaggacgtgaattaccaatggttgaaggaaaaaagtcgtgattccgtacaaatcaccttgctgtcagcctctaaccgtcctagaaacctgtggcttaataccggaaaaacacaatattatcgttttatggcagagaattttattggtgacaccataggtacttgggtaaaggttatgccgcgagggaatcaactgaaattcttcttggatgaaaatgtttatcaatatcagaaatattcagagcctaaagaaattgttgaggaatgttttctggaagcccctgactcaatgtattttgtactatcggaaatgaaaattggaaaaataaccaaaaggcgctggatgtactattctgacgtaaccttctctttcgggcagggttttatcagtagtaactgggccagtggcggtgaaaattctctgtctattctctccgatataaagtattttgcaacatataaaaagaataacacaacgtgggaaaactcgatccgttatcgcttgggagccttaaaaagcggtagtgaagatttgagtaaaaatgaagataagctggaactccaatcaaaattgggaataaaagcttttaaacattggaactacgccacgcagtttgatatgaacaccgtgttgttcaagacaaagaataatccggacaaagaggttattgcagccttcttgactccgggaaattttaccttatctctaggtttggactataaacccaaaaataacatttctttatacctgtcccctatcgccggacaatgggtatatatgcgtgatacaaacctcgttgctcccagccgttacggtttggaaatagggaaaaaatttaaaagtgatgcgggtgctaaaattgaattgaaaaaccagcatgaacttttcaagttcttgaaaatagacaatcatctgattatattttccagttactatgaacaaccggaaaaattgacattagactggcggttaacgctgaactttaaaatcaattacttcatgcagacttccgtctatgctaatgctgtttataaccagaatgattcgaaaaaaatacaattgaaacaaacattaaacttaggagtatattttagattttaaagcatatgatgaattttgaatcctgtgagatcaataatatcgtgatccatgacatcggcaataaatacgaggatggaaaattacgtctctccgaatcttgctttttaccggatgatatggatgttcacaacctacttaaaagctattttcttgcaccttttaagaaggacgcctattaccggtttgcacctattgaagataatttatatcacaatctggtgtacaatgcagttaattctattttcgaggataacacgaatttttacgaggcttcgttgaatatcgctcaacatttattcgaccagtcaaaccatccaaacataaaagccggagagttatacatggtccatttcaagaattgcgtgctggaagaaggcccttgtgatgctatcggtatttttaaatcagaaacgaaagatactttcttgaaaattatcatgaatgataatagctatcaactggaaagtgaatcgggtattaatatcaaaaaactggataaagcttgtttggtcttcaatgtcgagagtgaaaacggttaccgggtaagtattttggataagacaaactccacggaggctgtctactggacgaccgatttcttgggattggaacaatgcgaagataactatttccagacatccaattacttgaaactctgcaaagattttgttcaagaggtttataatcaggaaaatgatattcccaaagcagaccaaatcgatatgctcaaccgttcgattgattacttcaaaaaagcggatactttcaatgaaaacttgttcaaagaagaagttgtttccgatccgcagattatcgatgcttttgagaatttcaaaaactattatgaagaaaagaacgaacttgcgttaaaagaccagtttgatgtatcaaatagtgcggtaaaagacgaaaaaagatactttaaacacgtgttgaaattggacaagaactttcacgtttatattcacggacaaaaaaaatacatcgagaaagggtatgactcggaccgggatatgaattattacaagctgtattttagagaagaaaactaacacttcctgcctatgaataaaaaaatcaggagatttgttatcatattaggagtactggcaataatctttctcgcttgtgtgggattgggatattattatattctggctccaaacacgagtgtcaaagatgacggtattgtttacttgcgcgatagtagcactatatcacaagtgattgataccttgcgacgacacgggtacatcgaaaatgcacacacccccagcgtggttgcgagactcaaacgttttttttcacccgtgaaacccggaaggtataaaattcaggatgggatgaataataacgagttgatcaacatgttccgttctggtaaccaatacccggtttacttcacgtttaataatatgcgaacgctggctgaatttgccgaggaagctcatgaagaattaggtacttccaaagaagaattgctaacgttgctgaaagattctgatgtgcttgccgatttaggatttgattctaccacgatcatggccatgtttatcccgaatacctatcagatctattggaataccccggctcttgatttgttgaaacgaatgaaaaaagaatatcatcgtttctggaatgaaaaccggatggcaaaagcatctgcaattgggctttctccggaagaagtgatcacgttagcctctatcatcgaagaagagaccgtgaaaccggaagaataccctgtcatcgccggtgtttacatcaatcggttgaaccggggaattaaattggatgcttgtccgacactgaaattcgtgttgggagatttcacgataagtcgtattctggatcgttatttaaagattgattctccttataatacatatatgtatgccggacttcccccgggaccgatccggatggcttccatcaaggtcattgatagtgtgttgaattatcaaaaacatgattatctgtatttctgcgctaaaagtgacttttccgggtatcataatttctcgaaaacacttcgacagcataatatttatgcccgggagtaccatcaagaattgaataaacggaaaatctggaggtaaatgaaagattctgagattgctgatacttgagactaagtgattgaaaacaagcattagatcatgggtgtgaatcacttaatctataatcgctaaatcacgaaattaataggatctaaaatctaaaattgaatatttctttgtaaatccgaaggaaagtagtaactttgcgggcgataaataaatttttattacattaatgtattaataaacaatcagttatgttgaatcattacgaaaccgttttcatcacaactcccgttttatctgaaatacaggtaaaggaagcggtagaaaaattcaaggctgttattaccgaaaatggcggtaatatcgagcacgaggaggcttggggtctacgcaagctggcttatccaatccaaaagaaaacgacaggtttttatcacttaatccaattcgaaggagaaggtactctagttgacaaactggaaacttcttacagacgtgacgaaaaagtgattcgtttcttgacgttcagattagacaagtatgcttacgagtatgcattgaaaagaagagctaaaaatcaagtaaaacaagaggagaaataagccatggcacagaacgaaagcgaaattagatatttaacccccccaacggttgaaatcaaaaagaaaaagtactgtcgattcaaaaaagcaaaaatcaaattcatcgactacaaggatccggaatttttaaagaaattcttgaatgaacaaggaaagattcttcctagaagaattaccggaacttctgtaaagtaccaaaagaaagtagcaaccgctgtgaagagagcaagacatcttgctttgttgccctacttaaccgacttgatgaaataattttaaggaaggaggacacaaatggagataatattattgacagatatagcaaacttaggacataaggatgacatcgttgatgtaaaacaaggttacggacgtaactaccttatccctcaaggttacgctattttagcaacaccttctgcaagaaaagttgttgcagaaaatttaagacaaagagctcacaaagaagctaaactgaaagcagaggcagaagaaattgcagcacaattggctgaggttaaacttacgatcggagctaaaaccagctctaccggtaagatcttcggttctgttaacagcatcatgatttctgaaagtttgaaggagaaaggtttcgacatcgaccggaagaagatcgtgctgaaagatgtaaaagaaattggaacttacaccgctcttatcaaacttcacagagaagtgaaagttgatgttgagttcgaagtagtttccgaataattaaaacgagtcattaacaagacttaaacgtatttccaaacatattccaaacgctaaaagcacccccaaagggtgctttttttgcgaaaagtcttatctttgtatatattttggaaggacatatatgagtaagcagagcattgagttgaaaggaatacgggttcacaacctgaaaaatataaatctgaatatcaagttaaaccagtttgtcgtgattaccggagtttccggaagcggtaaatcttcactggcttttgacacgttatatgcagaaggacaaagacgttacgtggaaagcttgtcttcttatgcgcgtcagtttttgggaagattgaacaaaccggaatgtgactacattaaaggaattccgccagccgtggcaatcgagcaaaaagtgaatacctcgaatccacgttcaaccgtgggaacatccacggaactttacgattatatcaaactgttgtatgccagaatcggtaaaacctactcccctatttcgggtgaagaagttaagcgccatagcgtggatgacatttactcgtatattctggaagggcataccgatcagacggttgttatcatggcaaaattagccgagacgacaaatgaaaatcttcctcttttgattagtcaaggattttcgcgaataaaatacggggatgagtttatacgaatttccgacttgatcgagaaaaatattccggtagactcttcgaaagagatgtttctcgtgatagaccggacccggataaatgacgagaaagacacggtatcccggatcaaggattccgttgagacagccctttacgagggaaacggtacttgctacattgatattgatggagtaacacgttcgttctcaaataaattcgaggccgatggtatcgaattccaaataccgaccattaacacgttcagctttaactcccccatcggagcttgtccgaaatgtgagggatacgggaagatactcgggatcgacgaggatctcgtggtccccaacaaatcattaagtgtttacgatgatgcggttatgtgttggcggggagaaaaaatgagcgaatggaaacattttttcgtacaacacgctcacaagataaattttccggtacataccccttattttgagctgacggccaaggaaaaagatcttctttggaatagtgaaaacgggatatacgcgttttttgaatacctagagtccaaaaagtttaaaatacagaaccgtgtaatgattgcccgatacacgggaaagaccaaatgtccggtgtgtcagggaactcgtttgaaaaaagaagccacgtacgtgaaaataaacaatcattctatcacggaactcgtggatatgcccatctcggaactgaaagtctattttgacaatcttcagttatccgaacacgataagacgattgccgcacgagtacttccggatattcataaccggattgatttcctgttggatgttggtcttggctacttgacactgaatcgtttatcctcttcattatccggtggagagtcgcaacgtatcaatctggcgacctcgttgggttcagctcttgtcggttccttgtatatcttggatgagccgagtatcgggttacattcccgggacacggatcgcttgatacaggttcttcatcgtcttcgtgatatcggtaacaccgtggtggtagtcgaacatgacgaggatattattaaagccgcggatgaaattattgatgttggtcccttggccgggagattgggtggagaaatcgtgtaccaaggaacactgaaaaacttgaagaaagcggacactcttacggcggattatatatatggaaaaaagagtattcctgttccggcaaaaagaagaaaatcaaatcgttacatactcctttccggtgccacagaaaataaccttaagaatattgatgtcaaaattcctttggggataatgacagccgtgaccggggtcagtgggtcgggtaagagtacattgatcaaaacgatactggttcccgccttgaaaaaatattatggggattactccgactgtacaggaagtttcaaccgcttgagcggggacgtggattctattcatggagtggaatttattgaccagaatccgattggtaaatcttctcgttctaacccggttacttacctgaaagcgtgggatgatatacgtaaaatatttgctgacgaaaaattatcgaaattgaacgggttcaaaccagctcatttttctttcaacgtaccgggaggtcgctgtgaagagtgtcagggagaaggaatcatcaaggtcgagatgcaatttatggcagatgtctacttggaatgtgaacattgtaaaggaaaacgtttcaaggatgaagtgctggaagtaaaatacaagggattgaatatatacgatattttagagatgaccgtgaaccaagcagttgaatttttctcttccgggacaagtcatagtgagcgaagtatcgttagcaaactgcaaaaattaatcgatgtcggtttgggatatataaaattaggtcaggcatccagcacgttgagtggtggagaaagccagcgagtaaaactggcttaccatcttagtcaggaaaatgcggaacctacccttttcgtgtttgatgaaccgaccacgggattgcattttcatgatattcataaattgatggattctctaaatgccttgatagaacgaggacatacggtgttgatcatagaacacaacatggacgtgatcaaatgtgccgataatattatagacttgggaccggaaggaggaaatgaaggcgggtatctcgttttcgaagggacaccggaggaattgataacgtgtgaaacctcttataccggaaaatatcttgcagaaaaattgcaagaaaataaataacagatatgctcatttggaatatttaaatatgaagaagttaatagatttcactgttactgagaacaaaagattaaatcacgacaccattttactggtgttacattcggatgaattaccagaaattcagccgggacaattcgtgaacgtgcgggtggatcattctccctcgacttttttaagaagaccgatctccgtgcatgacgtggatgaatcacgcgggttactttacctttttatcaaaatcgtgggatgtggaacgtcaaccttgggcgaattacaaattggtgataaagtgaacgtgatgctacctcttggtaatcatttttctatcccgacttccggtagacctttgcttatcggtggtggttgtggggtggctcccatgttacatttgtcccggatcatgaaagcacagggtttatcgcctgtcgtgctgatcggcacccgaacagataaagatattcttcggaaagaagagtacgaaaaatatgctacggtatactatacaactgaagatggttccttcggggaaaaaggatatgtcacgcaacattccgttttgaaagaaaaattcgatcatatcttttgttgtggtccggaagtgatgatgaaagcagttgcggggtatgcgaaccaaaataatatcaattgtgaagtatccttggaaaacacaatggcttgcggtatcggagcatgcctctgttgtgtaaccgacacgaaagaaggtcacaaatgcgtgtgtacggaaggtcctattttcaatataaa

SEQ ID NO: 142 - DNA, 9542 bp, Butyricimonas faecihominis
ctataaacagaggaggagctggtgactcttcccgaagacagggagtatttcaactctccctctgtttatagagggagtacggcgaagccgggagggagttggtttactgtaaattcatatataagttccaaatttaaaatctaaaattattcgagttttcctatcgccttcaggtattccgattcacacaatttcaaagcggccttcgcgtccacccattcgctccaagcctgttgccattgggcctgagcctccaacaagtttgtcagattttccattcccacctcatactgatcctcggacactctcagattttcctttgcctgctccaaggcggattccgtcaaacgtatccgggtttgggcatcattcagtttaaagcgacttccggctatttccagccgcatcatctcgcccaatcgctctttattcaagcgactcatttcttcctcggccttcgccacccgaactttattccgtccctctccccagttgaaaataggtatcgccacggatgccatggcactaaaagaaccggaattagaatcatcaccgttcaatttcaaaccaccgccataaccgtaacccgcggaaacacccacttgaggcaggaaatcggcacgggtcacgtttatctccttccgtttcatctccacctgtttctccaacatgttataatccggcctttgttccagcccgtccggcaacgccagcacaccgggcgttatcgtggccgatagtgaatcggtcagtaccaactcggtattcaaatccagtcccactaaacgacaaagattcatttgagccaactgctttccatgttccgcttgttgtagctgtaacaaggcatcattatatttcacctgagctttcaacacatcattcaacggggccatccctgcctgctgggcatcttccaagttcttcaccaactcgttcaccaccgacttgtatttccgggcaaccaacaccaattcctgcacccggacacattgccagtaagcctgttccaattcgacaagcacttccgaacgattcaaccgaatattttcctcggcaagctcttccccaaatttagccgcctgatgtgccgcccggattttccctcccataaacaaaggttgttgcaattgaaccgatgccatatacacccctctcaaagaaagcgataatggtatgtccggtagaaaagcatattcatggaagaccggctttccatccgtccccatcacgggtttcccgtcagcacctatgacaacattgggttgcaatttcccgtcggcaccgggtacgtaagtcggcagatagcccccgcttaatttgtattcctgctttttctgatgatataaataaaagcctgacgcggaaagtttcggcaaataatttgccccgtattctttcttggtccacacggccttctctttttgcttttccgcgatagccaattgtttgctatattcaagagccatctccctgcattcctttaaatccaactgccgctgggctcgtaaaggagcaaaagccaataacaacccgattgataatataataaaacgcatagtgtaaaagtttagagtttagaaaattctgtgattgccgattaaatgattcagtgatttatggaaattctgccccatgagtggcaatccattaatcggcaatcactaaatcacaaaatcattcggctttgattttaaagaacaacgaatagaacaccggcaagatcaccaaagtaatcaccgtaccgataaacaacccgcccataatcgtcacggccaaggccccgaacatatcgtcattaatcaagggaatcatccccaagatcgtggtcatcgacgccagaaagaccggacgcaaacgagaggaagaagcatccagaagagccagaaaacgatctttccccgatcgaatctgtatatccacttcatctaccagtactaccccgtttttaatcatcataccgaccaatcccaaggctcccacgatcgccacgaacccgaattccttacccgccagcaacattcccaaaacaaccccgataatcgccaagggcaaacagagaataatcatcagcggctttttaaaatccttgaacaaagcgatcagaatagccagcaccaaaacaattcccaacggaacgttcttaaacaaatactgcttggattgcgtgcttgccagatactctccctgccattccgtggaataaccgggcgggatattcaatttctcaatcttgggcagcaaactatttcgcacgtcatttgccgtgtagccgggtgcgttattacactgtgccgatatagagcgttgcccgttatatcgcctgaccaccggaacttcccacgaggcggtgatcccgttggttgcttggttcaaaggagtagaacccacgacggccgtcatcacctcatccgtcgaaatcattcccatcatcaactccttcacggtttccagactcaacatattcgtcgaaggcacgaggctccataccggaacattattcaatcgccccggacgtaacccgtctttacccatacttttaatataaatcggcaaatcatgctctccctcgtaatatgacccgacaggcaacccgtccgtggtggccagtaaagccaacccgacatcctccctagaaaggttcgccacgcgagctatcggctgataataatccacgttcagcacgggcgtcatcggcccccagtcattcgtcactaacatcgtcgtggaatcctcattcatcaattcctccacctccccgcacaaacgtttcaacacggccgggtccggaccggaaatcataaattgtaccggataatccatatacatcaaattatattgtttcatccgaacgtatgcctccgggtaatgctccgaaaggtaaacctgtaatgaatcaatattcgcctttaaggtttcgggagaagtgaaatccacgattaactccccgtaacttaaagcgggttctgccaccgttcgtacaagattataccgggaaggagttcctcccaaactggtcgtaacggccgtaatttccggacggctggtcaaatattcctcgatagaggccagatcccgtttcaccgtctggggattcgtaccgtaaggcattttatactctatatacaactgattatagctcaaatccggaaaaaatccctgttgcacgaaccggaacaggtagatgctgacaaccagcaacaggacaatccaaccaatcacccatacccggtgacgcacggaaaactgcaacgtgttccggaaagccttgtacacccgggtatcgtacatttttgtctcatcttccacctctcccggctttacccttaaaccccggtccgcctgtatcgggacatacgccaaggcaagaatccagctcaaccacaaggacacggccaaaacgataaacaagtcccggacatactctcccgtggtatcgggagataaaaatatcggcaagaaagtaagaatcccgatcgtggtcgctcccagcaaaggccaagccgtcttcttcgtgatattcaccaaagccgccggcttgggaatccccttcttcaagtccacgagaatcccatccgtgatcactatcgcgttatccaccaacattcccatcgccacgataaacgaggccagcgaaacccgttgtaatgtcccgtgcatcatgtacagcacgagtaacgagcccaatacgacaatcacgagaccggccccgatgatatacccgctccggaatcccatgaaaagcatgaccaccaagatcacgataaccaccgattcgatcaggtttaccatgaagacgttaatggcacttttcacccgtgccggttgaaagaataccttttgaaaatcaatccccgccggaataatatcttctttcaactcggacagtttggcatccaccttttttcccaattgaagaatattcccaccttcctccatggcaatcgaaatcgctattgccggcaaagtatcatataacaaaccttcccgttccggtttcacgtaacccttcgtaacacgagccacatccgacaagcggatctgatcctgttcgtgtcccttgatcaagagattacgaatatcgtcgatctccttgtaagccccgttcacgttcacccgcacccgtttctccccgctatcgaaataaccggagtaaaccgttttattctgcccgttcagggtcatgattatttctgccggatgcacacccatgttagccatcttatcttccagaaactcgacgtttatacaggactgacgttctccatacacgtccacactgctcaccccgtcaatatccaacacggaacgacgaaccagttccgcgtaatccgacatttcctgatagtcaaaaccatcggacgtcatggcataaaacatcccgtacacgtccccgaagtcatccatcacgatggaaggttgggccccatccggtagctgagcttgcgctcccatgactttccggcgtaaaatatcccacttctgctgcaactccgccaagggaaccgtactactcaattctaccataatctccgacacgtcatccatcgaacgagaggaaacatgatccaagtcccccatcgaacgaatcgccttctccaatacatccgtcacttccaactccacctgataggcagaagctcccggataggccgtcaccaccatagcctgcttcacggttatcgccgggtcctccaacttactcatcgtgaaaaacgagtatatccccccaacaaccaaaacgaaaacaaagaagtagacaaaagctctattctttaaagcatattccgtaaaattcattgtattttgttgctttgcaacgttgcaagttgaccggttgcaagttgcaggttaatttaattttcaatatctataacaattttccaacgttggaagaggacacggggggtagcaaccggactttttgcccttccttcaaaccgttcaccccggcagaaacaatccttgtacccgaggccagatccgattccacgatgacttgcccgtctttatccagttcgacaactttcacgggattcatcctcacggttgtttgggtggtatcatacacccacacgtatgattgatcctctttttgaaacaaggaagagattgggataatagatagcccctcctgacccggctcgaaacgaatggtcacgctgacactcatgcctgccgccagattcaatttctcatccggtttcatccggaaacgcacccggaaaagttgattataatttgcttgttgtgttatatccagtaattccaagggaatttttacacccggaaagacatccgcctcgcaatagaactccctaaagctctcccggcgaataaaatcactggacggaatatcaatatttacctcgtagtaatcattattaatcatcgacaacacgggagtcccgatattcacaatctcgtgagcgtcaaaaaactttttctggacatacccgtcgaaaggagccttcaacttcgtatcgttcaacgcattcagattcgcgtgatacaaagaggcaatccgctgctttgccgccacggccttgtcgtaatcattcacgggaacacttttccggtgatacaactcgatcacccgatccgattcctccgttacctgcgtgtactccgctttagtcgcctcgtactgcaatctgtaatccctcggatcaatctccgccaacacttcccctttcttcacgaactcccccacttcagcgttgaaacgtagaataggtcccgccacccggaacgccaactgcacatctgaagccgccttgatcttcccgggataggtcgtactacactccccatcatacttctgcacctctgccgtcttcaccaattgcgaaatctccaaacccggagtagccctccgacaagacatcgcaacaagcaaaactcccgaaacagaagcccacttcaataccgaaaacactgtcttattcatatatataaacttttaaatcgagtatatatactcaaaaggtcgtgttaaagtttctataaaatcatttatcccccctatagacccacttgatcgcatcaccaagaaggacctgatccttgtttccctgatccgtcaacacgattttacattcaccgacaggcaactggaatagccccagagaaacccatcccacatgctctttaatatcaacagaaacctcctgcttttccccaccgacatccacaatataatattgctttacctcttccggttctgattctgtaacagaaaaagccgaaacagtaaagattccacttccccggccacctttctcctgctcttccatccgatggacaaaaaccttcgggggaatatacgccagaatctcgtactcgccctcacgttcaacccgggcagtccattccatcttcgctttactcccctgtaacatgaaagcatgagtaagcttattcaacccgtatgcctcggaactaatcatgtgcctcggaacaacttcaaccccttcccttatcatgagatttgaccccatctcatacctcgactcactcaaaggagaaatcagatttcgtagccgtttccgagaagaaggcgagatcaatttaaaattctcatcctcgttatccacgataatctccccgggggccggcatgaaataagaacgatccagatctttcacgtactcggtcgtgtccgtcgtttttgaaatattcgtcagtccctgaatgaaaaactttgttggaagattacttgaaatatttgtattaaatgttgatgtcatacctttcagtaccacggcaatctgcatgccggtgcctgccttaaccaaaaaattccgggtaaccactttctccccctctcgaccctgccgacgagaattcatccccgaaaatgtcatgtcccgagcctcgaaagaaacaactccatcaacatcactatcattaaagacattcaccgacactcgagaacgtctatttgcttgatcacgaatcgtaaaacctcccgagaaagcgaaaccggaaagactaccttctccgtcctcctgagatgtaacattttccactttaaaatctcttacaaagaaaacgggtatcttacgattctcgtaccacgcgggcaaaacgtccatccaatcaaccccaaacttttcaataaactcccggttcatctcatcaaattcaacttgccggaaacgattttcccgaataaacgtcgctaaaaacgctgtaatctgctccatgggaatattcctcacacttaacaaacgcaatagttccaaagttctctcgtgtaacagagtcgctacctcgtaaggattatccaaccgatcacggaaaagatcacccacactacgtccgacaaatcgttcctcttgatccaactcagaataagagataaaaaacgtgttcgatttcttcaacgcatctgttagtatggagttaattgccggatattcggcagaatgtaatgccatagtctgttcataaaacatgggactaatcgtgtacaaattacctacactagtactggcaaccccattacgccacaaaagagaaggcgaaacaaccgagtacaacaacactttcgcctgattcacgttataacgatactcattcaaaaacatcgaagataacgatctagtcagatcactactgagcatatcctccgtagaactataaaaagacgacatctcgggcatcattcgctttctaaaagcgacctccgccttataatcattccacatcccgatcccccgttccggcagaaataacataccgggctgggccatttcacttccccctttattaggacgggcaaagccggaaaaagaaaccggagtctccaccaaagtcaattgagaataaggatacgtgatccccatctgttcctccacgttataacgggcatcacgaatgatggctggaatggaatcacgaatttcctcgaatccccgcaaaagcttaccatgccccgcaaaaagataaagttcatataatgtagaatcgactacaagatcatgcttttcaaaattcccgatacaaagccccatcccgggcaaaggaacatctcccgtaaaacagacacgcccttctttcgtctcccgctttccgggagcaataaccgttcgcccatctgttgatgccacttgtaaggagtaggaagtaaaatcgggcaaagcatcatacggggatgccggattcaccaacggctgggctaccggataccaaagacattccggggtaagcaccgtgaaatcatccccgacaaaagcaaaccgctttcccgcggtagaactatgcccgggaatgggttgcaattgaaataatttatcaaaatccacgtccaaataacacacccgctcatcaatcccgccacgatactccacggttaattccacctcctcaccgggtaacaatttccgagcaacccgaatcacttgattctcccgttcaaacgacacgtcagtctcaccttcttgtatcgcggacacgaccaaggccgggttcaggtaaagaataatttccgataattcctgatccccctgatttttgacaagaagggtactcttcccagacagcacatttcccttttgctccacctccaaggtattcgaaaccacgtttcctttcgggaatttttgatatttattataagtttcggcataaagttcccgaacactctccacgttctcccgtgccatatagacaactcccccgaatagacctcccagcaccaaacaaccgatcgccacgatcatcacccgctttcggttcaccggacgattcggcaagcgttgaaacatcaacacggccaatccagcaaaccccatccccacgaataaccagcaaacccgctgcataagataaagggccattcccggatgtcccgtcacttcagaaaaagcattcggtaaagacaacccgaagggatcaaaaagcccttcccgcaccttacccaactgaaacagaaacaccccaaataccaccaaaagaatcaatataccaagtccccggtgacgaacccatgtatgaatgaagaaagagaaacccaaggcaaataccaaagccggaaaaattatcgtgagccagtaaaaaggataaagccagaaattaaaaggagactcactcgcaaaaatatgcagcaacatcccgataacaagagaaatccccgccatcgtcataaaagtcttcgtgaatcccaacatcatccccaccacgtagtccgcattactctccggccgatagtaaaccgtatccatcgaatccattttcctctctttcccaagaaaagaccctgccaaaaagatcaagggcacaatttgtaagatcgtgaacagataagcattttcatgaggaagataagatgacaacgtcaccaatccactatttaccccataaaaaatattggtctgcgccaagacctgataaagtataacaatcagaaaaagtaataacaaaaacagccggaacatccaacttctcaacaacaatctcgaattataacaagcaacggtttttaagttatgaatgtccatgatattggaatattaaaaaatttacatactattcgcccc

SEQ ID NO: 143 - DNA, 9520 bp, Butyricimonas faecihominis
gaatatttatacaatgaattgatttacaatattttgtgtttttgataaaaaaggattttacctattttttgtataactaatttcgctagctttgtggacgcagaatttttcgaatagaaaagaagataataaataaaatacgagtaatggaaaaaaaattagcagttatcgcgttgggaggtaatgctcttttgagaggaaatcaaaaaggtactattgaagagcaaaatgccaataccatcgacactttggagaatttggtatatttaataaaagaaggatataatctgattatttctcatggaaacggtcctcaggttggaaacgttttgatggataacgctgccggtgtggagaaatatgacaatgccgctatgccattggatgtttgtgtggctttcacgcaaggacaaatcgggtacatgattgaacgtaatttacgtaatatcttgaaagaacacgggctacaacgtaacgtgatctccatggtatcacaggtgattgttgacaagaacgatccggctttacagaatccgaccaaacgggtaggaaaaatttacatgaaggatgaggctgataaattagctcaagagaaaggttgggtgttcaaagaagagatcaaggtagaaggtggttggcgtcgagtggttccttcgccggatccgaaagattttatgaatgctgatttggtagagcgtttggctcgtgaaggaaacatcgtgatcacgaccggtgggggtggtattccggtatatattgatgagaaaggtgatattcaaccgatcgaaggggtaatcgacaaggatttggcttcagccatggttggaacccgtgtaaaagcggatgaattctatattttgacggatgtgccttatatttataaggattacaagaaaccaacagagaaaaaattggaattccttgattatgccgatacgatgaagtatttggaagagggagtttttgcggaaggtagtatggccccgaaaattcgggcttgtttgcgcttcgtgaaagccggagggcaaaaatccgttatcacggaggcaaccaagttggaagatcggagatatggttccaagattacaatggaatacgaggatgacagaagataattgagaatttaaaactaagaattggttttagttttcgttaggatatattatttttgaccgtttttataaaagaaagatgcttgttatttttcaatttgaaatttaaaatcataaatctaaaataaataaagttatggcttttaatttgagaaacagaaactttttgaagttattagacttcactccgaaagagattaaatacatgttggatttggctgctgatttaaagaaagcaaaatatgccggcaccgagcaacctcgtttgaaaggtaagaatatcgctttgatattcgagaaaacttcaactcgtacccgttgcgcttttgaagttgcagcttatgaccaaggtgctcatgtaacttatcttggtccttccggatctcaaattggagtaaaagaatctatggctgatacggctcgcgtattgggacgtatgtttgatggtatcgagtatcgcggttttgctcaggatattgttgaagaattggctcgttatgcaggagttccggtatggaacggtttgaccaatgaattccacccgactcagattctggcagactttttaacgatgatggagcataccgacaaaccgttgaataaagtgactttcgcttatcttggtgatgctcgtttcaacatgggtaactcgttgatggtaggtggagctaaaatgggtatggatgttcgtattgttgctccgaaagaattgcaaccggatgcagaattggttgctacttgcaaggctattgcagaagagactggcgctactgttactatcacggataatgtagaagaaggtgtgaaaggttgcgatttcttgtacactgacgtatgggtatctatgggcgagcctgcagaagtatgggcagagcgtatcaaattgttgaccccgtaccaagtgaataagagagctatggaattgactggaaacaagaactgcaaattcatgcactgcttgccggcataccataacttggaaacccaagtaggtcgtgacgtttacaaacaattcggaatgaacggattggaagtaaccgaggaagtattcgaatcagagaactctatcgtgttcgacgaggcagaaaaccgtatgcacacgatcaaggctgtgatggttgctactttgggtgactaattacgtataggtctttttactaagaatatattccgggcggtcctgtcgtagaaattcgacagggctgctctttttgtttccttatgatgttcgtggttgagaaatacacgtaatacaattaaaaattatttgtgaggaaggttattcttctgctgacgatcaggtgtatgccgtgttgtacgaaaccgtgttgaagagaggtaagcttattttgttgagagctcgtggagagaacgggaacacgagtgaatccttgccggaagagtgggatcctgcgaatgtgaaaggatatgcttttgctaccacgaaaaatgggaaagctgcatcggatagtgtttgtctgacgatagcttgataaaaagtgaagcctcctgaaagggaggctttatcttttatttcgcatagtctgccatgcagctttcacgggttccggtgatgtcgaagatcacttgcaggtgcaagagttcaaatattttcaacacttccggcgtgaggttgcaaagttttaggctggagccgacacttttcgctgttttgaaaagagcgatgatacaaccgatggcgctactatctacaaattcaatgtcgtgaaagtcgaagagcattcgacaatctttattatttaacaaaggtctaagttccgttttcacttcgtcagccgacgctaacgtgaaacgagtcacgtctacgaattcgacaatggtgataccattttgttctgttacttttagaatcattgtttaattagtttctaaggattaatatgtagtaaatttattcacagttgaattaagcaaaagtaatcatttttaccgagattgcaaataagtttacgggcggtttgtttctgatttcgaagattcaattgacgtgctaatatttttttagaaagggtaggcaagaacaataaaagttttaactttgcagagtgttattgttatactttataatataatgaatatttaaacgatataaaaaatgaagactactccatttacacatttccatgaggagcttggggcaagaatggctccttttgccggctacaatatgccgattgaatataccggtattaaagacgaacacaacacggttcgtgaaaaagtgggtgtatttgatgtttctcacatgggtgaattttgggtaaaaggcccgaaagctttcgaattggtacagaaacttacttctaacgatgtggcggctcttacggatggcaaggttcaatatagctgtttcccaaatgaaacgggaggtatcgtggatgaccttttggtatatcgtttcagcgccgagaaatatttgttggttgtgaatgcggccaatatcgagaaggactgggcatggtgtacgaaatgggcaaaagaattaggtatgaacgtggataccgatttggaaaacgcttctgataatatttgccagcttgctgttcaaggtcctttggcattgaaagcaatgcaaaaattaaccacagctaacgtggtagatatggaatattatactttccaagagatcccgtttgcaggaatcgataaagtgattttctccacgaccggatataccggggcgggtggttgcgagatttatgcatacgtgaaagatgccgagaaactttggcatgccgtgtttgaggctggggctgaattcggaatcaaacctgccgggttaggttctcgtgataccttgcgtctggaagcaggtttctgcttgtacggacacgaaattgacgatgatcattctcctatcgaggctggtttgggctggatcacgaaattcgtgccgggaaatgatttcattaaccgtgcttatcatgaaaaaatgaaagcggataagccgagccgttacatgaagccgttcgaacttcaagataagggtattgctcgccaaggatacgtaatcgaggatgcagaaggaaacgagatcggggtagtttgctccggaactgtttctccttggaccgggaagtcaatcggtacgggatacgtgaagagtggtttccacaagctggatacggagatcttcattcgtgtaagaaacaaagctttgaaagctaaaattgtcaagaccccgttcttttagtcgggtgcttttgagctagacgataactaagcacccgggaacgggtgcttagtctttttatagaagcaaaaacgttttcgaagatgttgaagctgttgattattaggcggtaataaaaacgaataaaaattacggaaaaaagtcttttatatggacttattttgcatctttgtaacgcgattgcaaacaagattttaattaattatctacttaaatattttagagatgagaaaacacatttttaatgccggaccatgtaaattgccggattctacattggaaaatgtatcaaaagcagtattagagttcggtaacacgggacaatcaatcatggaagtgtctcaccgttctgcagattttcaagctgtttacgaagaggctgttgccttgttcaaagaagtattgaatattccggaaggatactcggttcttttcttgggtggtggtgctagtatgcagttctgcatgatccccttcaacttcttgaaaacgaaagctgcctatgtaaataccggaacttggtcaactgcagctattaaagaggctaaaatgtggggtgaagttgaaatcgttgcttcttctgaggctgatggatttacttattatcctgaattcacgattccttcagacgtggattacatgcacatcacttcaaacaacacgatccgcggtacggaaattttctatgatccgacttctccggtgcctttgatttgtgatatgtcttctgatatttgcagccgtccggttgacgtgtctaaatatgccatgatctatggtggatgccagaagaacctcggacctgccggtgtaaccttcgtgatcattaaagatgatttcttgaacaacgtggtagctgacagaatgatcccgactatgttgagatacaaaactcacgtggataaagaatcaatgtacaacactcctccatgtatcaatattttcggggtgaaagaaaccttgaaatgggtaaaagcaatgggtggtgttgaagctatggagaaattagctatcgaaagagctgatatgctttatgctgaattggaaagaagcaaagtattccgtccggttgtaaaagaaggttctcgttcaagaatgaacattcctttcttgttaagagaaggatacgagtcattggagaaagaattccttgatttcgctaagactaaaaacttggtaggactgaaaggacaccgttcagtaggtggattccgtgcttctacttataacgcttgtacaatcgaagacgtgaaagctttggttgctgcaatgcaagaatttgaagcaaaacatatttaatattgacgatttacgatttcggatgtagaattgtctttcatgaaaatgaaggcaatgatggtctgaaatcgtaaatcttttttcatttaaaattgtaattatcatgactaaagtattaatcgctacagataaaccgtttgctccggttgccgttaacggaatcagagaaatcgtagaagctcaaggatatgagttagttttattagaaaaatatacttcacaagacgagttgatcgctgccgttgctgatgttgacgctatgatcatccgttcagacaaagctaccaaagaagtaatcgaggctgctaagaatttgaaagtaatcgttcgtgccggtgcaggatatgataacatcgacttggctgcttgtactgctcacaatgtagtggctatgaacactccgggacaaaactcaaacgctgtggccgagttggctttcggtatgatggtttacatggctcgtaacttcttcaacggaaaatcaggttccgagttgaaaggtaagaagatcggtatccacgcttacgggaacgttggacaaaacgttggacgtatcgctcgcggattcggaatggaagtttacgctttcgacccgttcatgactgatgagcaaatcaaaaatgccggggcaatcccgttacattcagctgaggaaatgtacaagatgtgtcaatacatctctttgcatatcccggcaacagaacaaaccaagaaatcaatcaattatgatttgttgaaagatatgccgaagggggctgttttggtgaacaccgctcgtaaggaagttatcgacgaggaaggtttggctaaattgatggaagaaagagctgatttccactatatcacggatatcgctccggattgtgattgtttcagcaaattcgaaggccgtttcttcgctaccccgaaaaagatgggcgctcaaacagaagaggctaacgttaacgcaggattggctgctgctcaccagatcgtgaacttcatagagaaaggtgacgagaaattcagagtaaacaaataaatcaattttagatttacgatttatgattctgtgatttttcacggcgctatttgaagcgtggatctgtgtggttggaatcattaaatcgtaaatcgttaaatcataaatatacttatggcaatagtaaaaccattcaaaggattacgtacaccatctcaagaagtttgtgaggaactggcgtgtctaccttacgatgtgatgaattcagaggaagcagcacaaatggctgcaggaaaacctcgttcattattacatgttaccagagctgagattgactgccctgcaggaactgatattcactccgagactgtttataacaagagcgtggagaatttcaatatgtttcaggaaaagggatggttggttcaggatgaggatgctaaattttatatctacgcccagactatggacggaagaactcaatatggtatcgtaggttgtgccgcttgtgaggattacatgaacgggattatcaagaaacacgagttgactcgtccggataaggaagaggatcgtatgatcttgacccgttatgtaaaagctaacttggaaccggtattctttgcttacaaggctgttccggaaatcgacgctattgttgaggacatcgtgaagagtaggaaagctgactatgatttcgtggcagaggacggattcggtcatcacttctgggctatcaactgcccggagaccaacaaacgtttggaggaattatttgcaacgaaagttccttacacgtatgttgctgacggacaccatagaactgctgctgctgctcgtatcggtgccgagttcaaatcaaagaacccgaaccacgatggtacggaagaatataatttcttcatggctgttcacttcccggatcatcagttgaaaatcattgattacaaccgtgttgtaaaagatttgaacggtttgaccgaagagcaattgttggctaaattgggtgaacatttcacggttgaagatatgggtacggagatttaccacccggctaaattacatgaattcagcatgtacttaggcggaagatggtataaattgacggctaaaccgggaagttacgatgataatgacccgatcggagtattggacgtaacgatcctttctaaccatgtattggctgacatcttagatattcaagatttgcgtacttctaaacggattgatttcgtgggcggtattcgcggattgggtgaattgaaacgtcgtgttgataatggcgagatgaaagtggctttcgctttgtaccctgtttctatggagcaattgatcaatattgccgataccggtaatatcatgcctccgaagacgacttggttcgagccgaaacttcgttctggaatggtaatccacaagatctaataagactggactcgataaaaaagcgactcgaaagagtcgcttttcttatgctttatagcgaagccatttgtataattctttccatgtgactttcttcccgtacatgaggatacctaccctgtaaatcttaccggataaccacgtgaagaaaaggaaggaaccgacgagtaaacccattgaagtgatgatttcccatgcaggaacaccaaacggtatacgtacaagcatgacgaccggagaggtgaatgggatgagagaactccagaataccatgggtgattcggggcttttcatggcagcaacaccgatgtaaagggcgacaaccagaatgatagacagaggggtcatgaattgctgggagtccgtttcattatcaacggctgctccaatggcggcaaataatgatgcatataataaatatcctccgatgaaatagaataagaaggctcccacaaatttcaagataaacatgggatcaatggtttttaccagattttggatgattgccaattgttcggggttaatttccgttccttgagcaaacatatttaggtcgttggcattttttaaagcttccaagtcaagattcggcatgaagaaagcttgagaaattaaaataatacctcctcccaaaacaatccatatcaaaaattgtacaagtcccacggcagccacaccgataatctttcccaacaggaactggaagggttttaccgaagaaactaacacttcaataatccgattcgttttttcttcgataacacctttcattacttgagaggcatacatgaaaataaagaagtagatgattagcccggcaaccagtccgataattgacgtgatttcagacgaactttctttggcatctccagtgtccgtgacaagtaatgtcctcaccagtacgggagttttggtggcatccaattccgtttccaaatccggcatctgggttttagcaatcacttcagcacgtttgacagtttctattttctggcgtaattgtgatgcaatctcgtttttcaattccatgggaacttgagacgttgagaataccggaatttcggcatgggtcatgacattggccgggatgcgggtaatggcgtaaaaatcgttctttttcagaaaatcaatatagtctgtttccggtatctcctgatcgatatacgtgaaactcgtgttattgattttttgaagcggggtttctaacgttgattcgttgataacggcaattgtacgctcttggctgtcgtctcgtagtagcatccacatgaggaaagcgtagaataacgcaaacaggatcgggacaaaaatggtgacgacaaggaaggtctttttacggactcttgtggtaaattcccggtttatgataatgagtatcttgttcattttaattgaaaattgaaaattgaaaattgaaaattgaatatgaggtttgggaaacgtcattctgattttcaatctgggataattattttaatttaaaatttgaaatcataaatctaaaaatta

SEQ ID NO: 144 - DNA, 9479 bp, Butyricimonas faecihominis
attttcaactttacacgataatcaaaaatatctaaatcaagaccaatatcatattgatctgtttcctcccaagtcaatttactattcgttaaagcattaggacgaattcctacattccccataaaattacttcccgtctccaatattcccaatgccaaataaggattagcaaattgctgaccagatcttccccacgaggccctaatttttccgtaactcaaccaccaaacatttttcaggaaattctcttcagaatatgtccatcccaaggccaaagaagggaaattcgcccatcggacatctttcccaaatacagaagagccatccctccgcaatgtgaattctgtcaaatatttttgcttgtaattataagccaaacgtccaaatccactcacgagaattttcttttccgaattagaacgataactttgcaaagcccggactcctccccattcatcataatataaaggtttaaaggcatctgttacgtaatgaatatcattactaggactcccttcaccactaccactaaaactattcacaacccaacgcgaataagtgaaccctaacaaaatatcaaaatgattatctttttttacatcaaatttataatgtaacagctcttccgtttgtaacatcagattttgtgctatttcccctgttgagacacttaaattttcgaaactcaaataactgggatcaaaagcatttttttgagattgagtaaaatcagttgctaaatttgcagataacgtcaatcctttgataatttcatagttcagtaccacacttccccggatattaaaagaattgtttttttcaagactaccgtttaaccgtttcaaagtctcttcttccacggcacttcccgccccaggcaataatgttgaattactcatcggatcaaccgtaaaaccttcaatcttagctccccctccaaatcctgtataagcctcacccttactccgatctgtatatgccatatatacccgagcatccaatgacaaattttttctcaaattcgcattcaaattactgataaaatttactcgtttaaaatcacttcccaacataattcctttctcatcataccatcccaaacctaccaagtacttaaaattctccgatcccccagaagcctgaatgtttgcattcaaaatttcacctgtcctaaaagtatatttccaccagtttgttgaattattaaaaaaaggattcagactatcttgtaattgtctaagtgccggaaaataactatagccttctggattccccctattccaaaagaaatcataaacagcgttattaatgtaagcctcctcgtaagatttcggcataacgtaagcataagtattccaatcttggtaagccgcacgttcgtttcttgccatctgtatatgccataacctttccccatgcccgctaatctgcgttggggtttccggtaatattgaactagaataagacacattagccgaaaacttggctttacctgctttcccttttttcgttgtaatcaaaataactccattactagcgcgcgacccataaattgccgcagaagcagcatcttttaaaacttccactgattcaatcgtcgaaggatccaattctgccaaagtatttgttcctgttaccggagatgtaaaagaatgcattggaacaccgtcaataacatacaagggagacccatcattcatcccagtaaccagtaaagaattataccctctgatatttacccttgttcctccacctccaggcgaaccggcaacattgtgaatctcaactcccgccatatgtccctgcaacaaattctcgaaactggcagaaggaatttcttctaagtcctctgctttcacggaggaaatagagctaattaattcccttttatttcgttccccgtaagcaattaccgtaacttcatccaaattagaaatttcttcttccaatgttacgatcaactccttcccggcaataaaaggtactttttttgttttaaatcccacaaaagagaataccaaagaaccattttgctgaggcaactcaagggtaaattttccctcattattcgttgccgtacctaaattcataccatctacctttaccgtcactcccggcatagtttgtttttctttatccaaaacgaccccgaaaagtcggtatatttttactttttcttgatcagattttttaataatcactgtttttccttccatagaataagtcaatcccgtcttattcccaatcaacaaagaatcaagcgcttgcttcaatggcacggattgtaacttaatggtaatacctgcataaccactcaattcacttgaattaaacaaaaaattataatgcgtctgcacccttaaattctcaataattttaattaaagagacattttggacctccagactcactttaatcacaccatctgtctgtgcttgaatatttatacttcctataaaatataaaaatatcatacaaacactccatgtggacaatttttttcttaatccgaaaaaatttctaaaaagtttttgtcgagtttttctcataaaatctctgttattaatgtgacattcatatacagcgagtttgccaaggagatggaccaacatctcgtttgtcttttcgccgttcattcaattctcttatctacttgtgaaagtagccgtaccgaccatcttaaatttttcacatcgaaactttttcaagttcctttcttgatattttgctgttttttcataactttgtatatttaatgtgactgttgaaatatacagcgattttatgcatacgagagatgggccaacatctctcgtcttttttatcgctttttaacaataactttttttccttctatttcataggtaatatctccaatttttgagatcacttgcaaagcttcctccaaggttttagtccgatccatgtaaatatgaaatctaaatccttgtaaatcagaagattcatacacaatctccgcatcataccaacgcgccaattcatccaagatctgatccaaaaaagcatttttaaaaacgaactctccatttttccatgctaaaacggtcattaaatctacctcccgaacccaaagagaataatcgtttgctgcaatttcgcacaactctccaggattcagtataactgaatccccccccgcaataacttccacctttccggaaactaaagtggcaaatatattctgccccatatacgctttcacattaaactgtgtacccaacacccgaaccgaaccacctaaaaactctaccagaaaaggacgagtttcatcccgagctacattaaaataagcctccccacttaaaaatatctttcgctccgttccaataaaagaatttggaaatcggatccgagtttctgaatttaggatcacagttgtcccatctgcaagtcttaatgaatattcccccccacgaggcacaacaatttccgtgtattctacaagagaagaatcacacttctcttgtttctcctgcacgatgattctatcattcacattaaaaccgggaatttgctctgtcgaagtcatcgttgttgtaatttggtgtacagttccatccgataagatcaaatgcactcccgtagaatgagccaatgaggataacaacacctccctctcccctcttctgtctgccgtaaatagcattaacaaagccacccccactgcaattccccaccgccaccaagccatcatacgtcgtttcttacaaggcaatttcatcctagaccacatcctctctattcgtttttcttcttcatcttccacttttccctggtaaaaaagctccgaatctttcaagaattgcattctctcctccgacttttcagcccacgctttcaccgcctgtcgctcttccgcagaagcttgccctaaaaccactcgtcttatcttatttatttccatgataatttaattacttttatattaaaaacaacaatctggaaaaacgggggacaaaaataactggaaattttaaattcatgttcaatttttcgacattacagaataaaaatcaacacaccccaaacagacaagacaccttcgtaactttcttactcccatatgctaatgcaacaaaaagatacagaaaaagaaattatataactttattaacactatcgaaatactaggaataatcctaaacaaaattcctacccatcaaaatcaaagagtgtataaaatttaaaatggtacaatttcctccatgattatgaacacataaaacaatggtaaggattcacgaataaatttataagcacgttttacatgggtatgaaccgtaacttccgaaacgttgagttcccgagctatctccttgtagctcatattttgaaaaattttcaattctaataccttacgttgcttactaggtaacttctggagacattcctgcactttatcaaacaaggccctatcatcctcatattccaaggaaccaatgtaaatcaaagcttcagtcaactttgtccggttggaatcctccacttgaagatgcttgtaataattcaaacaggaatttttaacggaagaataaagataactactaaccttggtatcatctggcaaagaaagagttaccgtccacaaatgcataaaggaatcttgcacgatatcttctgctacatccgcattcatcgtataagctaaagcaaaccggaacaacctaggactcatctcccgaaatatctgttcaaaaacttcattcaagttgtgctttaattctttaactaaattttcatccgccatatcattatcgttagaataaatatttttcaaaaataataaaattcttggcaatgcaccaatcgggaaatattaacaaaccctgagaaataaaatccttctattcttccccctacagccaacagcaaaatctgtaattttggtatgtatctctgtaatttatacaaacaaaacagagaaagcaatataattttgtaactaaaaattatgaatacaacatactagaacaataattataaaaaatcatattatggcaaaaaggattttaattctctcttctagtccccggaaaggtggaaactccaccagtcatcggccgcaagaaaggagaacgtgatgcacctgcacgttgccagaagtcggttcttcaaaaaaggagacactatcaggattgccaccgactacgacaacgaggtgttctatgacgggcaaaggacgctgaatctgaacagggaataacaatgccattgatgcagacacgtcaatggcattgtttttttgtcaggacaaaagccatttccagatcggaattatttcgacggtgtttccgtcaatctccaattcccgttcctcatcccttgttattaccatgagttttttacaggaaataaccgacggcagcttcaacaaagccttgatctccctgtcaaaagtctcggtatcagtaagagaataacagacttggatagccagttcctcttccgggatgtaaaaatccacctctacaccgtggttgtaaaaataaacggtatcttctctgccatatttacgcagcagattgacggcaaccatgttttccaataaagcggtctccgggtcaagaaggaaaatattcaatattccattgtctgtaaaatagtatttaggattggtctccttatctaccagtttaccggcgatattttgaaccgcggtaaccagccacgtgtcttttgcatatcccgtgtaagttattaccgttgatttggaaacttttataccggtagacgatacaatattcgccaatcgggtaaatgatatcggctgttttacactttcagcaatctttttaaacagcactttaagcgcaaaagtgttttcaacggcatggcgggtggcaatatcccccagatatatcttctggtatacatttgacagatagtcccgcttcgaactcagttctgccccttccgggaatcccccgtgatgaaaatagtcatcaaaagccctcaatacttccgagcgctgttgggttgcatataaagcggtgaaagtaagacggatcccttttacattgagaaattccttgaaatcatatggaaaaacattcacttcaatgtaacgtccgccaagtgtcgagcggatctcgttactaagcatcctggcattgcttccggttgtgtagacatggtatttggagtctgccaaccaacgggcgaacttgtcccagccttcaatgttctagatttcgtcaaggaacaatatgggacgtttgccatacatctccatgtgcacttccaataaaagattaaggtcttcggcagccatcgtccctaaccgctcatcctcgaagttgatatatagaatttcatcccaacctgttccggaaaaaagaagctgctgggtacgctgatacagcaaatatgatttacctgcccttcgtattccaacgaatacatagtttccaaactcctcaaattcaaatttacggggtatgacatcgtgtcttggaatttccacctgattatcagccaatactgattttaaaatctctttattcatatattgtctttccggttgaacaaaagtaacctatttttgtttaaccgacaagacaatatgtctttttctttgggtaaaattgaccttccatgattttgttactctatttttattggaccaaatcatagagactcaatctttatctttacaagaaaaagtggaatacttattgttaaaaggaaaagcctatttctcatatcgaaattattgaatattcaagattatacttatacattttttggaaagataatactttggttgggtgcagtcaatcgcattttatagataattaaaaatctgtatagactttcattttccctaattgttgctcatcacgcattcggcacagttccttgtgtgccttttccttgtaggcttgcgggggagagagttttgtcctcctctctcctttgtatttacaagtcttttcacgctattccctgactggacgtactgaaaatccgccagcccgtccgaaaaccgccggtggagcatttcccgaacgccccccgggaggcgaaacgacattgttgcgtaaacaaagcaccggagctgcattgtgattccctgctgttgctgtccaataataactgcgagttgttattatttgcccatttttattgctcctgccgagtgagtttgggaaaaagagggtccctcctgtaatatcccaattcccggaagctttcatcggtttacaataaaagtaaccaccctgattatttgcaaatagggttataaatctatcaccatttatattcctgtctgtactttgatcattcccatcaattgtagttgcagagaagactcctgatgcaggcaggcaaaaaccacttggcgaagggtcataaatggttttactaaccgatgcatcaatacctatgttgctgggagtcctgcatccccaaagatcaacgtttgtctctgaagtccaattctgattaacataggaattaggatgcggatcgaagtaaaacacatgtggattcataatacctgtagatatagtgacctgacctttttgaacttcaaacttgtagttaccataacaaggtttattggccacagaggaagttcctgtaacaattctgccgggcatcgggtctttacgtccgaactggaaataaggattattgccgctttgtttgacgatatgttcttcctggacaaatggcacaatctttgtcatcccagtcacagcctgtgtgaagcgcaccagcacctttcgtccggcataagttgtggtctcgccgtcacaccagccgatgttcaccggcatcatggaatatcctttgttatttttactatacatggtccggatatcttcaccgagtctgtaatccgtaacccagatatgccagctccacatgatttttccatcccccttcactgccacaacggcattgccttgcctgattgtcgatccatccactttgaactccaacctcttcttgtcagacaaaagccggacctctgtcaccaaattctcctcgtcctgccagagcaggattgcatcggtaggattacattgagaattattatagatatatggattagaaatctgtttattgaggtgattcttgaaatgctgcttattataagcaggggtattgaaatccccgttcttgattccattgccgtaaaccaacgggagtgaatagatgcccggagcatttaccagataacaatttgccgtattctccaccgcctcttctccactgctgttggagaggttatagggtgtttttcccgtttgaacattgatgtcttctgctatctgtaacttactgttgtgcgggttttcagttacgccctgctgggcttcggccgttgccctatgctgcgatacaccaccattgccgctcccggtgaagcccgtgaaccaggaggggcgggcaattgcatgataacctccctcgccgtcctcctctacaaactcagccgaccatttcatctcgactttctgcgaagaaccgtccccaccggaaacggtagcaaaactacgaaccgtataatttacatttcccccttcgtgggtaaaattaccggaagatgttacggaaaattccgggaccacagatatactcgtcgtggaaatccggtaggtgattgttttacccatcggccagcttttcccggcaatagaggttctcagggtgcgtgacgtcgatgagagcccgtctgtatagacaatctcaatagaagctccggagggaagttgctggggaatcatcataaaagtagccgccccggtcgtgatctcctcgccgggctgcccgctcacttctttgtcgggggtctgggaaaagctcttcacgctgccgaaatcccgccaggaggtaccgcccaccgggtaaacagctttcccgtacacgttttttagcgtgattttcgtgatacgcccggccagcatgtcatcacccgtgacaaaccgcacggcggtaagcacgtgtctgaaagtcaggggagctgtggacgaggtgttgccgggcatctcaccggaaacggccatcagcaggtctttttgatccgggacaccgtccgggaccgaacaggtgattgccggggttcccgccacgtctttccccgacaggacgatcccctcccaattgtaaggcgcgtaggcgaagaaacgcacgttgcgcccgcccccgggccaatgatatgacgttgtccaggaagaggctttcgtgaccccgacattgtacatgtaatccggaaaacatgaactctcatcccatgcaccggaatacacggaggccagcacaccgaacgcatcgtagaagcccgcaccatcgacaggcgcggcccgggtcagcacccgcccttctccggcacggtcgctcccggacaggaaagcatgcaggtaaagctccctcccgccatcctccgtctgcaagggtagtacccccagaagagaatccaccacaaccatgtctgtaccctcccgttc

SEQ ID NO: 145 - DNA, 9441 bp, Butyricimonas faecihominis
ggatatattaattaaaaacaacatcaaatgcggataatatatagcattctgctattgacatttatctccgggcatttgttcgcacagcgatccgagaccgtgcagacaaatgactctacattcagtgtcatcaaacaattaaaagaagtcgtcatcacggctgaaaaaagggaattatccattagcgagattcctgttgctctcagcgtgattagtgggaaaaacttgttgaacgagaataatccggatcttcggaacctgtcaggaatcgttccgaatttttacatgcaggaaggaggcttgaaactatcaacaccgctctatgttcgcggaattggaacggtatccgggaccccacccgtcggtttgtacgtggatggtgtcccgatctttgacaaaaatgccttcatatttgatttgtatgacatcaagcaaatagaagtactgcgaggtcctcagacaaccctgtacggtcggaatagtatcatcggtttgattaatatccgaacaaatcctcctgcgacaaagttttcgttgcaggcaaaagcaggagtttccagctataactcccagaattacatggttatggctaatttgcctataaacaaagttctatataacaaattatcttttgcttataatcgcacggacgggtatttcaagaatgattttactggtgggaaatcgaacaaatcggattcatacgatcttcgttaccaaggaagcgtgttcacggatgcaacatggaaggtcgcgtttggtctgaactataatcatagttttgatgatggctacgcttatcatgccgttgattctttaaaagtacaccgctaccgggtcaattataatgcggatgcatcctataaacgggatttattgtccacgtacattgacattcagaaacatttttctcaaaccctgttgaactggatcacttcctattcccgggctaaagataaacaggttttggatgctgatttcacgtatcatgatgtattccaaaatggtaagaaatcgaaacaggatctgatcacgcaagagatcaattaccagtcctcccaaggcgagagaatcgattggacaataggaacatttggtttttacaaagacttggcgaatgactatttggccacttttggctcggaacgtcacttgttgctcccactggatctggatcaagcatcgtactacaataacacctctacttggggaattgccggatacgggcaagttaccgtgaaaaatctcttgccggggatgttcgtcactgccggaatcaggtatgattacgagaaagcgtctctctcctaccgggatagtttgttatttcacggggcaagccagttcaccggttatcatgattgggacgaaaaacattcttacgcggcttggttgcccaaattctccattctacaaaaatggaacgagcagttatccacctacttgaacatatctaaaggatataaagccggtgggtacaatatcatttcgaatgaaatgaccacgcaggttgtagaactggaatatggtaaagaatctttgtggaattacgaacttggagctaaatactttagtgccaacggacggtttaacatgaatggggcgcttttttatattgattggaaagaccagcaaatttttgtcatggagatgatggggccgattattaaaaatgcgggagacgcccgcagtattggagcggaaattgatttaagctgggaatgtctgccacgattggtttatttcctttcctcaggatatagtaattcggaatgctaccaccacttaaccaaggaatacgaggggaataaaattgtcatggccccggaattcacgatgaacacaggggtagcgtactccaaagcaatcaagttctcattattcaaatctttcacagcaaccacgtctgttaccggtttcgggacccaatattttgatgaggcgaacaccatgaaacaagatccttatttcctttggaacatggatttgggcatttccggtaaacacatcgatttccacgtgtggggtaagaacattttggataaaagtttcttttgctacatgttcaacagccccgtgggcaagaatttaccagaatacatgaaatccgggcaatctggggctccctctcgattcggggcatctataacaataaaactataaacacattttaaatttatctagatatgaaaaacaaattaatttacttgatctctgtactatttgtggcagttgcatgtttctcttgtagcgatgatgatgatgataataacgataaagaccttatcgggacttggaattatacaaaaaagacaagtgatattcattttaaatttgagtataatggcgatgagatcagttttcccgaaggattgattccatcaggggttatcccagaaggaataccgggaattagcgaaacagggattaatgttgccataattaaaatggcgttgccgggaattgcgaataaatacatgtctctatatttccgaggaatcaattttacatctgaaaccgaaatggaaatatttatgaccatgaatgatcagcctgcaactttaaagacgacttacactattcaaaaagatattataaaggtcagtacacaaagtgatggttttaaagaattgttaggtacaattcccgtgaaatctattgatttgaattacaaaattgtaaataatgaattgacggtatatttaggtacatcttacgtgaaaactcttcttgcagcagttccgcttattttaagcagcgcagaattaccggctgagcaacaggcaatgattaaaacttttgttgaaactttttcatctaacctaaaaacatttgaattcggagctaaattaagcaaatagagttttctatatacgtagaacaaatacgggtagttatcattttcactacccgttttatttttttcatagaaagcagtaactttattcatattttatcgtatccttagtatagaatttgtaaatttaaaagcagtttaatttaaaacataaggatatgaaaacagaagagtacaaagaattggatgtgttgatgtcatcagaggttataaatacaaaaggtgaggataacaaatttaaattaccccctctaccctataaagaaaatgcgttagaaccttatatcagcgaacgtactatccaatatcactacggaaaacatctcgcaacttatattacaaacctgaataatttaatcgtgggtaccgaattcgaaaaaatgtgtttagaaggtatcgtgatcaaatccgaaggtggtattttcaataatgcagcacaaacatataatcatattttctatttcgagactttccaagctcatcatgcagcacaagtcgctccgacaggaaaaataaaggaattgattgataaatcatttggaagtttcgatgccttcaaggaagcgtttgctaaagcagccaccaccttatttggttcaggatgggcctggttggttgtggacaaaaaggggaaactggaaatcgtacaaaccggtaatgcagatactccactgaaacatggaaagaaacccgtgttgacaattgatgtctgggaacacgcttactatttggacacccaaaacgctcgtccgaaatacattgaaaattattggaacattataaactgggacgttgtaaacaaacgcttaggataaaagaaaatcgggagttttactcccgattttttattacttaatgaatgattaccatctcgtcaatcaatctttgcgctcctgcatatttatcaatgataaacaggacatagcgaatatcaacagcaatattccgacaaatctctgggctatattgcatatctgacatcacaccttcccaagcacggtcaaagtttaaaccgatcaaattaccttctgcatccagaaccggactaccggaattaccgccagtcgtgtgattcgtcgcgataaagcaaacaggaacttccccgtcttgagtgtaagggccgaaatcccgattcttgtacaaatcccgtaatttctggggtacatcataatcatagatatttggattatccttttccatgatacctttcaatgtcgtgtagtgcgtgtaataaacagcgtcagttgcatggtatccggcaacttttccatatgctacacgtaaggttgaattcgcatccggatagaatgttttatcgggctgcatctccatcaatccggcaatccacaaccgattcaataatttcaattcattttcaatccggctcaattcgggacgaattttatccgcgtacaacgtgtaaattccggtcgctactccaagaatcggatctttttcaattttcgtgattgatttctctgataaattgtcgatgaatttcagcaaattatccttatgcgtgaatattgattttttaaacaagtcggcagcataacgatcgggagcgttcagtttagcatatttcgggctcaaacgaacgactgacggtatccattggtctccgacttcctcattattatacaacttgaacatttcggtcaatatccgttgatccgtggtcacatcgtaatctttatagaaggcctcaacgtaatttttcaaagatgttttaagctgttccttatccggaaatttgtcatagttatccaatacctgttctatttcacgggcaaattttatgatttctgcacctcccaatccggcctccgaagcataagctgcagccagaacatattctttacgagcgtcatataacgctttgtaacgatccgtcaaaccgatatactcggtttttccattacttttagcccagttgttgaaattattttcaagaactcttttattatcagccgttctgaaacgatccaatcctttaatctctccctgccattttttccaagcattagcaacacttgcagctttagcagcatattttatacgcaacaattcatccgactccatggcggcattgattaccgccaattttgctgtgcggattttgatcttatgcgggtcttcaacagaagcaatttgatctatcgcgtaagaagtcaggtactcgtttgtcgttccgggataaccgaaaaccatagtaaaatcaccttcttgcaccccccgtgcagaaatcttaaagaatttagccggtttataaggcacgttcttatctgatatagctgccggctcattgtccggtcccgcataaatacgcaaaacggaaaaatcacccgtgtgacgcggccatgtccagttatccgtatcccctccaaatttaccgatagcagaattcggagccccgactaaacgaacatcccggaagattttaaacacggaaagaaaatattgatttccgttaaaatacggctttatattagccgccagattggttcctttaacagcttccgcctccaatatccggcatatttcattcaccttcttcgtacgttcgctttcagacatcccggcattcaatcctgcattgattttatccgtgacatcctccatccgaactaaaatagaagctgttatcttgggattaaccaactcatccgccatggattgagcccaaaaaccatcccgtagatagttatgttccaaactggaatgagcttggatcatgccaaaagagcagtgatgattcgtaatcaccaatccttgatcactcacgatctccccggtacaaaagtgatgaaacggagaaccttcattacccagcccgataacggcatctttcaatgaggcttggttgatgtcgtaaatatcctccgctgttaatttaaaaccggctttctgcatatcttctatgttgtattttttcaacaacatgggaatccacattccctcgtcagctaaacttggtaaagtcagcagaatgaaagccaaaaaacataatgtaatttttctcatttactggtatttttgaatgttatttattgaaattgtaatttccgcaaagtttcatataatttctgtatcggtaatcccatcacgttatagaaagaaccttctatacgctcgatcccgatgtacccgatccactcctgaatcccgtaagctcccgctttatcgaatggcttatacgtgtccacgtagaattcaatctcttcatttgataaacgcttgaaaaacacgtctgtccgtgaagagaaagaaagttgttccgtacgagtggttacgctcacacccgttaccactaggtgacgatttcctgatagctcctgtaacatcgaaatagcctctttccggtcagcgggtttacctaaaatccggtcatgaatacaaactaccgtatcggctgttatcaatacttcatcagcctttagctcctctcgaaaggctgaggcctttactttcgataaatattccggtacattctcccaatggagttcttgaggatatttttcttcaacatttttcaaccagacttcgaaggtaaacccagcatctttcatcaattgctgtctccgtggtgatgcggaggccaatattaatttataatttttaatagaatgcatcattcacacaacttacaaaatacactgactcctatgcacaaaaccataatcaaacgaatcattcgcaactggaatttcatcttgtcattcttcaataccgcgtagccgtaaaacaagtatggtataatcaaagctacaacaaaataaatccatacgatcagggttcgtgtaaatccgaataacaaaaataggatcaacgatgtgatggcaatcgtgatcaacccgatgatcacctttctcgttgccggaataccaaattttacaggtaaagtaacgattccatcagcccggtcgccatttatactatatatgtccttgttgatctcgtagatcagcatattaataaaaagaaaatacgagaaacatactgtccagtagaacacgtaggcaaaactaacgtgcgttttcaaaacgacatccgagtacacatcactcaataacgggatttcgaatgtaatcacggtaagcgggattaatccggccaagatagccacaacgatatttccccaaataaaacgtttttttatccgggaggaataaaaccacaataccaatgatataattaaaaataagaatacgatctcagcatgatgagcttctctcgccagataatacgcgattcccacggccacaacattcaaaatagaatgtagaatgattgcagccctgcggctaatggttttcccaacaatcacgggtctgtttcccgaaatacggtccgccttcgtgtcaaaataatcatttatgacataagcggccgacaccagacaacacacggctattaccagtaacgagaaattgctttccggcatttgcagggcaaaaccagctttctccagcacgggctggacaacaaagaaacgcatggcatacatggtaaatgccgtgaatgcgatcgttcgtaggcgtattaacttgagaatttccaacatcttattctttaacttacatacatttcacgtagcattgggtatccatccattcgccttttgctttcagtacttgagccacgacatcccgtacgcatccaaggcccccgggcgtgtcagaaatataacgggaaatggctttgatctcttcgcacgcatccgaaggacataccggcatacccacgattttcatcacgttgtagtctggtatatcatctcccatatacatcacattttccgggttcagattatatttttgcaagaactcgttcaacgcttcaactttattcgccacgccaagatacacgtccttcacacccaatttctcaaaacgttctcttaccccgggagcctgccccccggaaatgatacaaaccgggtatcccttcttcgtgcagtacatcatggcataaccatctttcgtacaggatgtacgaatcaagtctccttccggtgttatattcatttcatgacgtgaaaaaactccatctacatcgaaagcaaaagcttctaccttctttaattcctctttgaataatttcatagcgttcgtatttatctaatttaccacaatgtgggcatatctattatatcttgcgagatcttttgatcccccgtctcttctttatcttgcgtttcctttattccttccgacaatatcgtgtatattttcagcaaatctttgtcattcttcaacatattcttatgcatattcatgatactctcgtccccccgcttggccggtccggtttgagcctcttccggattaaggagcatcactttatgtgccgtctcgaaaatcaaaggacgtaacatagcaaaagatagtcctttgttttctagcaatttgcctgccacttgatacaaataattagggaaattacaggcaaaaactgcagccagatgcaattctttacgctggaccgagtctatctcgtatattttatccgacaacttttccgcaaactttttaattcgttccttcacgggccccgtgtttccctccacacatagcgggatctccctgaaatccagttcccgtttcttagaaaaggtttgtaccggataaatcaccccgtagtgttgggaacatgatttgaatacatccatcggttgacttcctgaagtgtgtagaatcaacgcatcatctggtatcctaatagccttaataatagatggtaaaatatcatcacttacacaaaaaatataaatatctccatccggatacacctcatttacttcagccgtgtaagatattcccgtcttcattcccagttgccgggcagaatcaagcgtacgactataaatctgacataaattctctcccgcttttaaaagggctcccgccagatgatgagcgacattcccagccccgatcaatatgattttatcttgttgttccatgtattagtaagcaatatttttaggagataataccccgtttttaatagcttctaaaagacgttcactcgccttgtgaatgtcttcattgaaaacttcggaaattaaaactaatttgccatcgattatttgtaaatgtttatatccgttcttattgtccgcttgattcaataatatcaaatcattcccgggaatgaacgtgtgagtcatttggttgcgaagtttatcatacaaaaaaccattatcatttaacaaccgataacgcccgccgaataacttctttaccccaagagaaaaacgtttggccgactgccctttggctttcatgggtttattatctaaaaaacttcccagaacctcaatcgcttgccccatgatgacaaattgcatatatgacaagcccacgccctgcaacttagtaatttcatccacaatcacttcacgtatgaaatgctctatccgttctatttgctcttgtgtttccatatatcagccaaaaatagcgcaaattatcgaaagtaacaagtcccattttctctctctaaaatttctgaacatttccggttatataatcgttttaaagcataaattcgcgacacataaaaggagataaattatgatg

SEQ ID NO: 146 - DNA, 9297 bp, Butyricimonas faecihominis
ttcctaaacctttgtgttccttcttcaaaataggagctttatcccattgcggttcaaactcgtaagtccgcatgataccacatcctttctcgtcagcaccatcaatcgtggttcccactaccagatgttcactacgcatatcctcccaaactttatattgacggaatgccgagaatggattaaatttcaacacttttatagtttctcccgggaaatgacaaatctctttcaccggagtacttgggtttttcatgtcaaactcatatatcctgtccttcgtcgcgtaaaataacgttccgtataacggatgacaagcaaaaagagtcgcttgatccacatcggttccggataactttccatagtatcgctgtgtgtttacaccttccgtccctaaaacaatcccgtaataataataatctccggcacgatctttcaacacgacataggtcagtccatcatttaccgtggattgcataagaaccatttcctttccctcttgctccgccgggaaaaggatctcatccccagaaaatttcatgacagagggaattcctccggattttgccttcacctcgatgaaacgcccagcctcatcatacaacatggttgaagtacctcctaaagtataggaaccgccacctcgccgataacggcaagcattcgccacgaaaggcgcagccttgaatttcataccattaatttcattaatcggaaattcaaacaatcctccgtttacagacacgttattacagtacacatcaccattctcatcaataacaatccaatacagataatcaataaactcatatttcccgttatattgataataatcgtataatgaaaccccggatgcctgcacgtgcatgtgattcggctgatcaccaaaattccatttgatattattatcttccccagcgtgcatatccgtttggtccaagcgataagttccattttcgcaggtaaacaaatagatatttcctcccgcaccggaaaaattactcataagctttaccggttttcccgttaccaaatcactttccgaccaaatatccctagaaataatatccgtattcgcatccacgttcacgatcatatccatacgagattggccatcctgttcacaaagcaccatccacccctcgctcgttaagctactcacctgcaaataaaacttttgataccagcttaccttggtcgctttatcttcaacccgataaaaacaagtataggaatccgcctttaacgtgataggtaactccaaatcctttgttgtagccaccacgaaatcaagcgtatccgcccctttatctttatccgcattctgcggaatgaacttccattcataagtatattctccttcagcacccgtcagacttttcacttccggataaatcctcagggtatccacgtgagagatttttcgatacgcatttcccgtttcaatccctgtaattgataatttatttatatcctgataattgtaattgcccttatcatccgcacaagaacaaataaatcctatcacgatgaataataaaccgaatattgtatatttcataattctcattttatacttcataaaacaattaaattaatcttgggaatccggtcccatttccatccattctccatcctcatccttcgtcggattttcctgcaaccaacgatacatgtattttcccacgtaggacaaataaccctgcgtgaaagtaccttctcccaaaacacctaaccaaacttcccgatctatattcatcacatcacaaattaacccggcttttgtttgactccaatctccgaatcgtttttgcccctcacgagtccaccaacccggacgaggaaaattttcattcatgaaaaccactcgttgataatccacgtccaaagaagtaagggagtctatccgactacgacgcgtgtacatgaaatgtaattccggtgtttcattcaacttcaccgtaaaacgcctactacgctgtttcaacgtctcccgacgctttagcacgatatttatatccgcgtaggctccattagcgggaatcgtatattccttatcaaacggctcgaaatcaacaccctcttcagctgccaacgtatctgtttgatcagaaatcacatccacggtaaacttcctgtcataatccgccaccgtaccgacgagcataacacgcaatttcaaattacgggttaccacgtccccggctttcattccccaagacaccacaaccgtgtcgttcaacttgccttccatgtcaaaataaataccactttccccctcgtaactatccacatctttttcacaagcataaaagaaagccgtgaagaataatattatatagcatatctgtttcataatctctcctttcttcttaattatatttcgtttcgccatcaggtatcggcagaacataattactcaatttcacggatgtttcattatacgcgtttgtcgccgaatgcatctcttccgccatcgtccgtttgtaataatagaataattgtccttccccgataaactccctccaccattcatcaagcaaataactcgggtaagaggaagtcgaaacaccggaaagcccccgattttcccttaaagcattaaaataaggagcccccttacttttctgtccctgttcataatatatctcagaaaccatcaaataaagttcgctaactcgtataaggggcatcatctgcgaataaatagaatctccaaccgcagattcaaacttgttaaacaaacgataatccaccccactcacggttgccttatttttcatgaaacttaatactcttatatccgattcctccgcattatcgaatctatacttggctacatcattacgtattcccagcaatgaagaaatcttcaaggattctccattaaaaagcgaattatacaatcctccgacatttcgattctgcgaggcaaacaaaacttcagatgaaaataccctgtccggctccgttcccgccacggcttcatttctagttacccacgggaaaatacgttcatgaacatcaatcacattttgggcatatactaaagcactatccaattccccgatatacatataagcccgggacaacaatccttggacagcatagtaattcaaacgcaagttccgcttggacttaaatttgtccgaaggatctccggctactccattcgtgataatcggatctgttgacaataaatctttcgccgcccgtaaatcaacgatcacgtttttcatgaattcagtaccaatcagcgtaggttgtacatccaaggcaaattccttgtaataaggaattgattctaacgtggaatctaccccataaactggcccgaacaaacgaaataaatcaaaatgtaaaaaacctctcaacgccaaagcctcaccttttatcatctggtaataatcatccggtagcacttcccgccgctcgtcacaattctttatgatcaagttcgtattggcgatcaagttataggctctttcccaaattttttctacccgattcaaggtgtaagatccggcaaaatcatacgtcatgaaagctgaccactccttgttttcctgatttatattataacgctgtgctaagatttcaagcatttcacacgtgagggtctgtccgtacagctcggtagcatttaaatcaacatacacgccattcaacgcttgtttgaatcccgcaatcgtggaaaatgcagattcctctgccacccggtcactcggttgaacattcaaccaatccgaacaaccgaacaaacaagttaccactaacaaataaatatatcttttcatacctctatcccattaaaaattaatcgataacgcgaacgaaaaactccgggcaaacgggtaatcaataccacgctcatcctcgatcgtcgagaaccgacaaatatcattcatataagcacttaccgtcatccctgaaaaatgaatcttctgcatccattccgggctaaactcgtatgccacccggacagactcaagggtcaagtaattatttttctgtacaaatcgggaagaaatcggagtattttcagtcaacgaaattcccttatactttgctccatttcccggttctttccaacgatcatacaaggctcgcttgtcctgattttgcttcaaactttccttggagatgttttccactttgctgtataccgtccggttgaacgcatccgcaccgaagctataacgccaataaaaattacaagaaaaacctttatagtaaaaagaattccctaacactccttccaagtccggttcggaatttcccacgacaacctcatcagcatagtcataagtgaatgttattctacctttctctgtaaggaataattctttccccgttgcaggatcaattcctaacgaacgaacagaccataaatcagaaggacttcctccatcataataacgagccaaactattggaacgattttctttattatactgatccaagtttttaccgatcttgtcataataggaatgaccatgacggaaagtaaaactcgttgtccagttgatgcgttctttcgggcgataaataaatgcgtatttaatcgtcccgttatatcccttacttacttgtttacccacgttagccagtcgttgagaaacacccacggataaagggatcccgattgacgccatcaacggatcggtcactttgtaataataatcgaagttcacgtgaaaacgattattaaacatactcacatcaaaaccgatatttttatcgatggtcttctgccattctaaatccggatccccgaatgcatcaaccaatagtccggttccaaagtcattcaacaaccagttattaaatttgtaagtcgtgattgtcttgtaagaaccaaaattctggtttcccgggttaccgattgaagccctcaactttagcatcgagaaaaaatccgtgttattcttgatgaaaccctcattatgcaagttccaagccaacccgatagcccaagtcgtcgtgaattgcttgttggaaccaaacacggacgaaccgtctgcacggaagttcacgtccaacagataacggttatcgtaagaatatcccccgttaaaatagaaatttgctgttcttttcttagaatcggaataagaaggttttccgttggcagcataaccactcgcaaaagatggcttcgtgaagtttccttccgggaagcccgccgcagaaaatgacttgtaatcactattggattcactacaggaagctccaaacacggcattgatctgatgtacgtcggcaagtaattgaccataagttatcgtgaaatcaccttcatacgacaaactctctctacgcatatccgtgtaagatccctttaaagactccacgctatcatcaaactttgtatcctcgggggaacggaaagtttcatcatccgtagtagatttcgttatcccgaaacgagcccgaacatacaagaaattccacggacgatattccatctggaaattatcccgaatacttatcgtatttcccttgtcataactattcaaagatgcattccacaaaggattgggaaccgaaactccaagttcttcgttattttccaaccacttgtcaatccccccatcctcgttatacttggtataatacgggttagcacgtgaatactcgctgaaaggtacaatggggtcgttcgtcttcgtgtaatcgacagtcaatttattactataactcaacttacctttccgatataacaaatccagatttccactcatcacctgacgacgggattcctgcattaccccctgaatgttcgtgtagtttatccctaaaccgtaacgcatctgcgagtcaccaccttccacgtaaacattatgacgttgagttaatcccgtccgcaacggctctgacatccaatacgtgttcacaccccgattcacattatataacaagttattataacgtatcttgttggcttcctcgaaagcgatcaaattcgacttaaagttcccggctaataattcaaactccaacttctctgccgcattcattaaattataatccgtcaaatcggcaaaagatacctcaaaactaccattataggacaagcgcaaacgcccttgcacgggagctttcgtctccacgaccaccactccattagccgctttcgctccataaatagccgtagaagccgcatctttcaacaatgtcacggaagcaacacgatccaagctcaagtccatgatcgtttccaacgtcgtttcaaaaccgtccaaaataaacaaaggttgattcgggtcttcaccaaattcctctttcatccccacgatactcgtttttccccgtatctcaatatccggagtacggttagggtcagaaccgtattggttgttttccatgatattaaatgccgggtctagcgcttttaaactttgcaaaatattctgattacctatcattttcaactcttccgctttatacgtttgagaagaccccgtgaaactctcttttttacgggaataaataccggtaaccacaacttcctccatctcggtctggtcctcttctaatatcacgttaatctcttgtcgatcattgaccgccacctcctgttttttcatcccgataaaagagaacacgagtaccggattacccatcaaagggatggttatcgaataatgaccattcatatcggttaccacacctacactcgttccctttagtacaatagttactcccggtaaccccgtctcacttttatcaacaacctttccttttaccgtgattttttgcacattagtcgtttttgccgctactttacgtttgatgacaaccgtattctgttctatcgtgtattcaaatccggaattcttcaaacaaatgtccaaagcctcccgtaccgttttacccttgatctccacggagatcttgccagccttacccaagtcatctgcattatacacgaaaaccatcttggattgcttctcaatctcccaaagagcgtcctttatcgccacatttttcaacgataaattaagtagcggttcatccgccattccatacacgtgtcctccggacaacaccaaaacaatagccatctggaaagctaaaaacaaatttcttacatttgttactttccaacgagtacttctacgtttttttttcatacttttgatttgattaaattcgattttttaatgcctccagcaagaggtgttattaacgagcgaagaatagttgcatattcttcgctatttttttacgatgattttctttccaactacttcaaagcggacagtccccgtactctggaatagttccagcaaaggtgtcaccgtcacatgacgattaaaattacacccgaaaaggtaattcttcacgacctcatcttcatataccacatctacatcataccaacgagaaataaaatccatgatctcttttagaggacgatcccggaaacgaagacgcccttcccgccaagccgtgacatacgacacgtcaacatttgccaccgtaacctccccgctttctttgttatacacgacttgttcccccggatgcagggtatagccatccatattttctgaaagagttacttgtactttacccttgatcaatgtcgtctgtacatcttcattttcaggataattcgatacattaaactctgttcccaacaccgtgatattcaccccggatgcacttacaacaaaaggcatttcttcattacgtgccacttgaaaatacccttccccttccaattctactttcctcgtgattccgctaaattgcacagggaatcgtaattttgatccggcattcaaacataccaacgttccatccgcaagcgtcaacacgtattctcccccacggggaatcacaagctcgttatacaaatctgaactgactaccgaatctaccgcatttttataagtaatactctcgccatccaagccaataatcgttccatctaattctcgcaacgaatcccgatcatgattggctagatcaataatagaaccattcgccatgtaaaggatagcccgggaagttccgggaaggatctcggcactctccactggaataatttcttcccgatcaacacgctgcattaaaaaatacatggaagaaacaaccagtagaataaaaacacaagcatatttcaacgcacgaatccccaatcgcctcctattctccttgactcgtttacgagaaagagctttccatccaccctttacatcaatggatctcaactcctgacgtttccggtatataaattctttttcggtaacctcatgaaaccatttacgattatcttcggaaagactcaaccagttatccaaactctcccgttctgttccggtcaattctcctgtcatgtatttactaactagctcaacaatatcaaagaagtcatcatccattttatgctactattagattaaattcatagctagaacacaaaaaatggattttagggagtgtctgatattcggtatttaacgttaattaatatttaacgagatatgaataaaagaaaaggcaataaataataataatctttcaaactgattctcaactttttgtaggcttcttttttgtaggcgtgaacggttccctccgaaagattcattttttctgcaatctccgaattcttcaatccatctaaagaaagattaatcaccattcgcatctgtaagggcagtttatctatcgcatgattaaaaatacgatgtacctcctcttccatcacctgatttcgaaactcctgttcagaatcctcaatccactcctcggggatacgggaacgtaactcacgatcacgcaataaattaagacaggcatgacgtacaactacataaagaaaagactttatcttccggtaatcatcaaaatccgtgtgtttgttccagtattttaaaaacgtctcttgcaccacatccgcagcctcttctcgatcgcccaaataacgggttgcaaacaagcacaatgatgcataaaactcctcaaataacgtccgaaaagctcgttcgtcaccttcttgcaagtgcttcaacaataaactggtatcttcatttttcctctccatactttgcgacccacgggtgaacaaaagtacggctttataatcacaaaacaatataattatcctccaaaaaatataatatcaagcatatgcaccaaaagaaaaaatgcaagcaattgtttccacatcgacgtgtacccggacaaacagtgatttatccccgtgaaacggacattcaaataaaatttctatcagatagggttattatcctgttttcaaatagctataatcgacttttccaaatg

SEQ ID NO: 147 - DNA, 9274 bp, Butyricimonas faecihominis
catctaaagtaagtgtttcttataattagtacttattgttttgacgaaatcagaggatgttttaataaaaaagttccgggctggaaatggtgtgattttcaaggagatttttgatcgatactatctccccgtgaagtcgtacggtttccagtatatcgaggacgatgagattgttgaagatttcgtgcaagatgctttcctgaaggtgtgggagaaacgggcggacttttattttgttgcggcaattaaaagtttcctgtatatgagtgtcagaaatgcttgtttggattacctgcgtcaccaaaaagtgcaacgtcgcaatgagccggaattaatcctgtggctcacggaagagggagaggaagaatttattcttgaagaggaagttcatgcgatggtgtacgatgcgataaaggatttgtcggagcgatcccgtcgggtcgtgattctgacgatggagggtctttccaatcctgagattgcgaaagagttaggggtttccgtgaacacggtgaagacgattaaattgcgtgcttacagggtgttgcgggaacggttgaagggtattcagtggttgttattacttcttttgggcgtttaaagaatttttttttacaaagggtgtcaccctgtggggaggtgttcacgttttaggggaaatttttgaaaaatggagaaaattgatcctaggatagagcttgttatttatcgttttttacgtggggaaatctccgcgtctgaacgggagatgctcgaatcctggttacgtgaaggaaagcatagggaattgttcgagaaaatctgtgataaggagaatatgctggaaaagtcgttctattttgatcgactggataaagggagggagaaaacatggctccgtttggaacgggctaccgggttgcgtcgtcgtcttgtggtgcgtcgctgggcggtggcagcttcgttgatggttcctcttttgattggaataatgtacttgaatatgcggcaggtagaaccgggagtgccagagctacggcaggagcgaattgttccgggagtatcaacggcacagctttatttacctgatggcaaagtggtcgatttgggtaaagacagtatttgtgacttacagttgtttgaaggtggccggtttgtgaatgaacgagggacgttgacctacaaaagtgatagtgcagaaataagtgcggcccaatacagcgagatccggataccgagagggggagagtataaagtcgtgctgcccgacggaacggtggtatggttaaacgcggaatcgtctcttcgtttcccgaccgtgtttacagggaaggaacggaaagtgtatgcgaagggggagctttattttgacgtgaaacatgatgaggcgaaaccttttatcgtggaggtggagaaagactacgtggttcgggtactcggaaccgagtttaatctccgggcgtatggcaagtcttcccgagcgacaacgctggtgaaaggacgtgtacaggtgaaaggggcggataacacggtgctgttgaaaccgggtcaacaagcctttgaggctccgggtacaaatgatcttgaagtgcttgacgtggatgtggctccttacgtggcatggcatgagggaaaattccattttgttcatgtttccttgaaaaatatcatggaggaactatctcgctggtatgatgtgcaggttattttcgagaatccggcagtgatggacgagtgtttcacgatcgagatgcaacgatttgatgattttaataaagtattgagattaattgaacgaacaggtatggtgactatctccgtggatggccatacggtgactgtaaaatagaaaaacgggagatctggaccatcccccgttttaagtaaggtgcctgaggcacaatgtaaaattttaatgttacaaagttatgaaaaaaatcagaacgagtgggttttttaggcgagcccatgggaattttttgttgatgatgaggctgacaatgttgtgcctgttgatgacgtttgtctcgtttacggccacggcgctgggtcaacgaacgacgatcaaactggacaacgtggaattacaagttgcttttaacgaaattaaacagaaaatggggtacaccttcgtgtacaatgatcaagtggtgaagaacgtggggaagatttccgtgaatgttacgtcttctgatataaggcagattctggcgaaatgcttggaagggacatctcttgatttttatatcgaggataatatagttgtgatcaaggcgaagacggaacaatcggttcgcgagacggagaaaaagcccgtgaccgtgaaaggaaaagtggtggacgagaaaagacaagccctgccgggggttactgttttgataaagggtacgaccttgggggtaacaaccggggttgagggtgatttttcgatcgtggtcaccgacacgacgaatgccgaactggtgttctcgtttatcgggatggtatctcaaacaattccttataagagcatcccgaaaggagagtggaccattgttttgaaagatgacgtgcaggagatggatgaggtggtggttacgggtatctattctcgtaaaaaagagagttttacaggatcatcgacaacctatacggctaaggaattgaaaaccatcggtaacacgaacgtgttgcagagtctgaagacgatggacccttcttttgccatcatggagaacaatcagttcggatcggacccgaaccgcttgccggatattaatgtgcgaggtaagaccagcgtgatcggcttgacacaggagtacgagatagacccgaatcaacccttgttcattttggacgggttcgaaacaacgttacagacgattagtgatctgagcatggatcgggtgcagaacatcacggtcttgaaagatgcggcggccacggctatttatggttcgaaggcggctaacggggtggttgtggtcgagacgaaggctccggctccgggaacgttgaggttgtcatatagcgggaatatgaatctttcttttgccgatttgtcggattataacttgatgaattcgtccgaaaagttggagtttgagcgattggccggttattatggcgatttggatgagaatggagaagttgaatcggagagtaaacaacggttgtactaccagcgtttggcggaggttaccagaggggtagacacttactggatgagcgagcctttgcgttttgctgtttcccacagtcataatctttttgccgaaggtggagacgaccggatgcgttacggtttgggattcagttataataagacgcaaggtgtgatgaaaggttccgaccgggatgtgataaatggtaacgtgcagttgctatatcggtataaaacgttgtctttcaagaattacttgaacttggattacacgatgtcttcccgggagaaggtggctttctcgaaattctcccaatccaatccttaccaccggaaaaagaacgagttcggtgtggtggaacaggtgctggaacagtattgggattcggattctgattctccgacttacttgaaggatttaaatacatataacccgttgtttgatatgaatcaaggaagttttgacgagaccacttcttttggtttcaggaataatttcgagattgactggcaggtgatggacggtttgcgggcaaagggacgtttcagtatttcaaagtcatcggctcaaggcgaaatttttaaatcacccaagtcatcggattttgcggaagctgcatcaaccgaacgaggctcttatcgggaaacgagggaagagaatttaagttatgacggggattttaacgtgacgtatgccaagttgtttaatgaagtacacatggtgaatgccgtgggtggaattcgtttggcctctagtaaattgcaaaccagtggttacgagacgatcggttttatcgatgaccgttattcgaatccgtcgttttcaacgggttatcctagtggggcaaaaccttcttactccacgagcgagaaacgttccgttagttattacctgaatgcgggttatgcttatgacgatcggtacctgttggatgtaaatcttcgttcggacggttcttccgtgttcggtttgtcccagcaattcacaacgacatgggcggtcggaatcggatggaatgttcacaaggaaaggttttttcagaatcagaactggttgaattatttgaaactgcgcttctctgtcggtaatcccggtaaccagaattttgatgcctatatttccatgaatgtgtacaagtatgcgaccgatttcccgaatccttttggggttagtgcgattgtttcgacttggggaaataacaacttggactggcagaaaacgattgatcagaactatggtatcgacttggcttttctgaataatcatttgaagatcaccgtcgattatttctttaagaacaccgacccgttactggtttacgtccagaccccgacttccacgggaacctctaccgtacccatgaatctgggtaaacaggtttctcaaggggtgacggccacgttgaattatatgatcctgcaaagagagggcataagttggaactttaatttcaacgctcgtcatatcacgtatgaataccggaatatcgggaatgcactggataagtttaattcggataacagaagttctaatttagtaagatattatgacgggggaagtccttccgatttgtgggcagtacgttccgcgggaattgatccggcctcaggacgggagatcttcatcaagaaggatggcacgcaaacgttcgtgcatgactatgccgatgaggtagttgtcgggaactcggacccgaaggtcgagggagttatcggtacttctttctattacaagggatttacggcatctgtcaatttgcgctatcgcttgggaggccagatattcttgtccacgttgtataataaggtggagaatatttcgcagaatgccttgcaatacaatcaggacaaacgggcgctatacgatcgttggcagaaaccgggagacgtgagcaagtataaggctatttcgttgacggaaaagaccccgatgtcttctcgtttcgttgccgacgaaaatacgctgagcggggaatccatctctttgggatatgaaactcaggctagatggttacatcatatcggggcctcatcgatgacgatccggggctatatgaatgatattttccgtatatccacggtgaagaatgaacgtggattggattacccgtttgctcgcacggtggcattttctctgggattaacgttttaatgacttaaaggcattagtttatgaatatgattagaaatataaaattaggactgattgcaagcgtgatgctgttattcgtgtcctgtaattcatggttggaagttgaccctgacgatagaataatggataattctttgttcaaagacagggaaggttttcttgcagctttgaatggcgtgtattcggaaatgaataccccgagtttgtacggggccaatttgtcaatgggaatgattgacgtgatggcacaatattataactgtaaattccaagagcataactactcggtttatgccaactattcgtacgcgcagaaggatttcaagagtaccttggataaggtttggtccgggttgtactcgatgatcgcgaattgcaacgcgattcttgaacattgcggggaagggaacgctgttttgccggatcaatattatcgtctgatcaagggggaagctcttggactgcgggccatgatgcaccttgatttgttacgtatgttcggacctatttacacggaggagaataaaggagtgaaatgtattccttacatgacccgggcggaccgggtggtgcagcctttgttatcggctgatagcgtgatgtattacattatcaaggatctggaatcggcatcttctttactttcaacggtggatccggtgatcacggacggaccgagaaattatgatccggggatgaattccagtgatttgtattatagacaataccggatgaactactttgccgtgaacgctctgatggcgagggcttatttatggatgggaaacacgcagagggctggagaatgcgcccggaccgtgatcgagaaggtgagtaacgaggataaacctttattcccgttggttgatgccgactacatggcgaagaatttgccggacggggtgttctccccggaggtgctgttctcgctctataatacttctcgcgagagtaaggtatataaggagttctttgatcccactttgtccgtggttaaaatattgaccatgaccgggaatctcacgtcggggcgggtaaatacgacatacgacgataaggatgattatcgctaccggatgtgggcatctactatatccaatagtaaggaggtaacttatttgaataaatatatcgacgaaacggaggcagattcggcgtatcattatcgctatatgatcccgttagtgcgtgtcagcgagttatacctgatcgcggcggagtgtgagacggatgttccgacggctcttgagaagtattttaatccgttacgtttttcccgaaattgcgtgaatcagagcgcatccactgcagaagagatgaagagtttgattcgggctgaatacgtgagagaatttgtaggagaaggtcagctattcttctattacaaacggaacgggttgcagacgatccctgacggggcaacagcgagtggcacgatgaacgtgcaattaacagattacgtgttcccgttgccggacagcgaaacgagccaacgggcagagtcacaggataatgtttcacaagaataagttatggctatgaaaaagatattatatatgatcgctctcgtctggatggctttttgcgtggcgagttgtgaaaaagaggttaaagactatgacgggcaggaaggcgtttatttttacgtgcaatacggtgcggcacacggtgatactacgatttgggccagccattcttctaccccggtggcatttgcgaatgtttcgggtgattattacgatgttaaattgcgggtgatgaccaccgggaggataaaggattacgataggactttccgggtagttgtggacaaagattcaactaccgccgtggaaggtgtaaattacgagccttttgacgagttccaagtggtgaaggcaggagttcattatgccgatgtgatggttcgtttgaaacgggatgtgagtatccaaacggaagaacgtgtgttggggttgaagttggaacctactgatgattttggaattggaattaaccaatgggggaaacttgatggtttgtggtccagcgacgggggcaatgattttgatgcgtccatgcataaggttaccatgaatgattttcttgtacgtccggctcgttggattccggcaaaagattacgctgtaggagaggcagaaggaggtttatggggagctttcacgagaaagaagtatgagttgatgtgtgagaaatttaatttgacttatgaagatttcgaatcggaggctacgatgcctaatgcgaagcggacgatgataaaggattatttcgtgaattatttgcaggatctttacgacaagggaactcccgtgctggaggatgacggacgtgccatgtggttcatgggggtatcgtggaaaacggtcgtgggacaaccttggattccggaacaataatggttgaacaatgtaaatctgataattatgaaacgaaatatagtattctttttaacaagcgtgttcatctgtttgtcggtggcctgttatgatgacaaggggtcttacgactacaaggacgtgaacgaggttgaggtggatggcctagggacatcgtataacctgatattcaaaaaggacacgttgaaaattacaccggaactaaagttcacgcaggatagtttgaatttggatcgttatggttacgagtggatcgtggtatcgggaatttcgggttccgaagagacccgtgaggtgatcggtacggaacgcaacttgaaatacttcgtggagttggagccaggaacttataccctgtatttgaaagtgagggataagcagaccggattgttatggatgaactacacctcgctcacagttcggacagaagtcggattggggtggttattgattggtgaagatgccgaaggatatgtaaatgtcgatatgattgccatgccgaatgatacgatcgtgataaataatttgctgtcaaataacggattgcctaggctgaaaggtccgaaaagtatcatgtacacgggaagtccatatgcgagttacttggctccttacgagaagttgtggattgccacggaagaccgttcttattacgtgaatgcatcaacctttgagggagagctgacgaatgttttcgaaatgatggtttactcgtatcttgatattccggagcaattgaatccggtacatttgctctcccaaagaacgggaggttcgatgaacacaagtagatcggtggcttgtgctgaaggtttcgtgtttaatatatcatcccttttgagtggtggtgactatgctaatcctttgaaccgtacggctgatgctccagaaaagttgtttaaggcttatccgtacatctttgcctctttagggtatgtttccgggggagtactttatgatacggacaatggccgtttcttgagattcacgtcttccggttcgacctcaacggcattgcttgataatagtggtgaggcgttcccgtggattcagccggaaggacggactttggtttacggggagaacacgatggacacggaaggtggtagccggggaaattcgttcacgttgatgaaggatgcgggaacgggcaagtacttcatctataagttctatgcttacggtagttctgcacaaaaacgtgcgggttacgaggtaaagagttcgcttgccacggatattgataaagctgaattttatgcttttgcatccaatcgttcgctccttttatatgtagtgggaaagaccctgtatgcttatgattataaagtaggctacgagaagttgtattccatggatttaccggatgaagtttcgatgatgaagtttgatgtgaaatcgggatatggagattataatgatctttatattgcaacttataacagtacgacgggaggaacgttacaaaaatatgtgctgggaaccgatcaaaataagtttgagttgaaaccggatgaaagatgttactggacagggttagtgaaagtgaaggacatggagtggaaaaatagtgcacaataaatatgaagataaatttaatat

SEQ ID NO: 148 - DNA, 9135 bp, Butyricimonas faecihominis
gtatcatcgtaattaatattatattcaaaaatcttaaactcgtcaccatccttcatgacaagcacgacatcgtaagtatttctcaagaacatcgcaacaagtgacattccttggcattctaaacaaacataatcatcaacataactatcttcatcccatagcaaaaaggatttgctattcgtgtcaaaggcgaacgtaaacatcggctctccggcgtaaaggggacttactatgttattagccaaataagcgtccggaaacatgcccattatttccccggtcaaatattgttgaaaaccgttttcaaaagtatccgatccgcaatccaattttacaattcgtccacctccggtaaaatacaacgtgtacatactacgaagcgtgaaaagagcctcaacccgttcctccggatagggtaacacatccaacagatccatcgtattatgttctactttcaccactctcaacggattctcggtggctatataaacacactccatacgttcattatacgctattcctttcggctctttccccaactccaccgacgggttatgcaagcgatatatatctttgataaaggaggcatcgtttgcaccgcgaaaagacatcatagaacgcccgtcataacggctcaacaacatgactcctttctcgtacggataaggaattttcaacgtaaactcatggaaaatagctccatcttcgttggatattttcaagcgacacgggaactccccatacccctcgcacgtgtaattcaaatctttcgcagttgacaccaccttataattcacttgccattcgtatgacaaagttttgtccctattttcctgttttgtctccggagcagtcaacacgaattgattattatgctcgcatgtatatgattcgttcagagatgtcacaaacgataatgttgacaatgcatttgtacccaatttcgattcgtcgtcaatgcaagaaacacacgtgcatatactcagtaacaaataaattaattttctcataattcactcatttattataaagattactactcgtaaggccacatgggatgaagaggcaataccaccccatcttccggattcttcataaaaaagtcatacatttccttgcataccagaataagttttgcctcttttgctgcgacatcaagtaaagtcacctctcctccccaaatctccatcaacttcagatactttttctggtggaatctcccgatatattgctcgaacacgccccaccaagaaggtcttccgagataattagtgaattttatttcaactcccagattctctttgatccctaaagcaaaatactcattcgcaaccagagtaaggcagatctgaaaggtcgtatccttctcggaagtaatattatcccgcagtaactccacgggtatgtaggtaacaattgaatcttttttaaactctatttcttccgggatagtggcatacaaatcggaacctgccgttgtcttttgcggatcgactttcacttttactttcattccctctttggcacccaaccccagtatgctaaccggaacgttcaccgtgtatcgggttaccgtcgcgggctctgtccccaacttacagagcatcgatgtttttggaaaataaacacgatacgcgttatcgtaatacccgtcatccccattttcatcacatcccgctattaaaattcccagtaagataaaaatctgatataatatactctttttcatatcgatcagtctttattagttccaccaaattccaattcttttttcggccaaggcaatacaaacatttcagacgaaggggtatatacctctccataatgatcccaagaatccgggtgtttaaaccctttattttcccgtttgtaagaaaagaaagtttgcccctctccccaaaattctttataacgctccgcgagaactaactccataaactcctcccgggaagttacctctgccgaagcataatcattcaatccccgactattccggacatcattaaaataacgcatagccttctctttatcctgatcatacgttgcctccgccaatatgtaatacatctccggcaagcggatcaggcaaactccctgcagggtgtgcgtgtcctcctctgtccccaataaacgaacaaagaagtaatctgaagatatctctcccacttttgcaaagaatgctttatagcgagcatcctcactcgtggcagaagacctcgatatatcgtaaacatcatctatatcatcccgaagcacaactacactcccccctatattctcgaaattcatatttttataagaatctgctatcattcttgtgtacagcccccaaatcatctcactactagctcgttccttaggttcatccccgcgggggaaacgcttcatctctttatttccatacgctcctctcgggaccaaatacaaatccggagcatcgattactttccctgcatagaatgcggcactatccaaatcccccttataatgaaacacccgcgcttttagtgcccaaacagcatatttattacaatgcgttccgcgagccactcgataatcagaaccggcattcgatgggttcatctcgttatcatttaccagacacgcctcagcctttgtcaggtctcccaaaatgttgtcataactctcttttaacgaaaaaacctccttgttcttcaaatcaaaatgataagcatatggaatacccccggcatccggatgcagaagaatattctcggcaaacaaacgcaatagatcaaaatgcaacatggcacgcaccccatatgcctctcctttaatcaacgcgtaatccggatcttccgccaaattaaccgtctcaatattctccaacacgttgttagcgtatgaaatacattgatatgcctctccccaaatactaccgattagcccctccaaattcggatcatcatatttatactgattagcagctttcacgttcacaagtttttcactctgcatatatttatcataggacaattgtgccaaccaatccacgaacccccaactcagagcttccccgtataaactcgttttagccatggtcgcataaatcccgtacatcgcgtcacgatatccctgcacgtcttcaaactgcttttcttgctccaaagtacctttaggatttacatccagataactgtcacacccggcaagagtccagaaacataaagcccaaaccagcatactatatttatttcttattcttttcatatcttcttcatttgttattaaaatgccgcactaagagagaactcgaaagttctggcaaacggataggtcaaccctctttcctgcttaaccgtggatatccggaataaatcatttgtcataaattgaacccgtaaacgacttaagtatattttcttacaaaaatcagatgtaaaatcataagacaggctcaaacttctcatgttcaaataatactcgtcacgaataaaacggctagtaacttccggcatcgaggaatcggcaatatctttatatttcgcctgatctcctgcctctttccatcggctagaaaacactcgtttatccgcattcttcagagggtcagatccttccacccgtgaaaccaacgtctggttgtaaatcgtaccgccaaaggagtaatcaaacatcatgtttaacgagaaacccttaaaagtcagatacgaaccaaaaacaccggacatatccgggttggcatctccatacacccgcttatcccaataattatacgtgaaagtaggattcccgtctatatcgatataaatctcttgtcccgtggccgggtcaattccccctgattttaccgctttcaccgcgctgatagattgcccctcttcatacaccgggggcggtaataacgtcttctcggcattcaatttctcgttcatggccttcagagcattactaatcttcttgatcttattttcattgtgttgtatcgttaatgacattgcccaattccagttctgattgttgatagccgtcacccgggtttgaaattcaatcccgttattctgcaatttaccgatgttctctttagccgaagacgttcctacagacggggcttttgtcacgtccaacaacaaatcatccgtcaccttccggtaccaatcgagtgtcatatcccatcggttggaaaataacacgacatccaatcccgcattataggtcaacgtacgctcccacttcaaatccggattaccgatagccataggaaccgcaccgatccctttgccgtaattcaaatcggcatcgtatttataagttgtcatcgcctgataaggagaaaaagaggcattcccggtatatcccacgctagcgcgtaatttcaatacatccgtggcggaagtaggcataaacttttccttgtgaatattccatccgccaccgacactccaaaaaggtgcataacgttggtctgaaccgaatttagagcttccctcgtaacgaatagcgacatccaagaaataacgattgtcataaatcatgttcccgttcacgaaaaatcccatcgagcgttctatatcctgacttcccgtaggtcttccgttttccgggtatctcgacgtgaaagccgggtgagccaatttatcagaaaagattcctactcccgaataactgtttgaatttccgtcgctggatgaaatcgttccaccgccaagtacattcaacaaagtactttcaccaaacattttgttgtaagttaacatcaaacgaccttcatatgtcatccttttcgtgttgctgacggtgatacttcctttttcctcagttactacatcgttgaatgtgttggattgaggagaaacaaacacttctgtatcatctttcgacttgttcagagaaaactgtccctccatgcgcaatcccttcaacacttccacgcgcaaattcaaaatcgtgttcagataaaactgctcgcccttgtcataacttcccaacgatgcctcgtacaggggattgtatatataatgtgtcaacaatttattccatgacccatcctcattatatactggatcataaggattcaaatctacatacttggagaaagaaccatatggagaattctcgttattcacgacattaatggttgttgtactattgataaaaaaacgatcttgcttattgtatgacaacttaaaactcatcgaataacgatcgcgcttcgattccttcatcaccccctcttctctaccatagcgcacagacaaactataccgaataaaatcatctcccccggaaatattcacgttatgattttgcgtgaaagaattgcgcaacggtttcgacatccagtccgtgtcaactccagccctcacccgcttgtagatttcattatactccacgtctttctcgtacccgtcatcacccatcccatcatacaaatgcgcccttctctcgtattccaacttttcctcggcatttaataagtcgtaatcactaagatccgggaacgaagccccgaaagttccgtcatacgagactctcattttaccacctttcaacggcttcgtcgtgataacaataacccctttggaagccttagctccatatagagccgaagcggatgcatctttcaacacagtcacgttctccacatcattcacatccatatcaaaaacataatccaaactaacctctgccccgtcgacaataaacgtcggcacgttagacgccccctcgaaactactccgtccccggatcaaaatctccggtttcgtgttcgggtctgaacccatatcgttattcgtcacgatctgcatacctgggacaaaagcggccaaacttttcaacaaacttctcgtcccggcagtcagcaactgttttctatcaaccgaagtcgccgctcccgtgtaactatttttcgccttactaccgaatccggttatcaccacctcatccagctcccccacgtcttctttcatcacgacaacaagatttttggtttcttttgtttttataattttctcttgcgtcaccattcccacgaaagaaaataccaacacaacactatcccttttctgaaattcaaaaataaacttcccatccttatctgttgccactccgacggttgtcccctttaaggataccgtaaccccaatcaaaggtatacccctcccatccttaaccacaccggacacccgccatgcaaccggacgttcatcattcaccttcggagagatcacaatcacgttatccacgatatgataaaccaatgacgttcccttcagaacgctctctaatatttcccgtactgtcgcattcttcacggaaaccgacacgttcaccccactcacctcatcatcattgtaaaagaattcataaccggatttctctcccagttcatttaaaactttcaccaaactttccgattttttctccatggataacttgacattctgtgccatgcttttagcggacaccgaataaactaaaaacgacaacaggaaaagacagagtttcataaccatactaattttttctaaggcatgctgtcctcctgcccttacatttgggttttttttcataattttgtaaggttaaattgtttgtactaaaatcaatttttcaatgtcacaggaagtggtacgaacacttcctgttttttatcgtattattattgtattctcttttatttcaaatttaacatccgtggtcatctcgatcatcttcaacacctgacatatatccgcatatttcggtaatgaccccgtgaatcgtttttgtttcatcgaaggattcgagaagaagaattccacgttgtaccaacgggataacttccgaatcaccccttccatatcctcgctggcaaaagtaaatcgatccagtcgccacaaggtatataacttggtatttacttcccggacggtcatctctttcccctgcaatagcgcttgtttcccgggtgttaacacaaccttttctccattcaccttatcgttcacttcaacccgcccctcgactaacgtcgcatgacaacttccctcatcctcatatatcgacacgttaaaagaagtccctaacaccttcacgtccatatcccgagtctccacgataaacggggccgcctcgttccgtgccacttgaaaatacgcctccccggtcaactgcacccgccgctcgttaccgacaaagtgagcgggatatttcaactcggacgcactatttaaccagatttcagtgccatcatccagcacgattttgtactcccctcccttcggaattcgtaacgtgtgccattccggcatactcgaaagtgcagataaagaatacttcaaactaccgtcctcgccaatattcaaggtctccatccccgttatatttaaacaggtatctttcaatccctgtaacaccacgtgtttccccgtccctgttatcagcacggcccgtgttccaccctgttctatccgggcaacagcgacttgtttcgtttccggttgagacgaaccggccatttgccaataaatcagtcctcccacgaaagccaccaccacggcagccaccgctccccacactttcaacaaagaacgtcccttccgaaccggtttttccatcacctccttcaactgttcccaccgccgggacgtgtcaaacgatgcgtactccacgatctcccgttgcaaaacatccttatcccacaactcttccaataacctctgatgccgctcgttttcatccaaccacacccgaagacggctcatttcctcttccgaaatatcctcccgtaaataagccaggatcaactcatgtatgtcttttgtaactttcatatacctgaattttacaccttaaacacactcgatcgacaaataggtgacaagagtatgaaaaaaatatcatcacgtacacgtaataccacataacctctaatgattccctgtaacaataaatgcatgaagacaccttcttacttgcgagaaaattcgttatcgtatgccaaaacagaagttctgttcgagttatttttatttattgtttgttaaaatggcggctatcatcgggctataatggggcgagtatgcggcgacagcgcctaactgtcgcccaacagtctagtaacagcctagtaattcccataattaagataagatcatccccggcaaaagaggaatcattacgaaaagaccttcattacaaaccaggaaaaaacatccctgcataaacgaacaaatcacctaatctaccccgtaaataagactttgcccgttgtttctgtgttttgatagtattcaacgatatatccaattcttcggcaatcttcttatcctcctgtccatccacgtaagaacgtttaaaaatttccttgcacttatcaggtagctcgtcaattgccccaaaaagttccgccaccacttctgcccggatctgttgacaaagaaaatagtcttcgtccaactcttcccgtttcagatttcgataattccggtcccgaatctccaaatcccggagataattcagacaccgatgctgcacactattatacagaaaagtttttactgttttcaaattagggaagccaccccgatccattctccagaaagcgagaaaaacatcctgcacgatgtcttccgcctccaaactatcccgcactatacgagtcgcgaaaaagcatagcgccttatgatacatctcgaacaatcgctgaaaagcctcccgctccccccgttccagacatttcacaaattccggtgactgaatatcaatattatacatcaaatccctatgcttaatttgcttatcgcacgttcctatcaaaacttccgataaatagaagcgtttacaaaaataagtattattttatcaaatcaaaataaatacttcaaatatcaaaaagagccgtcttccattcggcagacagctctcttctctttacttattctcaatagataaccttatcttaaataacttggcttacttttctttttacatttaccttcacttcgggaagactaaccggtccgaagatcgtgtcttgacttgctactttctgcaccggagcaaccgcggtagtgttttctacattctcttgatcggcataagcacatacgattttttcagctttagcttggtttaaactacgtccaccgataaacactgtaattacagccacgaatactattataatat

SEQ ID NO: 149 - DNA, 9124 bp, Butyricimonas faecihominis
tacgtatttcatccagtagtcatcacctatttatcatgaaataactattgtactcgtcagcacctgtttccgatctcttcgcatttttccacggaaccattgcataaaagcctattaatagttaattttgtacataataaacctcttataatcatggaatcacgcgaaatctttgaacaaaaataccaagctttaccacccgagatcaaatatatcgtggaattactagcctattcctgttgtcctatttccaaaagtacactggaacgactcgaattacctttcgaaaaatccaaatcaaaacgccaagcaatcatcctctcgttaaaagattaccccgacatcatctggcctagcaaaaatatactagactcctattacgtgctggaacctcacctttcccttcacctcttgcttcagctagaaaagcaaaagcgagattttaaaaaggaaattcgtaataccaatttttggaacgcggcgaattaccttggtaagcgggttcgagacacgttaataaaatactattataaccaaacgcccttcagctatctttccgtcgcgaaccaaaatattcacgccaaattcttgctggatgcggcattggatatgccggaatttagcggaattgaacattttttcccgataacaaagttcctggaaaccttcgaagcagaagtcgacatgatagatgaaacgttagagcttcctccaaatttcgaacacacgtatcaacgcacgatttcattcatcgggctcaacccgccatatctagaaaaactggaaaaacatttgccagaatcaacaccctgttacccggtgacttaagtcgcatcccgggagaaaacgcggtaaatgccgagggatattatttacaagggatgtaccacctgtataaaggagactacccgctagcgatcaaacactttgaggccggtatgaaactcgcgaagacggatataccacagtggcctttctacaactacgggtacgccatagcactcatgctggataaatcggagcaaagcaacaaacgtatagccgtgttgagtaagaaaaaatccatgcaggaggaagaagctttcccggccgcattattattcatgatccataaaaacactccggcagaggaactgcacgacacgattcggttacgagacatcatgttctcgacatcccttgtccggttgttagtacatacgattctccaacatcacaatctagcactctcgttctttggcacaaacaaacatttatttgtccccgaattgcagaaaaacgggtgggacttgctcctactggaaacttccgcaccttatcccgaattgcaagaaactcgggtagaattagaaaaaaagttgggcattacccctttaatcagcaggatcaaagtcattccggaatgggaaaaaacgctggaattattgcttcccacgaaaagggaaaaaacggccggcacgaaaagcacttcgcgaatcgtctatcttatcgatcccaaatatcaccacgtacaaccgacgttacaacaatccaaagatggaatcacatggagcgcgggaaggaatatcgctttaaaacgatatagtgataggagtctccaagacatgagcgaagtggatgaaaaaatcgcccgtctcgtaaaacaaagctactcctacaatggtagcagctactacatgaatgccacggaagccattgcctgtctcgcgggttacccgctggtgttcctcgcttccaaccctcgaatccccgtggagatcgtggaagaaaagccggaactcgtcattcgccagcaagccgacgggttcacgatcacgagcaacgcgggagcccccgactcgaccatactgatcacgtgggaaacccagacacgggcgaaagtaattcacatgaccacgcaacaatacacgatcatcagcacgctccaacgcgtgaaaactttcccgccggaggccaaagaacgtcttttggaattgatcaagcatctgaacggaaatattgtcgtacattccgatctgatcggcgatcaagaacaactcccgacgatcaagggagacagccgtatcgtcgtgcaactcctcccgattggcgattccctgcgggctgaacttttctgtaaacctttcggggaagttcctccatattgtaaaccggggaaaggggctaaaagtgtcacgggaatcgtgaacgaggaaaaaagcctcgccacccgggatcttgatgaagaaaagagattcaaggatgccgttttagcggacgtggaaagattatcggatgactacgacggggacgcttacgtgttccactcaccggaaagttgtctgaacctactggaaacgctaaaacaccgcgacgagatagcttccatcgaatggccggaaggcgttcgctaccggataaagcattacatcacgggagataatttgcatctctcgctcaccgggcgcaaccaatggtttgaccttgaaggtgaactgcgtgtcggggaaaagacaatcatgacgatcagcgagttgctgcaagcctgccgccatagcaagggacgtttcattcccatcggggacaaggagtatctctcgctcacgcaaaccttgaagagacgtttggaagaactggaatccatgtctgtcgaggaaaacaaccgtttccggatacaacaattcgcctctcctgtttttgacaactgggaagaagaaggaattcaattaaccacggataaacggttcaaggatttacagaaaaagatcgagaaggcctcccgcttaaaaccagaaattcccgttacgctgaaagccgacctgcgggaataccagaaagacgggttcgaatggatggcccgcctcgaagcctggggagccggaggatgcctcgcggacgatatgggactggggaaaacggttcaagccatcaccatgttgctacacgttgcccgtaaaggcccttcactcgtcatctgtcccgcctccgtgttacccaactgggaacatgaattacgacgattcgcccccacgttgaatgtctaccgactaaactcggccaccgaaaggcaacaaaccattaccgccatgcaaccgggcgacgtgttgctggctacatacggaatgcttgtctcggaagaaaaggggttgacagggagaccgtggcagatgatcgtcttggatgaagcccacgcaatcaagaaccgaacaaccaaaatgtcaaaggcggccatgaagttacaagctgatttccgtttgattcttaccggaacgcccattcagaaccatctcggggagctatggaacctgtttcaatttatcaacccgggactactcggcagtctcgaacatttcacggaacgctacgtgcagcccatcactcaactaaaagataaatcctgccagaatcaactgaaacgtttgttgtcccccttcctattacgacgcacgaagaatgccgttctagacgaattacccccgaaaacggagatcatccgggacgtggaactcagcgaagcggaaatggcccagtacgagttgttacgccgagaggcggaaatgacactggcagacgcgacaaacggggaccaattaaagattatcgcggaaatcactcgcctacggttagccgcctgtaacataaatttagtcaacaaagccttcaccacgcaggcctccaaggtggaaacctttttaaacatcgtcaacgaactcaaggcaaacaatcaccgggctctcgtgttcagccagttcacctcccacttggcacttatccgccaagcgcttgaccaaacgggtatttcctatttatacttggatggtagtacgcctatccgtcagcgggagcaactcgtggctcaattccaggagggaacatccctactgtttctcatcagtctcaaagcggggggattgggactaaatctcacggcagccgacttcgtgatccacatggacccgtggtggaaccccgccgtcgaggatcaagcctcagaccggacctaccggatcggccaaacccgtccggtaacgatctaccgcctgatagccaagggtaccatcgaagagaaaatcatccgcctgcatcacacgaaaaaagatctcgccgattccttactcgaaggtacggatctttcacacaagctgacacgggaagagattctggagctgttgaggcaggagtaggtcataaaagagaccgaggatcaaatccccggtctactttatctgttgaaacaaacactaaacattttacttcgtaacagaagctattaatttcatatcctgttctatccggtacatcatcgctctgtaatgatcacgcacggtttgattaacatgttgctccgaaagtaattttgcctgttcatgaatatcatttatccaagcaatcatatttaccccgtaagttgtcaacttgttattattggaaagaaccatatgttttaccatcaagtccatgaaagtcatgataaacatgttctccacgtgacattcatactctgacaaaaccatgtctttactaaaatttttaaagatcagacgacgtatatcctcccaataatcaatcaaagaatatgctttatctccctccacacgggtagcccgttccatgttttcaatcactttgggattcagtaaatagctaaaaacaatctcttgcaaaccaaaacgtatgcctttaggcccaatcccaaattctttcgtcaaaacctcatcatacatccattcctgtggttcggcaaaaacattttcagccaagaattccatggtttgttgctgcaactctttagaagcaaaaacttcatcccgttctaatttcatccgggagcccaagttctccatcaccttatacaccagattctggtacaacattcccaaggcattttgtcccccggtcatgtaagtttgccaattattcgctttcaaatcctccgtggcagagagtttgtttaagttcttgataaacctttccatattacgaatccccaaccgggaagcctcgattttatcggaagataaatccgaaggtaacgcccgcaggtcgtaactggtatttttcatgtaaagaagagttttattcgtcaaacgcttatctgccaaattcttcaataattttttatcgttatcggcagtcttactgttcgggaacacccggtatccccattcaatcgcccaacgatcgtaaacccccacgtggtatattaattcatccgtggtcatcttgtcttccggctgagcaataaaattgaacgagcaatcgtctaagatagaagctgaaaaactattttttttcacgaaattacgatcccgaatctgggctggggtataagcatagctacccgccgcattaggaagtaatcctaaagcgaaaccgacctgtctcgccacgaacatgcgaacaattgccccagcaacatgaggatcataaatattctttgccatacgaggatcaatggccccacaacgggcaaaataagtatccaaataccccccaagagtcacgtgattcaggttcacgttacatgccaatatctcccctgtacgaatatcccgttcaaaagaagtagaattggtcccggcattgatactataagaaatgaccgctttggccgaagtcatctcgtcttcattctgagcctctcttacttgaattgcatttttaaacccggctttctcaaaagcagactgccactccaaaactccttctttggcatattttttcaattctttgggaaagcaattatccaaatagaacacgatcggctctttaggttcagtcaaaattcccttgacatagcgattcatatccttcggctccagattccatttcgcaatgatcgttctttttttgatcccgtaaggattacttccgaaatcataataatccaacgtctcgtaccccacccgttcatcggcataacgaactcgcatacgtctttccggcaaaagatcgacatgacattcaatcccggcaacattttgatccacgatccaggtcagcgtgaacttcactccatgattttttttcaacacttcattcacgaaaatcatttctccaccaccggattgtttgttccctttcaatgcagcactggttccttcatctgacaagcgataccaattcccggttccttttatcaagttggtaatctcgataatcacgcccgttgaatcttttccccaagccacgataggaaagacggcatctaccggtaacaatgtttcttcttctagaatacgggccacttccggttgttgttctgatccccggactcccccgaactcacaatacatatacagcttatcctgagggcctttcttaaaatttaccaccccggcagattccaaacctgaagcacgcaccccgatacctttcaccatttgtccggagataaacatatcccttccaaggtatttctctgctatctccatgtagtatttatcatccaactcgtacacggggaaggtggcatccacttgcttcatgccttttttaaagaatttatcaaaggacatgggcccctttttctctgccgcagtcgtttttttatcttccgaagcctttttctcctgcccaattccaggcaagcaaaccataaggcacagtacaatacttaatatacaatttctcatcctggctttattttagatacagaccacttttttctccattcaaccaagcttccaccgtcttcacgattgtctccgcatgcatctcggaagccttgtccggagccttcatcttatacgcctcggcagttttagcaatattctccaactgcaacgtaaacagggttaacaaattagaagttttccgaacctccgaatattgtgtaattgccatcacctggcgaaggtattccatttgcaagtcacgacgataagccggaatagcctctccattcttcaaatctgaaaaaattccgttttccaaatcattgaaataatcttctggggtataatttccttcacgtccatataaatccatacaagaggacaaaaaggctgtctttggcaataagttctggataacgaatcgttgaatattcccctgagttctcaatttatcgatacccgacaagccaacaatccgtttctcgaacaaccattccggactcgtgaacacgtgttttgtcaaaaattccatggcctcttgttgccgttccttttccaccattcgagattctgccttaccatttgaacgtaaaggcatctcgctataacgacctcctacatttttcaaaacatgagagatgaaatacatgtattgatttaaaactccattatacatcattttcaagtaagtagcgtcatcgtcatcgccctttgtccagccttccagattattcatgatcaatttcaggtttttgataccgtactcgcctgccttcatgctattatctcctaaatcctcattttggaaacggggatcagacatatccaattcggttccaaacatacatttcggttcttctttgtacttctgagttacccaattccgaagatactccgtttcctccttcaagtccatacccgggaaataacgatatccccattcaatagcaaattcatcatagataccaatgcgcggaatcaaatctttcacatcgatatgatcttccggttgcgcaatataattcatacgggcatagtccatgatagaagccgtgtggccattctttttcacgtactctttatctcttaatttttcaaccgggtacaagctactagcaccaaagttatgacgcaatcccaaagtatgtcccacctcatgagcgacaacaaaacgcatcacgtcacccactacattttccggcataggacattgacgtactctaggatcagaagccgcagcctgacagaaataccactgttgaaccatctccatcacgttatggaaaataccaatgtgtgaacaaagaatctctcccgaacgcgggtctgccatatgagggccatatgcgttaggaaccaaagaagccttgtaggaaatcacggaataacgcacatcttccatcgagaaatccggatcttcttccggggttggagccatctttccgataatcgcatttttgaaaccgattttctcaaagacaggttgccacaaatttacagcctcaacgaaataaggttgcaaaaatttgggggtattccggtcaatatagaaaacgatcggttttacaggttcaaccagttctccacgtttatatttttccatatcttccggtttcggttccagtctccaacgactaacaagatacgtccgttcagctttatacggattagctcccatatccgatttcatgttcgtgaagtatcccacccggatatcttcaaaccggggtcgcatgggttcctcaggcaagagggctatggacacaccgatttcccaacgcgtaggaggagttggttcactcccccccttcggatttgccggactaggaggcaatgatctggatcccgcagcataactcttcacggaacggaaaatgatattgtttttgaaacaactcgttttcgtcatataagaacgatctgcctgaaaacctcccaatcccaattttctagcagaagctttcaacgaaaagatatcattgtcacccgtcaacgccgcagtcatatcgatcaacacggagttttcactcttagctttcacatcgaacacgtataacacgggaatcaacgtggagttcttcacagcctgatatacccccatcgtcgtatcggttacagcataaccataagatggtttcttcaaaaagattttatctttcggccctttctcaaaactgataatcgtgtgagacaaggcatcacccgcataaccatacatttgagtcggtgtcggcttgggcatctcagaccctttgataatagaaaccatcgtgacaaattcccgttccatcatcgcatcggaaatttccatgtaatatttatcatcctgctcgtacacgttgaacattcctttatgtacaacggcctccggtttgataaattccgatatttcaggtaacccttttttctgttgtgttgtatcagtctccacgctctctttctcttgagcagaaaccatgggcgcacacatcccccaatagcatatgaacaatgctattaatttacatacaattttcatactgtgatat

SEQ ID NO: 150 - DNA, 9074 bp, Butyricimonas faecihominis
tataagaactgtggttaaaagtaagtttttcattttctattcatttaaataaattgttttctttcttttttgcgattgcaagttccgctgattatgtgaatctaatgtttcaaaacggttatttttttgttacacggtagggcataaaggggtggtggatatgttgatccacaagagatgagtgacgtttggaagcctgtattatgctttggattcttttgtcggtaatatcaagtttaagatgacacccaataaggcggcaaggcctatgccggacatagagaaattaccccattcgaaggccgcccctccaataccgaaagttaggatgagagagacgataatcatgttgcgggtgttggaaaggtcaaccttgttctgtattaggttgctcattcccaaagaggcaattgttccgaacaagagtagcatgattccacccaaaacagaggctggaatggattttaacaaagcactgattttaccgaaaacagagaagacgatccccgtcacggcagcaattcgaatcacggcagggcttgtcacctttgttaaagacacggccccagtaacttcggaatacgtggttacgggagggccgccgattaacccggcgaaaacacaggcaagaccatcacccagtagtgtacggtgtaatccggggtttttcacgaaatctttaccggcaacactgttcaccgcatagacatccccgatgtgttcgatgacaggagcgatggccacgggaaccatgtagataatggcttcccaagagaaatcgggagttacgaattggggaagggcaaaccaagcggcttctttgatcggggtggtgtccacgttatagaagaaaagtgccacgagatatccaacaatgattccgcagaatatagggattaattttaacagtccccggcctttcagagagacaacgacagccgtgattagggagataagggccaatacccagttctcgcttgccatttttaccccggagccagcgagggaaagcccgattaatatgattaccggaccaatcacgatcgggggaaatagtttcttgatgaagtcggttccccgtaattttaccaataaactcataagcccgtagaccgcacccacggcgaccattccggaaaggactccggccataccgtacaattcactggctttgatgattggggcgatgaatgcgaaactacttcccagaaagatgggaacgatgcctttcgtgacaagatggaaaattaaggttccgattcctgcggtaagaagtgctgttgacgggtccaatcctacaagtaggggaacgagtacagtcgaaccgaaggcgacgaaaagaaattgtaccccgataactcctttttggaaggcagaaagatgattcgcatccatgattatgtatattctgatgatttgacaaactgaacaaaggtagttatttggcggggattttcaaaaaaagccttacttttgtggttaaatgtttgtatttaaaacaagagctatgataaaatcaatgaccggtttcggtaaagcaacagtggactgcgggacaaagaaagtgatcgtggaggtaaaaagtctgaattcaaaacaattggatattaatttgaggactccgagtatttacaaagagaaggatatcgagatccggaatatgataaagaacgttctggaacgcgggaaggtggacgtgtatatctattttgataatgcggaggacgagaaagatgttgccgtgaaccaatcggtggtaagacagtattataatcagatgctggaagtggcgggttcattaggagtggaaatcaacaagagcgagttgctgcaaaccatcatgcgtttccccgacacgatgcaagctaaaatggaagagttggatgaagaaggctggaattgtttgagaagtgccatcgagaaagcgttgtcggatgtcgatgatttccgtattcaagagggtaaagttttgattgcagatattttgaaacggatcgagttgatcaaaagcttgtcaggagaagtaccccagttcgagaaacaacgagtggttaccatcaagcaacgcttgcaagacaagatgaaggagtggggagagatcaaaaatattgatgagaataggttagagcaggaaattatctattatttggagaagttagatatcacggaagagaaagtccgtttggcaaatcattgtaaatattttgtcgagaccgtggagaaagaagaagctccgggacgtaaactcggatttatcgcccaagagatcggtcgcgaaatcaatacaatgggttccaaagccaacgaccacgacatccagaaactggttgtccgcatgaaagatgaactggaaaaaataaaggaacagagtctcaatgtgctatgattaggttcgtaaagttcataaagtttataaggttcataaagtaagtaatgagagtagagcgatttgaagatattcttgcttggcaaagagctcgagatttggcaagaagaatttataatcaatttggttgtagtaaagattatggattcaaagatcaaatacaacgagctgcagtatctgtgatgaataatattgcagagggatttgagcgtaagtccaatcttgaattcaaacaatttctttatatttcgaaaggatcgtgtggtgaagttcgctcaatgctttatttagctaaggatgtattgatattagatgaaaagaatttttccgaacttttgctagaaacagaaatcatatctaaaatgttatcgaactttatcaaaaagctttgactttatgaactttataaaccttataaactttataaacggatgaaaaagaaggtaatcatattttcagcccccagcggatcggggaaaagtacgatcgtgaattacttgttggcaaaggatttaggattggagttttcggtatcggcaacgtgcagggcgccccggggagaggaaaaacatgggaaagagtattatttcttttcaacggatgagtttaaagagagaattgaggcgggggatttcctagagtgggaagaggtttatccggggtgtttctacgggacgttgaagagtgaactggagcgaatttggaaggctggtcatgccgtggtgtttgacgtggatgttgttggaggggtgaatatcaagaaaatattcggggatcaggcgctatctgtctttattaaagctccttccgtggaggtcttgcggcaacggttgatcgggcggggtacggattcgatggagaagatagagcaacgtgtggctaaagcggagtatgagatgacatttgccgataaatttgacgtggttatcgtgaacgacaatttggacacagctttagccgaagctgaaaagacggtaagagattttttgaaataatcggatggagcaaggtaaggaaaagaaaagcggacctgttatcgggctttttttcggatcgtttaacccgattcataacgggcacgtgggaattgctcgctacctgttggaaaaaaggctgtgtgcggaagtgtggtttgtggtcagtccttgtaatccgtttaaagtagatcgtttccttttgccggagaccgagcgtttcgagatcgtgaaggttgccatcaagggaattcccggaatgaaagcctgtgatatcgaattttcaatgcctaaaccttcctacacggtggataccttgcgggttttgtttgatcgataccccggtcaacaatttgctttgatcatcgggggggataacgtaccggatttcccgaaatggaaggatcatcgttggatcgagggacattgtgatatttttgtttatccccgtttaggcattatcacttctattgaaggatttacgaacatgacgttcgttgatgcccctttgtttccattgtcagctaccgagatccgggaaatgatccgaaaaggagatgatatttcaagcttagttccaagcgaggcgttatcattgatttggaaattgtattcaaaataagtgagttagttacgcgatgtaaaacaaaattggcagagatattctacatctcataacaacccacttatttcacagaacaatgcttgttggaaaatttggtagaagaagatcatgttaccatgataaacatcttgccagcttcacttcccgaaagctacataaacagttacgtgttggcaggttttctgacttgtttccttttcgtcgccttcccatccatgtacagacagtggcagtagagactaaagttttgaaacttacagctgcgggtacagttcccgattctcacgggattccctcgtaatgtcacgaagaacattacctttccaatacgtctacaaacataaggaaaataattgaaaattggaaatggagaatcgaaaattattctttttcatggggttcgtgttttttcgaataattatgaggtgagttgtataattatgcatgaaaaataaaatgtaatatgcagattataaatgcattatgattaaatttgagaagtcgaaaacgttgtaaaaagtcaaaaacaagttgtacttttgtgcggctaaaaataagcgaaattaattgttaaaataaaaataagttgtagtatgggatttgtaactaaggagaaattattctctaaggatttctttatcacctacggatggttgttgggtggttgtttcatgttcgcgttaggtgcggtattgtttgcggagccttatggttttgctcccgggggaacatacggtctgtccatggtctttcatcacttgtggggctgggaaactgagatcgctgccctttgtatggatgtgcctttgttgttgttgggaatttatttcctaggaggaatgtttggtgtgaaaaccatcatctgtacgtttgctattccggcatttatgcgtttgattcactatgtttacggttatgatgctttgctggaaccgggaattactgaccggacgatgttgaatgaacaattactgtcagctattttcggcggtattgtttatggtattggtatcggtatgatcttcaaggctcgggctacttccgggggatcggatattatttccatgattttgaacaagtatacccatatttctttgggtacgttggttattatcgtggattgtacgattactttgtcaaccgtggtggctttcggagactggcgtttgcccatgtattcttggattatcgtgttcatcgaaggtaaggtgattgacttgatcgtggaaggtgcttctgtccacaagacattgatgatcgtcacgaaagagatggaaacggtgaaaaatatcatcttgaatgatattaatcgtggagctacgattttaccggctgtcggtgcttataagggtgaatctcgcgagattatttacacgattttaactcgtcgtgagatgatgatcttacgtcacagaattcgtgagattgatccggaggcttttataaatgtgatcgactccagagagatattaggaaaaggattcaagtcgttagatgaagaataaaaaaagaggcattagcctctttgcgtgaagtacatatacaaaaaaaagagccgaaaggctctttttttaatacatatcggtaatatcccagacaaatgcccggataccgttttctttattcacctcatcgaggttcttgacgtatttcaagatcagaggaaccatttcttcctccacgatagtcaaggtggcagagttcatctccggccatgtgtgagttcccattctaggttctccatccacagttcctgccccgtttaccaaaggccattgcgtgaatccccgaatttgtaattgatcaaggataaaagcaacccgttcggtcaaagcttggttatatgatataaatactgctttcttcataattataggactttagatgttagatttacgatgttacattctacatcgtaaatctaacttagtgttacttatttctttttcggaagatctctttccggatcaaagtcagccatgaacttgaattgtttgctgagaatcttcttcttgtcacggctaccactcttgtccattgcggcgtaaacggccggaacgataatcatcgtgataatcgtggagaataccataccaccgattacggcgatacccatcggtctccaagtttcagaaccttcgccaacgctgattgccatcggcaccatacctaagattgtggttaatgacgtcatcaataccgggcgtaaacgagaacgacaagccatagcgattgcatcgtacaagcggattccccgttcacgcatcaggttgataaagtcgattagcacgataccgttcttcgtaacgataccaaccagcatgacagctcctaaggcggcaacaatacttaatgtcgtgttcgtgagcaataatgccaaaattacaccggtgaatgcgaacgggatagccaacatgatgataaacggcatcttgaatgactcgaactgtgctgccatcacgatgtataccagcatcaaggacaggagtagcaacatactcaatgagccgaatgattcctgttgatcttcgaagctaccaccgatgtacattgttacgtcttgtggaatatcttccatgttatcgataagagcttgagcagcacctgctatttctcccaaagcaacacctgcagccggagtaatcgaaacttttaggatacgttgtttactcttacgctcgatatttggcggagagaaatattctttgatttctccaagttctttcagacgtactttttgtcctttaccatcggtaatcaggatgttttcaacatcggtaatagacgaacgatatttctcatccagacgaacgataatatcatattcttcaccatcttctttaaatttgctattacggtacccgtaaatgcggttacgtaaatagcttccaacatctgctgtacttaacccatgacgggccaatttatcttgatctagaacaatttgtaattcggacttatcttcatcccggctgattttgatatcttcagctcctggaatctttcgagcttgttccgcaattgtgtgagctaagtttgtagtcgtgttgaaatcatgtcccataatttctacgtcgacactattacctcccattgaccccccactcgatgtggttaccgtgtattggagaatatcaggaaaacgttttaaaattccgcggacttggtcagcgatctcgaaaacactgcggctacgttcttttaagtcgagagttcttagacgcatgtttaagatgttattaccagtactgttcatcatagaagcaaaagaggcttcctcttcactaccgtatgacaagttgatcaacgtgatttccgggatttctgcacgaatgatggaatcgatgtccaaagccacttttttagttacctcaactcgctgtccggactgcatcttggcatacacgctcatgtagttctggtcattctgaggcatgaagtctgttttgatcaattttgcaagggttaatgatgcaaagaacaaagcaaacatggaaacaatcgtaaccgttttgtgacgaagaacccagcggatgagcttttcgtaggcaaaatcaagtttatccaacattttggatacaaaatggtagaaactaaatttacccgtatccgtgttatcctgaattttcatcaactgagatgaaagcatcggtgttaacgaaatagcggttaccgttgaggtacatacggtgatacaaacgatccaacctaattgcttgaacaggataccggtcattccggttaccaatgtcaacgggaagaacacggctacagttacaagggtagttacaattacagataaccaaacctcgttcgtaccgtatttggctgcttctctcggacggctacctcggtcgatgtgttttgtgatattttcaagtactacaatcgcatcgtccaccaccataccgattgcaatggagagggaggacaacgaaatcacgttgagcgattctcccgttgcgaacaggtagataaaggctacgatcaaagagatcgggatggtcaaggcaataatgaatgtcgctctccatcgtcccaagaataagaatacgaccaagaccacgaagatcaaagcgtacattaaagattcctgcaggttattgatggatttcacgataaaatcggaattatccgagatgatctggaacttgatatctgaaggcaattctttcattgctttctcgatctcttttttggcttgattagccacggctacggcgttggcatcggtttgtttggttaccatcaaaacgccaccatttcctctattaatcgtttgctccaatgtgatatccttcaaggtatcacggacggttgcaacatcatgtaaatagatggttttgttgttttgggttcctaatacaaggttcttgatttgatcactttcatcaaattcaccttcaacacgcaacgtgtagtccatatctcccatcttcacgttaccggaagagatatcccgattttctgttaggattttattcccgatttgttctagagttaggttataagcatctagtttattgggatcgaggtctacgtagacaacgcgtaccggagaaccggcaatgtttacagatgcaacaccgtctacccggttcaagcgagtaattaatttatcatctagaatcttgtcaataccaggataggattcttcagctgttactgcataaataagaatcggcatcatggaagtattaaaacgcatgatcgtcgggcgatcaatgtcatccggaagattattcatggctttatccacggcatcccgtacgtcattggatgcttcatccaaattcacttcccattcaaactctagtgaaattaccgccaagttatcataagaggtggaggtcatttcttttaagtcgtccaccgagtttaactggtcttccagaatcttcgctacgttctcttcaatatcggcagcgttggctcctggataggtcgccattaccgtgatgtaaggtgggtccatttttggatactggtccaccggcaattgtatataggaggcaacacccaataccatgatggcgaggaaaaccattaaggttgaaatgggtttgttgaccgctgtattatatatact

SEQ ID NO: 151 - DNA, 8994 bp, Butyricimonas faecihominis
gggctattcccaaagtcatttttcaaactccctccccccttcggggtactccctctataaacagagggagagttgaaatactccctgttttcgggaagagtcaccagctcctcctctgtttatagaggaggtggcacgaagtgacggaggagtttattttaataaaatgacttttgggacacccccttcaatctaaaatctccaaatctaaaattaatccattctccccttcgtcgacggaatccttcctccggcctcttgtcggacggccatcctcaaactacgggcaaacgctttaaaaatagcttctatcacgtgatgcgtgttctcacctttcgcagccacgtgcaaattacatttagccccttcacaaaacgaagcaaaaaaatgcttggtcatctccgtgggaaaatctcccacgtactcccggttaaacacgacattccacaccaaccaactccgccctcccaaatccagcaacacctctgccctcgcttcatccatcggcaaagcaaaaccatatcgtccgatccctttcttaccccctaacgcctccgagaaacattgtcccaacacgatagccgtgtcttcgatcgtgtgatgttcatccacctgtaaatccccctccacggaaaccaccaaatctatttccccgtgccgaataatctgttccaacatatgatcaaaaaaagcaattcccgtcttcacctcgccctgccccgttccattcaaatctaacgcaatccgaaccgccgtttccgccgttttcctcacttgcaccgcctgtcgacttccctgtttcagaaaacgcacgacttttctccaagaatccgtggttaaaacaataggtaaacactccatctcctcttttcccagcaatatcccccgaatccccatattaaccgccaactgcatatccgtcaaccgatcgccaatcacgtaagagttctcccgatccaaccattcattcaaatacttttcgaccataccgatccccggtttcctccggggagaaccatcccccggcatactcccatcaatcagtatctcgtcaaaaacaattccctcgcctgccaacgtcttcaacataaattcatgtggtggcaaaaaagcatccatcggaaaccgttccgtccccaaaccatcctgattactcaccataaccaaccgataatccgtctcccgaacaatctcccgcaaggctccaataacccccggaacaaaggccagtttctccatactatccacttggtaatcaaccggcggttcctgtataatcgtaccgtcacgatctataaataatatcttcttcataaatcaccgaatttctttaatcgctcgatcaacaaatcattctcttcccgtgtcccgatggttatccgtaacccgcaactcaaccggggcgggatatgccgtacccgaacaataacaccaccttccaccaaatattcatacaactcccgaaaacgctcacaacgaatcaacacgaagttggcctccgaatcacagacaacctccaaccaagataaattccgcaagaaaccgataaccctttttctttcccgcttgatcgcctccaccttctccaagaaatcagcctcattccgcaagacatccaaagcccgccgttgagtcaatgaaccgatattataaggcggtttcactttgtttaaataaatcaccagttccgggtccgccatacaaattcctacccgtaacccggcaagtccccaagccttggatagagtttgcaacacgacaacattccggcaaacctcctgcaaaacaacagccgatggcatatcagtaaaatcaatatacgcctcgtccaccacgacaatcccatcaaaacgagacgccacctcccggatacgttccaaaggaatcacgttccccaccggattattcggcgtgcaaaagaaaatcattttcgtaaaccgatccacgctatcaaacaacgtgttccactccggctggaactccccgtccaactccaaacacctcacctccacgtcattcactcgtccacttacctcgtacatcgaatagcccggtgaaaaaacgagcatattatcccgccggggcgtacaaaccgtccggatcaacatatcgatcaactcgtcactcccatttcccagtaccaaccgggaaacctccacccccttcaatctaccgatctctcgtttcaattcccgctgaaacggatctggataacgattatattccgacgcgaacgggttctcgttcgcatccagcaatgccacattcgtcccctcgaattccgcacgagcgcaggaatacgcctgtaacctctttacattctcccttactatatctccaaattccttcatcctaaattctaaattttagattctacattcctaacccttaccgcattcccgtgtgcctccaacttctcgttatccgccattatctcgatcgtttttcccaaataggccaaaccttccggcatgatctcttggaaagttatctttttcataaaggcatccatgttcaccccgctatacgcacgggcatacccattcgtgggtaaagtgtggttcgtccccgatgcataatctcccgcactttccggggaatagtgtcccaagaagacagaacccgcattccgaatttccggcacccaatccagataatccttcacgcacaacatcaaatgctccggggcatagcaattcaccagctccacacactcttcccgggaacgcaaaacaatatatttagaatttctcagtgccacctctgcaattgccttccgaggaatccgattcaattgtttgttcaactcttcttctacacgatcaatcaatgattcatcgcaagtcaccagaaacacctgactatccggcccgtgttccgcctgcgacaataaatctgccgccacgaatgttgcccgtgccgattcatctgccaccaccatcaactccgaaggccccgccggcatatctattgccacaccataacgcccgacccattgttttgccgccatcacgaaacgattacccggtccaaatatcttatccacccgccccacgctcttcgtccctaatgccaatgcagcaatcgcttgaatccctcccactttaaaaacacgggttactccacataaccgggccgtccacaaaatagccggattcacccgtccatcccttcccggcggcgtacagatcaccacctcccggcacccggccaacttcgccggaaccgccaacatcaatacggttgaaaacaggggagcgctcccgcccgggacatacaatcccacccgatctatcgcccgaccttcctgccagcatcggaatccccgttcattcacgtattcacacttctctggaatctgaatcttatgaaactcctcaatattcccttttgcaacccgtatcgcctccttcaactcctttttcacagccttttctgcctcttgaaactcctcctccgtcacctcaaaacattctagctttacccgatcaaaataccacgtgtacttcttcaatgcctcgtccccatccctcttcacctcatcaaacaccgctttacacactttgtccaaatcttctccacgattctccggacgctccaatattttcatccactcttccttccttggatataatatcttattcataatcataaatttaatctattcataaaacctgtaacccgtcaacctgtaacttgcaacttgccgcaggcaatcactctatcatcttttcaatgggtaccaccaaaatcccttccgcacccgccgctttcaacgccccgatagactcccaaaacttattctcgttcaccaccgaatgtagagaaaaccatcctttcatttccaacggcataattgtcgggcttttcacccccggaagtatatcgcaaatctcttgtaatttctcttcgggagcattcaacaggatatacttgttacacttggcagccaacaccgccttcattctgaatatcaattgttccaccaaccgcattttctcttcatccaacttcgggttagccaccaaaacagccgtagacttaaacaacgtgtagacctccgtcaacccgttcttaaaaagtgtactcccggaactcacgatgtcacagatcgcatcagctaatccgataccgggagcgatctccaccgaccccgtgatcacgtgcgtctctgcctgaatcttattttgtaccagaaaatcattcaacgtgttgggataggaagtagcaatccgtttttcctgcaaccaatctaacccggtaaattcctccgatttaggaatagcaatagaaacccggcaacctgaaaaacctaaatccaacaaattcaatacatttgcccttttctcgatcaccgtgttctccccgataatcgccacatcaacaattccatcctccacgtaatgaggtatatccgaatttcgtaaatacaacacctccaacgggaaattagaggcttgtgccattaactgatctctcccgttattaatacaaatcccacactctttcaacaattcgagcgtgtcctcattcaatcgacctgatttttgaatcgcgacttttaacttcaccatttctatctgattttatcgtcgcactgaatccgggaaggcatctatggtatcgaaaaaaacaaaacgagcccgcctgaattcaggcgagctcgtttatactttttatttcaaattacagcacaacagcatcatctcacctgaatacagtgatggcaatgatgatgcatatgatgtaatgtactattcatattttgtctttttcgttctgcaaatgtataaaaggaatttgattatccaaatactttgtacaatttttactaatacaaagtcaaccagtaagtacaaaatttgcacttacttaatattactgcaacttagctaatttaacgtgagttcgctataaaaacaaatttatatctctgaataatagaaacataacattacacgaaagaagaaaccgttgcgaggacgcactccaatgtttcaatgtagcgtgtcctccccctgtgcaccttagatttgtacacgaaataaatagacgaacacttggctaacaataataataaatgcttaaacttggaggataaaccaaagtattgaaagaaaggcgggaatggagtgaaccaacccctgtggtgagctttcatgctcgtccccttatttggactcctttccctttcttgaacccaggcccgtataagaaattaacttgaattgttaaggtacttgggacaggttcaaaatcctttctctctagacttgttaaacacaaaagtatggaaaataattgttttataggcatcgacgtgagtaaaaataaacttgacatttgcgttcttcaaggtaaagaagttttgcaagaggacgttatagataataacccgtccgcgatccaccgtttccttgtcgacatggcggaaaagcggggcttggatctttgcagttgccttgtttgtgccgagcacacgggaaattacacttaccccttgacgttggcttgccgggatctaggttgtcgtttgtggctggaaaatcccgcccagttgaagtactcgtcgggagttcatcgtggcaagaacgaccgtgtagacgcccggcggatagcgttgtacgcttctcgattcaatgacaaggccatgttgtatcacgagcttaccccggaactggaacgggtcaagcaactgagacaggaacgctctctttaccgttcggacttgagcaagtacaaggggcaactttcggaccagaaaaatttcatggagagtaccgtttacaaggcgaaggcaaaccggttgaaacacgtgatcaaggaactagagaagatgatcgatgtcgtggagcgagaaataacgggaatcatcgattcttgtgatgttttaaaacgtcaaatgaaaataataacctcggtggagggcattggaagggaaaccgccttgtgttttatcgtcgagaccgcggcgttcacaaggttcaccgactcgagaaagtttgcctgtcacgcgggaatcgcccctttccagtacacctccggcagtagcgtgcgctcccgtaacagggtctcgcgcagggcaaacaagcaggtaaaaacgttactacacatggctgccttgtctataacaaggaaaaagaagagtgaattgaaagtgtattacaagagaaaggtggaagaaggcaaaaacaagatgaccgtcatcaatgccatcagggccaagctggtcgctcgtgtttttgccgtcattagaaaaaatgatatttattccataaattttacttgatttacttgtttaaaccataagaataagggggagctagagggggtagttggaaagttaaaagttaaaagttagaaaaaagcgttggccttgtgggtggaaatctaaaattagtaggctctaaattttaaacttttcccgttctgaattattaaaagcgtttacgaatgtgtttgtgtggttgcatccatctttgacatttcgcgcaccactcgtcagcgtaaggttttccagtgcaattgggcgtccagctgatctcgtcgcgataccggggattgctgtttcgatcttgattgtttccggtattgtcgtctttttcagcccttttagcctctaggtatgcctcggcttctcccggggcgaagtatttacacgtggtttgttgccctttcccttgacagtatttacattttttggaacccatgcagcttggacaggggttccacgttttcaaataagcatgccagtattgcccggagccgttgcaaacggggcatcgcccgctatgattacacaggtgacatggcatttcggttaccgcacttccggatccgtcggggtaaacacgtattttcatggttccccccatgtacgggatttcatgttccgtgtatttcccgttgtttttcaggttattgttactagctagttgctggttggaacccgtgtttcgcgtagaagagttaaacccacccccgatgtaggcgatatttctttctttgtccctttcttccaaaatacaagccccgggattgtttggtgaaatatgataggtttgcatgggttttttcccgttcttgtaagtacaacttattataaagtattgtccatcagcaaattctattatttgaagataatacccttctgcccgtagcttttctactttacttttcaattccggttccgtgacgaaacaatacgtctgcccgtctataccggaattcttgctcatgatgacgtaccagccagaacgataccgggtaacgttcgtgacgcgaaaatcttccttccaggatttttgtatccattgattcacgcaatcccagtccccgcaattagttatctggtccgtgtacccggtacctcctgatacaacgataaaccatttaccggcactcccgctgatagacgtgatataacggttgttcttgcgatgttcggcgagccattcgataggccagtcgctattataatgataagattgccatgttaatcccgagtttttggccattgtgacgaaccacccgtaggtggtataagccgcggacgtgatacgtcgtccttcgttccagtgtttttcaattaatttcgtgtcgagttccttcccgaaaccgcaataaaaccatgtttgtgacgataacccggtttgcttttccattagtaatatcaggttgtcttgggatcgcgcggtaccgcagtacattagtagcatgattgatagaagaaacttcacttcgcgaatgtttcgtttctggaacgaaatccgcttgcttttggtaatattcatgacaatgacgtttaatagtatttcacgtggattctatgatgtaaagttatgaaaaattattccatagtgttgaaattcgtgaattttatttttatcattcgggctgtagaagggtatcttggagcgaaaaataaaagataaaaactaaaagttgaactctaaattctaaacttttcccccgcggctaaactctaaattctaaattctacattctacctcagggtgtcatcagcaccgggcggaacgcgcaggtagacggaacgggtgtactcgtccgtatccgggctggcgagataaggataaatatgcacgaccgtatccggggagagaggttccctgccggggccctcgggatcgggtagcgtgaaagtggccgtcccggcggcacgggtcaccgcgggaaggtgaagcacgcgtggtgcgtcgggcaggcagtcgtagaagtagcccacggcgagcgtgtcatcgtccctcgtctcgtcgaggatgccgtgggggcgccattcaagggtgaaggtccacgcattgcggcggaggcgggtgtagagcggcacggcgagccagccaacgctgaaaacgaaagaccggaagttcaccacgccatgctcgtcgcaggccatggcgttcaccttgtggcacaggttgggggcggacatgcgggtatccttgacgaaggggatccacgagttgacgcccgcaagtttccgcgagagggttctcacgagccggtcaacgaatgcgaaaacgctcgtcaacagtcgttgtctctccgatcgcttggcgcggcgacgatcgcgttcctctgtcgatccggcggggcgcttgctggcacaatgacattctcggcctttacggtaatacgtggtggtgccgccggaacgggtagtcgccagttgtttgaccggcgacgcagttttctttttccccttctttttcttgctcatgatgcctcctcttaaatgattcgataaatctccaataatgcttaaacacaccttaacgtcaagtttacactttttttgggaaattaccaaatcgtgaatgtcaagtcaccgggaccactccggtaacttagcggtgacttaccggtaacttaccggtaacttgcagaaggtacagttaacttatcacgaagatagctaacgttttgcacgcttgtcgccagttaccaaacgggaatgagacaggaaacatataaagt

SEQ ID NO: 152 - DNA, 8959 bp, Butyricimonas faecihominis
ttgtaatagtaaagtatagatatacgcccctatgttagcatacacctacatcagcaagggaaatttcaagctccaagagaagccgcttccccaaatagaagattcacgagatgccattgttcgcgtcacactgggaagtatttgcaccagcgatttacatatcaaacacggaagtgtcccccgtgctgtaccaggaattaccgttgggcatgaaatggtgggtattgtagaacaaacaggagctgacgtgacgaccgtaaagcccggagaccgagtaaccgttaacgtggaaaccttttgcggagagtgcttcttttgccaaaaaggattcgtaaacaattgtaccgatcctcatggcgggtgggctttgggatgccgcattaacgggggacaagccgaatatgtacgtgtcccctatgccgatagcggactaaaccgtattcccgatacggttagtgacgaacaagctcttttcgtgggtgatgtacttgccaccggcttttgggctgcacgtatttctgaaatcacggaagacgatacggtattgatcatcggagccggaccaaccggaatatgcacgctactttgtgtaatgttgaagaatccgaaacgaattattgtctgtgaaaaatcccccgaaaggattcagtttgtccgggaacactatcccgatgtattaataacagaaccggaaacatgccaaaaatttgtccttgagcatagcgatcatggcggggctgatgtcgtactagaagttgccggaagcgatgattccttccatcttgcatgggagtgtgcccgccctaacgccattgtaaccgtggttgcgctctacgacaaaccgcaacttttgccgttacccaatatgtatggcaaaaatctcacgttcaaaaccggaggtgtagatggttgcgattgtgccgaaattcttcacttgatagaagagggcaaaattgataccaccccacttctcacacaccgttttccattaaacgaaatcgaaaaagcctatcatatattcgaaaacaaacttgacggggtgataaaaatagctataacaaaagttcatccggtattttaattttaccggatgaaccttacacgtatttaatcgttcacctttactttcctcttcttctcacccaaatgaacacgctacatagtaacaacaagataggcaatactcccaagaatccaaccttcaccactgacattccgtccatactcacgtgtacggcattatccttagccggttgccgacgaacatcgataggtacttcattatcagacaaccagaagaacatcgcatttataaaagaatagttggatgctattatattcgacctctgacggctgatctctccgttgctgatacaatccgcatcaccaagaataatgattttctgatctttatccccaactttacgattcaacgccaaagccgtcaaattggcttgttctacttccccgtcttccggattcaactcggctttgtcatccacgaaatccgtcgtcttatattcgatccagcttcctttatttttagtcaccaacagaggggttgctgtaaatcctttagtagtgtcacattccaaagccaccgcatccggcattgtaacagtgtaaacatggaacatatctctaaacatatagtttaaatcacaactttcccgcgtcacgttccccacgatcaaattagctacatgttcccccgattgtaccaaacgaccgggtaggaacttcactccgaatggagccaccacgggattcataacctcttgcctctcggcatcacccgcgatcaacaaattaccccctctctcaacatacctgttcaaacgttccaattcttcatctgagaacggggtcttcatctcggcaataaccaacacattcacatcttccggaacatcctgatccaatgtcaaggctgtcacatcaaaaccttgattcaacaacgagtaacggaatatcttattatgagcaaaattataataatccaaatcccctgttttccatatatcacgcatcccgtgtccttgcacaaaaccgactttcggcaaatccatcaccaaacgtttcatcgccgcagaaatctctcgttcatgcggatgtttctgattatcttcatatacccgtaaaaaagttttctccccgctgcctcgctctaacacacggataaaacgattgtactcatccgacaaatctataatcttatgaaactcttccggtttcataaacatcttcggattcagattcatcgtctcgcacaatttttccacaatctcttcatcactcaatcccggataacgctgttgcaatgccgcatgattataagtccggtcatagtaatacacatacttcattttaatatccggtttaaaacgaatatattgtgcgaagcgcccaatatccccattccggctaaccggaagtcccgaccaacaattatcttccaacaaattcacgtaagtcgttatcgtcagatcaccggtcatcttattcatgatatcctgactacttttagtcaaagtctttattttcgtggctgtagaatcatggaagaatttcaacgccggacgagaactcaaataacccagaaatatcgcaatcaagaaaacaccgacatatttacttaatgtcatataccaagttgtcctctgttttccggattgtaatttaagtatgctaaaacctaaaaagacagctataacaatgacaaaatacaacacatcttcactacaaatcaacccggcaatcaactcatccgcacgaccggatatagaaagccaatacgtaatatcacgtatcaaatcaatcccttgccacatcccgccaacaaaattcagtgctgccaataaggccaatgtaccgatagctgcaaccacctggtaagaagttagacaggacataaacaacccaattgccgcataagcacaaatcagcaagtaaattcccagtaatccagtaaagactaacccataatccatattttcaatcgtaaacaaattgaatatgatcatcacacacaaaataccaatcaacactaacccataaatcaccatagccaaatacttcccgaaaataatctgccaactggtaaccggagacgaatacaataactttatcgaaccactacttaactctcggctcatcaaccccatcgtcagcaatggcatataaagatacaggtaattctggacattcgagaatacacccgtccagctcgcatacaagcgggaagtaacactatacactccgtaaccaagggcttgagaccttacatatccttccatttcctgcacgaaaaccatacaagtctggaaggtgaacacgataagaattaaccaagctataggggaatagaacaaggtttgcaattccgttcttgctattctatatatttttctcataagattctatattaattgatttttttacccgataatttagcaaagatcacatccaaggaactcttttccatattgatctcttgcaaatgccatccgttagccacgctcgcttcgatcactttttccgaaatagcatccattgtgtcaaagtgcaaacggaagcgcttgtttgtcaaattttccacacccacaattcccggaatagcccgcagttcgttttcacttggcggagcatccatcaacacgactaacgaatccggtttgatgtaattattaaattcatccatcgtccccgcaaacaccatatgcccggactcaatcatccggatctgatcgcaagtcatttgcacctccggcaaaatatgcgtggaaagcatcacggcccgatccacggcaatctcctttaccaaattccggatctccacgatctggttgggatctaacccgttcgttggttcatccaacaccacgaatttcggatcatgcacgatagcctgcgctattcccaaacgctgctggtatcccccggaaagattacgtaccaaacgcttgctgaaatgcataattccacatttatccttcgccttctccacggcagctttgatatgcttgggctccacggaacgcaaataagcacaatgtgttaaatactcatccacattcaaatccagatgtaaaggcggtttctgcggcaaaaaaccgatatgcttcttcgcctccaccgggttatcccgcaaactcacaccattaatatacacttctcccttcgtctgtttcaacacgccacacatgatattcatcgtggtcgatttcccggctccattcgagcccaataatccaaggactcccgtctggttaatctcaaaactaatatcctgtatagcccactgggaactatagcgatgagaaagattttctacttttacaatagcgacatccatacatttaaattttataatttacacgtctatttttctctcagaacacctttgatttttacaatctccggtaatgccagaaacaacattctgaccgcatcctccataatttcaggagtcaatgtttcagcctgatctctcggatcatgataatacatcggtttcaactcctcggtcgtggcaatatataaggccggaatcccccgtttggaaaattcatcaccatccgcctgagaataactcacggcccgctcgtaaggagttacctcaaattcccgatgtaaccatcgatcgttcacctcagcaaatatttttgccactgcgggaaagctttctgctccccaaaccgacaaaccgtttccatttccaaccatatcaatgttcagcatacacatggttttgtccagtggaaacgtaggatgattcaaataatgaatcgctccttttatgcctctttcctccgccccgaaaaaagcgaacacgatattcttctccggtttgattccactagcggccaaagccttcgccacggccaattgtaaagcaactccggaagcattatccaaagcaccgggaaatatcagtccattgttgcccaaatgatcgagatgtgcccccaatacaatggaagaagtcgtatccacgcccttgatcacgccgatcacgttacaggtggtcgcataaggatagtgacgagtcacaacatccatattcaaacgacatccggtattaaaagaacagggcttttgtttctcactgatctgttttttcaacccgtcccgcgtatacccggcttttgtaaccaactcatccaccatggaaggatccacgtgggtataaatcattcctttcgaaaaagcgattcccgtgtgtgccagttttccaaccaacaacaccgctgccgcacctttcttcaaagcctgaggcaatttataactctcggaagcatagcgcatataaagatcaaaacgtttcttttcatccttatcccggtatggtatgccccgttcaatgatcacaatctttccttttacatctatcccctcgtaatcgtcatacccgtattctggggccgtgattccatacccagcatataccacttctgcattttccaccttccccgaatccgagttcatccccggataaaaatcccgcgggaagacatattcttgttcatttcccacttttttcaatctacaatcgatcaaactcgtcgtaggcatccgaaaatgttgtaaataagaaccatcatcccccgcaggttctaacccgaaatcacacaattgttctgcgcaccaaaaagcacatttcatatattctcccgttccggcaagccgtccgttatattctttcttgcataactcatgaacatattccatgatttcatcacttgaaatggagtgaaacacatccattatctccttggacatctttccgtattgggctttcaccgaacaacaccaaccgaccaataaaatcaaaatccaatatctcatactcgaactatttacattttaacaggtaatacccagaaagtgaaatcatatatccccggcaaaatcaagtactgcggatgagtcactgcccgcaaactccaagtcgtatccccgccaacacccatttgccgccaatcaatattccaggtaatcaaattttcctctttcacttcattcaaatgacgctgtgtcttgtcggtacccggttcatccagtacattattggagaaccggtaaacagatgatccgaaaggaacatccccgatcacttccaaactcaaatcatcaccctcaagcctcatccggcgaatatccgtccggtttccattctcttgaggacgggcataaggtacataccaatcttccactggacatttataccgtccaacaaaagcccctgaacaacgatctatgtaattttcctgcggtccccggccataccactctacacgggtaaaatcaggaacaagctgccaagtcagtcctacccggggaatcaattccgaagtacaattccgggcgtccacatgatagcggacttccatctctcccgccccattcaaacggtaacacaactgatatgtcgtattcattttctccaattcgaaatcggttcgaatctccacgagttttccttgttgtttcacgtcgaaattcactaatttcgcttgtgaagcagcccctttccaaccgatacattccgggattatatattcactgccgaaatcattatccgttcccggccgccagaaattagcttccaaaccattcattagaatctctttgttgtctatctgatacgaaatcaatttacccgtttctcgatcaaactcaagcatgacatctcgtccttgcacagaaacccgattcctgttctcaaccactttaacctctccattctctgcgaaagcaggtagtttatccaaacaaggtaatacaaactgttctgcagccaacacataccctttcttgatcaaggaataatctttattagcaatagcatacacgttcacgcaatattctgcaccacggtcttcaagtttcgggaatggcaattccaataaacatgtttcctgtggcatcacctttagattaggtaccgtaccggagttcacgacaattccatccttcaacaattcccatttcagatccgtatgctccaaagatttaaaaaacaactcattaaaaatctccacgatgccccggttataatccaacaagcgaaatgccacatcttgatatacctttttcacctcccaagccgcagggctccatgagcggtcagcccgaactatgccattcaaacaaaagttattactggaaggaatttccggacctccgaagtctcccccgtatgcccaatatttcactccgttactatccacttgctcgataccttgatcaacccaatcccatatatgtcccccctgcaaataaggatatttccgaatcacatcccaatactccttcagtcccccgacactattccccatcgcatgagcatactcacacaagatcaaaggcttatccggccgggacaacacatgattaatcagaacatcaatctgtttatacatcggacagtaaatatccgtaaactctttctttccggcatcctcagaatgaatcggacgctgtgacaaatcatgctctttcaaccatttataggttgccaaaaaattaattccggacccggattcgtttcccaacgaccaagctataatacaagcatgatttttatctctttggaacatccgttccgtacgatcaataaagacatgcgtccattccggtctgttcgccagagactcccggggatcataaccaattccatggctttcaacattcgcctcatcaacgacatacaacccatattcatcgcacaaccgataccaaagaggatcattgggatagtgagccgtacgcacactatttacattcatctctttcatcaagcgaatatccgtcaacatcgattcccgatccaccacatgtccctttttaggatcatgttcatgacgattcacccctttcaacaaaacaggttgcccgtttaccagcaattgccctcccttaatctctgatttacggaaacctaccgcttgggttaatacctcccggaccactttacgcccccgctcctcaacacgggtctcgatgatcaaatcatatagattaggcgtctctgccgtccatttcaacggattcaaaatcttcttttcaatacaaaccgtatccataccctccttctttccggaagtaatcacttctgaaaatatcgtattaccctgtctgtcattcaacgtcaaggctacatcatacttttctccccggttttccaattccatattcagacgcaacaaagcatcccggtaatcagcatccaaatccgttgcaagctgaaaatcatatacatttgaacggggacgggcataaagaaatacatcccgctggataccggaaaaacgccagaaatcctgatcctccacgtaagtaccatcacaccaacggaaaacctgcacggcaatttcgttctttcctttccgcacgcaagaagttacatcaaattccgccggagttttcgaatcctgagaatagcctaccaattgaccgtttacccacacgtaaaaagcagaactcacagccccgaaatgtaacacaatcttgttcccaatccaatcatcgggtacacggaatgtcctcttgtaagaaccaaccggatcgttctccgagtccacattcgggcacttggctttaaagccgaagcctgtttccacgtaaatcggtaccccgtagccttttaattcccagttagaaggaacctcgatattatcccatttacggacatcgtacccaactttgttaaaatccattggacggtctgccggcttactcacccacttgaatttccataccccgttcaaagaaagataacgagaggaattttccacatcccataccaatgcctgttcccgattatcaaacgggatatagaaagcatggctacgcatccggtttctctgaagaacatccagattttcccagtcattctgcgcccctgccgacaatgccatcagcataaaaataaataacaaacacctcataattaact

SEQ ID NO: 153 - DNA, 8916 bp, Butyricimonas faecihominis
cgtatgaaattggtaacttttcggtaaaaatagaggtgttgataaaaaattagtgggttttgttaaattctaaacagataaatatttatttttgcgagctgttaatattttgttccagatgaaatttgaactcggtaaaaaacgatataatgattatccgactttttttaaaactcttttcgaggaaagggtacaaaagttgtcgatagatggaggattcacttgtcctaaccgggatgggagtaagggagtggggggatgttcgttctgtaataacgagagttttaaccccgattattgtcgagcggtgcggggaattacggaacagatcgatgaaggtatccgtttttttgcccggaagtataagggacaaagatatttggcttattttcaggcgtattcgaacacgtatgcgccgttagacgtgttgaagttacgttatgaagaggctttggctcatccgatgatctcgggattggtaatcgggacgcgaccggatgtggtgagcgaggaggttttggattatctggaggaattggcaaggcggtattatgtctgcgtggaatacggggtggagtccgtgaatgatactgttttacgtcaggtaaaccggggacatgattttgccgttgcagaacaggctatccgagctacagcgggacgtggaataacgattggtgcgcatttgattttcgggttaccgggggaaagtcgtgaatccatgttggagggggctattcgtttgtgtgaattgccgattcaagtattgaaacttcaccagttgcaaattgtgaaagggactcgattggcggaacaatatttggaaaatccggcactctttcgtctttacacgttggatgaatatttggattttgtcgtggaagttatcgaacgtatccggtccgatgtttatttggagcgtttcgtgaatcaatcacctcccgaatatttaatcgctccacaatggggaattaaaaatttcgagttcacggcaaaattggataaacgtttggaagaattggatacgtggcagggaaggttaaaagataaaagttaaaggttaaaaactaaaagtttgaatgaagtttatggttttgggtaatgtagaatttaaaatttagaatgaaaggactacccccaccggctccccctgtgtaagggggagttagagggggtagattggaaaggtaaaagataaaaactaaaagataaaagttggaaatcaagaagcgttggctccgtgtggctggaatctaaaatctaaaatcataaaatcaaaaattaattaatacatggtaggacaggagaaagtatatgaaacgttggcagctctggggatagagtttgaatatacggaacatccggctgcaccgacgattgagattgccagacaatattggaaaaatctggatagtacacattgcaagaacttgtttttcagaaatcacaaggggaatcgtcattatttggtaattcttcaatgtgatcatgatatggctatccatgatatggaaaaaatgttgaagcagggtaagttaagttttgcctctgaaactcgaatggaaaaatatttgggattacgtcccggttctgtcagtccttttggtttgctgaatgatgcggaacaccacgtgtatgtatttctggataagcatttacaggaagccaaaagattatcattccacccgaatgacaatcacgcctcgttagccataaaaacggaagatttcattcgttatatggattacgtgggaaatgcttacgagtggatagaactatattaataatgagagaaataattttcaattttcaactttcaattttcaattaacatgatcagtgtagcccaagcagtggaaggaatcgtaaagcataaaccttatttgtcggaatctttggcggcagggattatcaatatctcggctttggcccgacagatacaggaagaagtggagaaattattgggaaagccggtaaatgcaggtgcaatcgtgatggcgttgaatcggttggctccttatttacaagtgcgggaacaggtacaattaaacaagttgctgaataacatgggggatattatcttgaggagtaacttgtgtgattacacgtttaaaaattcgaatactctgatggattgccatatccgggtgctgaaatccattgcacgaagagacgaggtcttctacacgatggtgcagggggttttcgagaccaaccttgtcgtgagtgaaatcatggaagggatggtggatgaacatttcaaggaggaacagtgtattttcaaaaagaatggtttgtcgtccgttacgttgaagctccctaaaggaaatatattgcaacccggtttctattattgcataatgaaggagttatcttgggaggggatcaacttgacggaggttatttcttccaccaacgagtttaccgttgtggtagataattcgttaatagacaaaacgtttgtggtgttgaagaacatcagtcggaaatagtaaaaagaagagtgtcgcaaaattgaaaagtgaaaatgtatgttttcgggtaaaattattaattttgcggggaatgaattaattaagagttataatagcgaattttgaagattagatgtgagtgcattgtaattttcaattttcgaatttcaattgataaattatgtttgagaatctatcggagaggttagaaaaatcgtttaagattttaaaaggacagggaaagatcaccgagatcaacgtggccgaaacgcttaaagaggtgagacgttcattgttggatgccgacgtaaactataagatcgcgaaagagtttaccaacacggtaaaagaaaaggcattgggaatgaacgtgctgacggccgtgaaaccgggtcagatgatggtgaagattgttcacgatgaattgatccagttgatgggagggacccatgtcgatattaatataaaaggtaatccggctgttatcttgatgtcgggtctgcaaggttccggtaaaacaacattttctggtaaactggctaatttactgaagacaaagcggggaaaacatcctttgttagtagcttgtgacgtttaccgtcctgcagctatcgagcagttaaaagtgcttggggagcagatcggggtacccgtgtatagcgaggaaggaaacaatgatcctgtgaaaattgccttgaatgccgtgaaagaggcccgggctacgggtaaagatgtcgtgattgtcgatactgcgggacgtttggctattgacgagcagatgatgaatgaaattgctgccatcaagaaagcaatcgatccggaagagacccttttcgtggtggatgccatgaccggacaggatgccgtgaacacggcgaaggaatttaacgatcgtctgaactttgatggtgtgatcctgaccaagctggatggtgatacccgtggtggtgcggcattgtctattcgtaccgtggtgagtaagccaattaaatttgtcggtacgggtgaaaaactggaggctcttgatgtgttccatcccgaacgtatggctgaccgtatcttgggtatgggtgatattgtttctttggttgaaaaagctcaggagcaatttgacgcggaggaggcgaagaagttacagaaaaagatcgccaagaatcagtttaattttaatgacttcttgagccagattcagcagatcaaaaagatgggtaacataaaagatctggcatccatgatcccgggtgtgggtaaagcattgaaagatgtggatattgatgatgatgcgtttaaaggagttgaggctatcatttactcgatgaccccggaagagcgggagaatccggaactaatcaacggttctcgtcgtaaacgtattgcatccggtagcggtaccactattcaagatgtaaatcgcttgttgaaacagttcgatgaatccaaaaagatgatgcgaatgttatccaagggcggtaagatgatggggaatgccccgatgaagagacgctaaagattttagattttaaattttagattttagatttaatccttttatcaggtttgaatttgaggtttaagatttaaaatcaaatagataaaattgtaattttagattttacgtgaatgttcatgtgaaatttaaaatctaaaatttaaaattgattagatggaaattattgacggtaaaaaaatttcagcacaggtaaagcaagagcttgcagatgaaatcgctgctttcgtggcagaagggaaaaaggttccgcatttggttgctgtacttgtaggaaatgacggggctagcgaaacgtacgttgctagtaaagtgaaggcctgtcaggcggtagggatgaaaagttcagaattgcgttatggtgatgacatcactgaagagcagttgttggcagtcattgataagttgaacgaggaccccgatgtggatgggtttattgtgcagttacctctcccgaaacatatttccgaagagaaagttttgaaccgtattcatccggataaggatgtggatggtttccatccttgtaacgtgggtcgcatggtgttaggattaccaacctatttgccagcaaccccggcgggtattgtggaattgctgacccgttataacatcccgacagaaggcaagcattgtgttgttgtcggaagaagtaatatcgtgggaacacccatggcggtattgatgtcccggaaagccaaaaatgctaattgtaccgttacattatgtcatagtagaacggcgaatttgaaagatattactcggcaggcggatattttgatcgtggcgattggtgttccgcatttcctgaaagaagatatggtgaaagagggagctgttgtggtggatgtcgggattcatcgtattccttcggaaactgcaaagaatggctggaaattggtcggtgacgtggattatgaccacgtggctcctaaatgttcatatattactccggttcccggtggtgtgggaccgatgaccatcgtgacgttgttgcaaaacacgataaaagcttgtaaagcaaaacattaaataattgaaagttgagaattgaaaatgaaagatgatttctttttttaattttcaattttcaattttgcattttcaattgattttatggttctcaattatatctggattttcttttttggtgcggcatttatcgtggcgttttgtaaattgatcttcatgggtgatacagaagttttttctgccatcgtgaaggccacctttgatatgtccaaaacggggtttgagatctcgctaggtttaacgggagtattgaccttgtggatggggatcatgaaaattggagaacggggaggggccgtgaaagtgatgtcatggttgatcagtccttttttccggaagttgttcccggaattgccaccggatagtccggcatacggttcgatcatgatgaatattgcggcaaatatgctcgggttggataatgcagccactcccgtgggattgaaagcgatgcagcaaatgcaggaggtgaatcctcataaagatcgggcttccaatgcacaaatcatgtttctggtgctgaatacttccggtttgacgattatcccggtctcgatcatggtgtatcgagcgcagatgggggccgcgaatccggctgatatatttattccgatcttgttggcaacttacgtgtccacgttagccgggctgattgccgtggcggtatatcaacggttgaacctgtttaaccgggttgtcatggcttatttgatagggggcactttggccgtgggtggtttaatctggtatttttccgggttggacaaggaaacgatcacgacgatttccacggtggcgagcaatgttattcttttttcgatcatcacggcttttattgcgatgggagcttggcgtaagataaatgtgtacgacgcttttattgatggtgcaaaagagggtttttctgtcgcgataaagattattccttatttagtggctattcttgtagcggttggagtgtttcgggcagcgggagcgatggacatgttgatgaatggattggaacgtttgtgtctggcttgtggattagatgctgattttataccggccttgcctacggccttgatgaaaccgcttagtggaagtggggcgcgggggctgatgattgataccatgaatacgttcggggcagactctttcgccgggcgattagcatcaacttttcaaggggctacggatacgacattttatattatcgccgtgtattttggtgcggtggggattaaaaatacacgttacgcgataccttgtggattgattgccgattttgcgggtattattgctgctttggtgatggcctatatcttttttgcgtagtagaatttaagggtgttatttgcccgacataactgataggagcccgcttacggtcactaaaatataaatagcaagttccgtcatattgaatatccatgttcagataacaaatatcttggttggagcgaacggttatttgataggcaatcgctttcttttttccatcttggtaaatttttaccgtgcgactgaataataccgtgttgaaggaaactgaatctaagtgtgaatttgatgcccatgtagctctgccgaaataaggaagttgtgtcgttaccaaggagtcatttatgcttagataacaattttgtgggttaatgtcaatgttggcacccgcccccggcgatgtgaaaagtgtttgtacggtgggggtcgcaatatagaacttaacagtgaattgatcactattcaccagtgccagtgttttctgaaactctttttcgaaacgaatttcttttttattctgagcctgacctgttgtaaagaatagtattccaatcaaaaagataaacgtaattcttttcatatttccctttttcgagtactatacgtgggtagatcgaaaatgttataaatatatcttctacgaaaagcttgtattattacgaaaatttcgtagatttgcgaaagaatcgtaaataaatagttcgtatggaaaaattgacacatcaggaagaagaggtaatgttgatcatctggcaggtgaaaagtggcgtgataaaagattttttgaaccggatggaagaaccgaggccgccttacacgacggtcgcttctatcgtgaagaacttggagaaaaaaggattcctgaccagtaagaagcatggaaatatttacgagtatattcccgtcatggatgaaagtgaatataaaacgaaattcatgtccggggtggtacgtaattattttgaaaattcttacaaagagatggtgacgttctttgctaaagagcaaaagatctcggcaaaagatctcgaagagatcatcaagttaatagagaaataataaaatatacaattatggatgaggcgttcatttatttgataaaggtaaatattgcgctggtcgttttttatcttttttatcggctattatttagtcaggataccttctttgtcatccggagattttgtttatggacaatattgggtgtatcatttgtttatcctttggttgcattttcattcgaagaagaacaaaagatggctattcaacaagcggttgttcaatacgcacccaatttacttccagaagtaagcgtgttcccggaaggacatcaagtatcagtgggcgtctgggatattctaaggttttgctattggggtatcgtaacacttttactcggtcggattgttattcaattggtttcaatcgttcagctagtctataaagggaaaagggcgtgctgttgttcgacttcggtgattacgttatcggggaagattacaccgttttctttttttaaatggatatttgtaagtccatcgttatacaattctgatgatatgcaagagattatcactcacgagcggattcatgcggaacagtatcattcgttggacgtgatggtttccgaaattttatgtgctttcttttggatgaatcccgccatgtggttactgaaacgcgagattcgtcgtaatcttgaatttttggcggataagtgtgttgttcactccggttttgaccgtaaggcttaccaatatcaccttctccgtttatcccatccttcggctgcagctcaaatagtaaataaatttaatgtgtcaccattaaaaaaacgtattatgatgatgaataaaaaaagaacctccagaatggggttaatcaaatatgccttgcttgttccgattgcaggactgttgattttatccagtaatgtgcaagcaatcgtgcaagtgaatgaaaatgtaatgggcgttacggggcaggattctatagttgccaaaggaattttgttgacactaatgaccagcctcttgttggagcaagtgtcataataaaggggacaggtattgggacgatgacggatgataagggagaattttcgattactgtaaaaccggaaaccgtgcttattttctcttacgttggaaaggcaaatcaatttcttcccgtgaagaatgccaaaaaaatgcggataaaaatgacaacagaaccggttgtgttggatgagctagtggttgtaggatataaagaaaaaggtgataaggatgaagaggttttccaaattgtagaggatatgcctaaattcgtgggtgaagatggtaacgtgatgaaatttttggcaaaaagaatccgttacccttttgaagcgatgaaaaagaatattacaggaaaagttttcgtgacttttgtcatcaataaagacggggagcctgtagattttaagattgcaaggagagtggatcctttgttggatcgagaggccatacgtgtcctgcagttgatgccaaactggaagccgggtacacagagaggaaagcctgttagtgttgaatatactgtcccgattaatttccaattgcagtagttgtaaagatacaaacctcttgttgtatataaatctcctattttgcattatat

SEQ ID NO: 154 - DNA, 8914 bp, Butyricimonas faecihominis
attaagaacaatataaatgttctattattttaaagtatgccattcccctttatcgtaagtaagcgattgttcatgcaggaaatttttgaactcttcttcactttcttttaggtttatatcttgaatttctaaatattcaatatccttgcattgaatcatttgtagtaacaattcttttatcttttcaaattctttaataggatagttctcattgccaatttggaattgaaatatagaactagaagatagtttgggttggagttctatcactttattgtttttttcaaaaaagtctccaatggaattgaatagccaaccttgggacaccaaaaaatcatggagcttttgtttggtttcttccaatttttttatccctttccaagaaagtttaacttcaaaaatgtcatgcaccttttgcatacaactggatattatttaccccaatcccccaagggtgattaatataaataaagaagtgtgggaattgctagtttattttacaagaggtatcgccaataacctacactgataaaatcacactcaaacaaaagccaattaataacaataaaaatcagtaatttaaacagcatttgccgacattctagaaacttatttttgtctttgtttttattatttttgtgtcatttttgttactcgtttgttactcgtcattgtcgggtaacaaaaaatgactatctttgtagtggtaacaattcagaaaacatcatggcaaagaaaaagaaagcggtcaaggccaaggagcctattagactacgattcaaagagcttgcaaacggtaacaaaagcctgtacttggatatttacagggatggtaaacggcagtacgagtttttaaaactctaccttattccagaaacagacgagacagctaaggtaaggaatctaaacacgctacaagcggcaaacgctatcaaggctcaaaaagtcatagaactaacaaacgatgaggcgggagtggtaaagactaccacacgatcaaaaatgcttctaatagactggatgaggtattatagtgatcacaagttaaaaacggggcaaagtgccgctttccacgttcaaatagataaagcgatcaaacatttaatcaagtacaagggtgaaaccgtcaccatgaaagaagttgataaagctttttgcttgggctttattgactacctgaacaatgccaaaaggaaagatggtaaactcatggccaaggtcacaacggcaggttattttaggtgcttgaattgtgccttgaactttgccgtgaaggaagaaataataccctacaaccccatcacaaaagtaaattcagatgatagaataaagatcccagaaagcacacgtgaatacctgaccgttgaggaaataaaaaagctgatcggctcaacgtgtatcaacgagccaaccaaacaggcttatttgttcagttgtttttgtgggttaaggctgggtgatattcaggcgttaacatggggagatattattcaggatggcgagcaataccgggcaaaaatagtgatgaagaagacccaaaagaccctttatttacccctgtctggtgaggctttaaaatggatgccagaacggggcgaggccaaagataccgataaggttttctatctaccataccccacttatatcaacgtggtattaaaaacgtgggcgcaaaatagcgggataaacaaaacgataacttttcacactgcccgtcatacatttgccacaatgatgctcacgttgggggcagatttgtacacgacaagcaagttactagggcatacacaggtgaaaaccacccagatttacgctaagatcgtggataagaaaaaagacgaggcggtgaaccttgtaaatgatgtgtttaacaaataaagtgggtagcgatatggataaaaaggtagaaaaacagacacttgaagaacttcaagccagatttgaggctttgtgtgatgaacaagagcaactaccaagagagggttttgctaaagtctttgaggtattagatggaatggaagaaacatttacgcctcaacacccttataccgagaatgaagatataataaataaggcacttgaaataacaggacatagcaacgatgaggctttttgcaaggctttcaaaagaaacaatcaaataatgattgagggaaagaagatacaggctaaaggtttagaaatctttgcgatgcaacaacatgaaaagatacaagaagagccacatagtcctaacgagtggcaatttgtaccgataaggattttggcaccaaaagaaataatggataacgtgataaatccaatacttgaaaccgatgctaaagagggaaaaggactatatggtaacataaccgacattccagaagaagatgaaagtttagatgaatggtttgatatagaagcctatgggattaagtgtagtttagagcctctttatagggatttacaaaactatggagttgtggatagtgtgctggaaaatgacacaataagggaatattatttgaaagttataaagagtttgatatgtttcattagggataacacagataagcccaacaaaataagaaaccacatatcaaagactttaaaagggctggatgatataccgggatttggactgcttctgcaaatactgttattacaggggcttgtaaaatggtttgaaaatgtggacttgaaaaagggtgataacggttataatgaagcgtgtagccttgttcaatggataggggaacagctaatgaaaaaagaaataagtttttgctattttagatggggagagaatgataaaaagaggcttaaaccgctttgtgactatctatattcaactgaagtagggaaaattgtacaaaatagcctttttgaaaaacaaacagattgtagctttattgttgatggagagaatggagccaaaaggatgttgaaaaaatccacaagtgacataaaaacgactgatgagaatgatttaccaagtaaacaagataaagtaacccaacgggggcgacaaagtaaaacatttagagattgcttgcaaaacgttgataagctccagactttacacgatgttatgaacgggaaaaaaggcaaagaggtagctttgataatgaaagtagcgatacaaatcggctggataacaaaacccactttcaaggctgtagaagatgagtttggcaacattggaaatagaagcaactacaataaatatatcaatgagaataatagatttaccaacgatgagatagatggcatgaagcaagccctgttatccagctagtggactttaaaagaagcatttagtagcatttaatagacacaaacaaagtggctattaagtgctattttattgattgctatacatttgattttcatgtttatgtttgcaccatgtttaacaggcagaggggcaagtgtacatagttccaatgtcacaaaatgaaagacaatggaagaaaagatagatcaaattttagtctattcattgttggccgctaaaaacgtgctaacattggaagatgcagcgttattgacagggttaagtaaatcacacctgtaccgcctaacgtgtacccaccagataccattttacaagcccaacggcaagcaaatctactttgaccggatagagttagaggcgtggatgaaacagaaccgggttgccacgcaacaagagacggggcaaaaagcggttaactacgttgtaacgggtaaacagaagggaggcacgctatgatcactcccaatatacgttattacgccaaaatggaagattgcacgggatccgggaaaatacccaaatacgtaataacaaccgaggcggggtattacccaccgatggaaaaaataacaggcagggacggcaaggtatcaatgtatttacaggtgagcaaggatagcggcagcaagaaagacaacgccccatctatgaaattacaggctaaaaacagcctcaattttactgggttaaaagagtatttcattaatgggaaactaagcggttacgcttatggttatcctctggcagacaaaaactactctaaagataaaaagtctaatccgttttttgaataccgggatgacggttttctcttcattattcatcaagataaaacagcgacaacgaccaaagatcaaatcaaacccgatattatagagttgattgtactagagggagcaaaagtattgatcgcttcatattgcaaacaactcatgataggaggttttgacgaggcgataaaggctttaagggagcaagcaaaacgggtggaaacccagacccggtaatatgtaacttgtacccaaaatttggtaacaatgtacgacaaggtgaagttatgggtgatgaggacaagggacacccccgatgttagtaatttccttgataaagcaaaagatcacgtggatcatgaaacgggagaggtttgcacttttggtagcctagaggggttgaaagtgtctgtttacacgggtggaatctctataatagggagtttggcaaagtttatttatccaaacaacatttacccgttagacaggcacgggacgagacaagcgataacaaagctatcagactgtctgcatttggatgtttccgatgctagggttacaagcatggaatttgggcaagtttttgtgatgagacacccggtagagagttacctttcaaaattgggagacacaccaaagttgctaaggtatcattttgacgtgggaacgctttactacaagcccaaaagcccacgtcaacacaaggtactagctttctatgacaagaaagccgatgcaggggttaaagggatggttttgcctgatggctttgacgatgccaacttgttaaagtatgaaatgaggtttaacgggcgactaccacaacaaatgaacgtgccggaggttgttgcctcaaccctatcagaaaacgggttttaccgcctgatggtgaaaaaataccaagaaaactattttgcaatatccaagttgaaccaagtaaaaacagatattatgagcgagattaaaaccgtttcagatgcttttgacgtgttggttgctcgtcttatcaaccagagcgaccagacacaaatagcggctttcatggaagaattgaaagaggctaaagtttttgatgaccggaaaagctacactcgattaaagaagaaaatacaagacgtggcaaccaaagcgggcgtgaccgtttccgatgaactagtcagggaactagacgatgagattaaaaacgtgggggtttacgtgtagttcccacgggtagtatgcaagttgttatcaaaaattgggtacaagtgtatcgttaaaagtaagaatgatattattaacataattgcagatcaagagagaaacagaacatggaaaaatatcgttagggtgtcttataataagtggtagatgtacccaaaatttggtaacaaattaataaatcgggatgaatgaccaaaaatacatcaagtgttaaaatgatattttgaaacaagaacaaaaaaacaatacaccatgcaaaaaacgggagaggataaaaactacatttatttcatggatcactttcaagacaccccggtacaagtgattcaagacaaaaaaaccatggagatatttttcaatgccgatgatgttgtcaggatcttgggttttgggagtagttttaaggagtttctgggaaccgatgaggggttggattacatcaacgagtacaagaaagatcatcccggcgttgatatgtttggagacgatggaatgattagacaggtgacaaaagattaagcaacgatacatgaaaacacgatttaaagcccgttcccctccatttgaggcattttgaggcgtggatatgataatttttatcgtgtcgtgatgattgatactttaaaatgggcttgtttgaggttgcatgataaaacgggctttcctctcatccacgctttcccggtggtacaacggtgagatcacggtgagagatgcaagaaatcacggtaagatcacggtaagggttaccacaagattaccgcaagggtagagcgagaatcacggcaagatcacggcaaggggtgaacaaaaaataggacaaggttaggacaaggataaaaggggcaagggtaggtcaagggtaaaagcatattttcaacaatcataacggcaatattggaaataataattttttcatcattcaagtattgattttaaagaaccggggattttcttcacgggcaacaacaaaaagatcgtgataaactttcctgtctttttcttctctcgtgtaaaggacaagtcaagcaagaacttgcacgtcctttttcttataacttgtaacaaaaaagtcaatggagaaagttgccggggatttcccgtgaaagcgagaagaaaaacatacaccagaacctcataaaacctcagaaccttataaaaccttatatttttttgaattaaattttgattacatgaagatgataactagatttgctatccctaaatctttaagcgaccgcctaaagcggttgtaatgaacgtattttgcccgttgtatggtggtggtagtggaaacgcccacacggtgacttaaagaaccgaggacacctaaacaatgggcatttttattcctaaaatctttaagttatggaaacaacacaattaaccgtccacgaggacaagaaagagcaagaacacgtgaaaagagtttatgaccgtccatctcgttttgacaagatcgacaagttaacacaagatcagcgtgacgagctggcagtatttggtaaaaaggtgctagaagtgggaggctttgacgtgcttgtgaatactttattgtactgtctggaatcgggtgtgcaagaaaaggatttcatggaacgaggctatgcaagtatcattgtagagttgatacaatgtattacagatttacaaaatgaatgttattctgatcacgtgaccttgtggggcaggtgtggcatcaagtatgacaatgatgttaatggatgggattacaggggaattatttaaacatcatcaaaatggaatcacaagacacgcacacggggctaaaaaattggccgtgcaatctagaaaaaatctatgaagatgaaaccacgacattctatgccgacaattttaacgggcatagggtgtttgtactcgtgcaacaagagagacaaattttcatacaggccgagaatggcataatcattaacgattacattaaaaccgtctgcaaaccgtcaattttcaatgataacggtgacaaggtgtgtaaatggtattttggtgatgatcacttcatttttaggctggaagaatcgggaagtatatccgtttcaagcaacaaaatagaactggtaaacctttattgtgaacccggtaacctgaaacggattaaggatttcctgaatagatactagtaccaccatcctgtttgtaagcgtccccggttcaatcatggccggggatttttatttgagaaatcaagcgagaacctgataaaacctgacacgtcaaatttaaacgagtaacaaaatacccacgtttttgttacccggtttttaccgtagtgtctaatagacatcatttcacgtgtcaagtcgtgtagtcttgggtaattgggttactgaatcggtaaccgtttactggcacctcatcggtaggtttattttggggacttcaaatgttttcatatatttgtatcagaaaagcccgccaaaggcaataaaaatggccgttttgttactggattgttacccgctttcataacaagcgggctttttattttaattatcaattcattacattgacttgtgtaggttatcgccaaacacccagttacaaataaacagccaccccacactaaaccattatatattgagaaattatatatggcaagcatgagcgtttgtaccgtttatccctgtaacttaaaaattggcgattttcttgtaaaggataaaaccaaacacttcttattaatatgtctgccccctagatcactccaaaggacaccacaaatgtaaataataattagcattctacaaacgctcaacaggggtggctgtatgacaaaagtattaaatttcaaggtgaatagcttgcaatcactcttaatatataaccattctacaattcacctctatggctgtctattcaatataaacaaccagagaggtgaaaatccttaccctctcttggatagtaacaggattataaaaaagataaaaacagcacaagattccactattgctgatctgggatagatggtgaacaaggcaatgatgtaaccgatgaaagtgatcagaaacatcaccatgtaccattttaaattcctttcaaatttcttatctctcatctatcttgaatgtaattattccctctagtaaccttcctctgaatagctggaataaccatcttcccccacgatgatatgatccagacaattcatgtttaacagcttgcaagcctccatcatgttcttggttatttttatatcctctggactgaaagctaaactctggcttgggtgattatggaatataattagattgactgcattagtctttatcatcaattgcaaggtggttcttgggtctataatagtatgctcttgattcccgacactcaatcttgcgacacctaacaccttgcagcttgtatttaatagcatcacccatgcctcttcatggtgatataaacaaccctcaaaaaagggtctgatgagtttatatgcctccatcgccatggtgacccttggtctatcctttggtttaacctctggcttgtatttaatctccacctctgataatagtgttaaatcattacaaccttctcctgttctagtttcactgataattggtgatgatagattcttttcattcatgattataaatttaattgataagacactggttttaaatagagaagtggataacat

SEQ ID NO: 155 - DNA, 8883 bp, Butyricimonas faecihominis
gaatgtagtaaatctagaaggggtgatttcgtgggtggaaatctaaaatcataaatcattaaaactaaaatcagtatgcgttctcttttggcagcaatcatgatgtttactcgactacctttgtggcggattgtcaacgtggacaagcgttatttcacggatgtcattaaatactggcctttggtcggttttttgacggggaccgtgacggggggcgttttatggctggcggcacagattgtacctttggaggtggcgtgtattttggcgattattgcccgaatcctgttgaccggggcgttgcacgaggacgggttggcagacttttttgacgggtttggtggaggaacttctaaagagaagattctagctatcatgaaagattcgcatatcgggtgttacgggaccatcggtttggtactctactttattctctattattccttgttgtccagtttcgacccggccatgattttcccgatcgtgattgcggcagattgtttttccaaactctgtgcggccgtgatggtaaatacgttaccttatgtccggaaagaggaagaaagtaaaataaaacttgtttacagcaaggtacgcacgtttatattcgtgatcgtgggattaatcacgttgatccccttcttcttcctgaaagatgcgagtttctgtttcgcaatgatccccgccatattgactgccatcggcttacgtttcttcttaaaaatcaagatcggggggtacacgggagattgttgcggtgcatccgtgttaatcatcgaacaggtcttttatctgagtgtgttagttatttggtgtcgccatcaatttttgttttagacagggagactgttgtcgagtaggacttcctgatccagagtttcattcggatggtgcttttgtacaggtcgtgttccgttatgttcggagcattgttgggcaagaccccacagttaccctacagttaaaagaagttttgataataatcggtgacaatacatattcggctaaagaaatcatggagtttatggggttgagagataaaagtaattttttgaaaaattatctttattcttaatctcactaattcttttggtatcatgggagaaaactatctttttagatttagcaatatagtctgtttttagtcgattctaaaatcagaaaaagtattgaaaaatgaaaaagtatttatatatttgcaggtatgatacgaataggtgggagagcctgccttttaaaatattgtgagtttgtgctaatctttatctgaaaatcgccaattgaaggaaataggattagacggtgaattcacgctggttaggcgtggatcgttgtctatttatttccgggcgtttggcgatgcctcagataagatagagttgttgacggtcctcgctttttttattgtatcattttttgttttggggatcggcactataaaagaaattttcgattgataaaggatattaaggttgcaacttgattaaaataaacggaatgaataaatacccaaaatttataagccatgaaaaattagagagatttttcttattagaaggatgaaaaaaagagggtgaatcctaaactttgcacgttgaatatcacccccttgcatcattagttttataaaccaattaattatcaaagttatgaaaaaaacttatgacaggaaattttttcggcaaaaattgctatcggaaaaaaagaccgtcaccgcggtttcccgcttacttatcattttattgctgggctttcccttgttgacaagagccgggacgagtggttcaagccggggagagatcgatcctttatcgggaacttccacacggcaagattcggttgttgcgacagggaaaccgggaaatcagaaactagggttttacgagggagaagtcatggacacggaggggaatccgttacccggagtgaccgttttgttgaaagggacccaaacgggtacttccacggacacgcacggagcattccgtttcccggcaacaaaggcggggaaaaccatgctggtcttctcgtttatcgggatgaaaccggtggaaaaggacgtgattccgggaaagaaagtgatcgtcacgatggaagaggaagtagaaggtcttgaggaagtgatcatcacgggtatctactcccgggataagaatagttacacggggtcggcatccacctattccgccaaggagttgaaaatggttggtgctcagaatatcatccagagtttgaaaacgctggacccggccatgatggtcttggagaacaaacaatggggatcagacccgaatcgtatgcccaaaattgaaatccggggaaagacgagcgtggtcggattgcagacagagtttgagaacgaccccaatcagcccttgtttatcttggatggtgtggagaccacgctggaaaccatcattaacctaaatatggatcgggtggcaagcgtgacgatcttgaaagatgcagcgtccacggctatctacggatcgaaggcggctaatggggtgattgtcgtggaaacgaaatcaccggagtcaggccagttacggctgtcatacagtgggaattacgggatctcgtttgccgatttgtcggattacaatttaatgaacgcttccgaaaaactggaatacgagttattagccgggcgttattctcccatggaaggatatgacggttttgttgataaacttcagaaaatgcaggattattattcccggttaaaagaagtgctgagaggggtggacacttattggttaagcgaaccgttacgaaccgtcttcaatcattctcataacttgtacattgacggaggtgaccaagccatgcgttacggtttgggtatcagctacaataaccgtgatggtgtgatgaaaaagtccaaccgtgacggtatgggagtgaacattgacttgatttaccgtaaaaaaggtttactcttctcgaacaaggcgagcatggatctctctaattctgaccgggagccggtggcattctccgagttttcaagagcaaacccgtattaccggaaaagacaggaaaacggtacaattcccatgtatttggagagaaagacagggttgtacggggaggatatgctgaatcccttgtacgtgtggaacattgaaaacacgaatacaaccaaggatctcgcgttgagggacaatttcacgatggaatggactaccttcgatgccctgagactccgggctcggttgggaatatccaagagcatctcgaaaacagaagcattcaagtccccgaatcacacggattttttggagacggagaaattaaaaaagggttctttctcgtttaatcagcatgaaagcttctcgtacaatggtgatttgaacattatctttggtaaaatatttaagaatgttcatcaagtaaactttgttggaggatggtctttcagtgaatctcgctcggaagcatccggttacagcgtggttgggtttaacgatgacttccacaagaatcctgcctattccacgggtttccgggaaaatcaaaagcctacttactcgaaagaccgtcggcgttccaccagttttttcatgaacttgaactactcgtatgacaatcgttatctgatggacttcaacctgcgagctgacgggacgtccgttttcggcagtaacaaacttttctccacgacgtgggctgtcggtttggcatggaatgttcataacgaggaatttataaagaaattggggtggatcaacaatttgaagatccggggatcaatcggtaatcccggaaacgaaaacttcgatgcctacatatcacaaaagacctacgtgtataatgtcgagttgcaaaatatgttcggggcgagtgcgttgattcagaagtacgggaataaaaatttggaatggcagcgaaccgtggataaaaacatcggtgtcgacctgtctgttttgaacaaccgaattcgtgtgacttttgactattatttcaaagacacggaccctttgctggtttccatcggaatgcctccttctgctgcggcgacgagcttgtacacgaacatgggaaggcaaatttctaggggatggacggggacattgaattatgtctttctgcggaaaaaggatttgtcttgtagcgtaaacatgaacgcacgggcgaatcattcggaatatcgtgacatcggggataaattggattacttgaacaaggtggggagttctactgccttgaaccgttattacgagggaggcagccccgacgatctatgggcagttccttctttgggaatcgatccggctaccgggcgtgaagtcttcttgaaaaaggatggaacgcaaactttcttgtattccgcatccgatgaggtgatcgtgggatcgtccgttccggatgtagagggaattgttggaatgtcattctattacaagaagttgtctgcctctttcagtttccgttatagcttgggcaaagaaaccatggcctcggcattgtatgataaagtggagaatatcacccaagacaatatcggtaggaatcaagacaaacgagctttgtacgaccgttggaagaaaccgggagataaggcaaaattcaaggcgatagatgattattcttccacgccgatgtcttcccgtttcgtggtgacggagaacactttttccggtgaatccatttcaatcggttacgatatggatgctgcatggttgcgggtagcgggaattcagggaatgaatttccgggtttacatgaatgatattttccggatctcttcttttaaagaggagcggggtctggattatccttttgcccgttcggtaagtttttccttaggtgtaagattttaaaacaagtgtggatatgatacgaaaattgaaattattagtgtgtgtggtgcttggcgccctcacgttgtcttgctccgattggttgaaagtcagttcggaggaccggatcatggagaacgatcttttccgtactccccggggattcatgacggcgttgaatggtatttatatagatttgttgaattcaagtatgtacgggaaaactctgacatggggaatgactgatattttggcacaatactatacctgccgggagaaggaccatagttataaatctttggcagattttgataacgtgacccggaataatgccgtgagtggttgttggaatcggtcgtatgcccttttgaataacgtcaatacgatattggagcattgcgaatccgaccggaatgtgctggatgatacctattatcacatgatcaaaggggaggctctggccttacgtgctttgttacatttcgaactgttccgtatattcggtcccagttatagcaaggacaaggaaaaagagtgtatcccttacgctttgacttccgagacaaaggtaaatcccttgctaccggcaagggaaattgcccggctgatcatggaagatttgaaaaatgcggaggagtcgttgaccgggtatgaccccgtgattgaaacaggagcagtgtggggtgatgatccggaagggggcgtgaatgacatgcgttatcgctccatgcgtctgaattactatgccgttcaggctttgatggcccgtgtggctctctattgtggggaaaaggaggtcgcttgggagtacgcggagaaaatgattcgcgggatacacgaggaacataaatggttccccttcgtgacccgggaagaagtggtgacgacagataaagaagatcgtattttccaaagtgaaatcttgtttggcctgtataacctgaaaagaaaggagagcgtttacgaggtcggtttcggggcaaacttgaaacaggggagcgtgttacgtattgataaggatattatgcagaatatatacgatggggatgacaatgatttccggcttgcatactggttcgcggaaatggttgatccggataataactcgtatctccacgtgatcaagtacaaggatgtggatgatattgacacgaaaacgaaaattagcaaaggctatcgttacatcatgcctgtactccgggtgtccgaagtgtatcttatcgcggccgagtgctgtccggacccgaaagagggacggaattatctgaatgcggtgagaacggcacgtaacgtgaaaaacattcaggatgatgccgatctgactgcgagtatcgagcaagagtacaagcgggagtttgtgggtgaaggacagttattctggctttataaacgcaaggggaaaaccgagattgcatccggcgagaaacagggaaacgttgtttccatggaagaacgcttttacttgtttgacctgccacagtcggaacaggattatagaaaagaaaatgatcttggtaaataattaaaatttcttcgtatgaaaatatatatatttctattagttgtcgttttgtcatttcttggatgtgagaaagaaatgatggattacgaggggaaagatggggtttatttttcggtacaggaagccccacccagtttatatggtgacccggaaatttgggctcatatggacacgacattgattcccttttccctgttattagagaatgatagcacggtgagattgaaagtccgggtgatgggggatgtcgtgaattatgaccgctattttaccgtgtcggtcgtcgattcgttgaccaccgcattagtgaacgaggattacgctcccttggaggaacgctacatgattgccgccggggaacgtgacggattcgtggaattcacgggattccgtcaggcaaaaatgttggattccacgtattacgtgaccttacagttgatggaaaacgagtatttctcgttaccgatggatgtgtggagacccttggaacttaaagattacacgaaagagatacagaacgtggtccgtcacgtggtgggactttcagatgaggttttcatgccgaaggcgtggacggtgaattattttggctcctactctaaaaagaaagtcaaattactgtgcgagatgttcggtttgaagatggctgattttgataacgtaatcgaaatggatatggaaagacagcgcacgtatgctcaagggttggataaatacttgaaggagatggaggcgaaggggcagaccgtttacgaggacgagaaggacaaggatggtaatccggtgaaaatggccgtgggacctttaatttagtaatgttgaataatgaaagttatgaaaaagaaactaagtttactcgtgctattggcgatagctttatgcatgggatgttatgatgataaagggaattacgattaccatgaatttaatgagataagtatcggtgatcgtggttttgacacggcttatatcctcacgtcgttcgtggacacgcttcggatttcacccgaaatcaatttcaagctggcggaaaacacgcatctgaagttcgagtgggtggctcggtctaatggagtcgggagtgaagaatacccgttgggaaatgaacgtgatttggtgttcccggtaagcttgccgacggagacatataccttgtatttcaaagtgacggacacgctgaacacgatggagtactcgaatgtcacagtgatgcaggttcaagatttacttaccagtggttggattattctcggggagaacagtaacggggaggcacaactggacatgattacttattccgtggacacgatggtgttgaaagatatgttgcatgatagcgggctgcccgcgttgagaggtccggtgaaagtgtgggtagttgataattacagggataacatgattcatatttcgacggaagacggtacataccgtttggatcgggataatttcaaaggaggtgaccacacgcacctgaagtataatttttatgacccggagtcactggatcattttgttcttcaggaggtggcccagatgcgtagctataacagggcggcaattattgataataagttgtttcataacggtttcttgatctccagttccgtattccagaatccggcgaatcattatcagggaacttatgatcttttctctatcggggataagattgcttataatccgaaggctatggcgtattattatatgttgtacaataatgatgcgaaacgttttgtttataccgggggaagggcttatgggtcacctgtgggatattgtgacacgctgaaagatacgcggagtgacgtggagattttctcttggaaaacggggttggattacgtgacaagtataagtagtcgtttgttggacgggtattcgtttaccgtgttgactgatagcaaggggagctactacttgtattgctacgcgttgaagtaccagtggggctgggaaagtatcgagaagaagaaaaaatactctttggataaagccacggatattgacaaggcgaaattcttcggggttagtgcgcaaagaacctatttgatttacgctaccggttcgaaactgtacgcgtatgattacgtggcggaaaaagtgcaattacttagggatttcggtggtcaggaaataacgttgttacactacgacattttgattgacgtgggtgccggtgatgatttcttctacgtgggtacttacgatccttcgttatctaaggagacgggaggaacgctgacaatgtacaaggtgatgaatgatccgaataatattatcgtggaggaggttcccggctttagctggtccgggttgtgcaagatcaaaagtattgatttcaaaagatattagtatagctgtttgaattttgagaaaggcaccattctaacgtggaatacacgggagaatggtgctttttatgtccgagatgatgtgtgattagtgccgacgttagtcccgattacatttttattaattgattaatatcggatgattgccgtcatgaaccttatagataccttatagaaaccttatatgaaccttatatataat

SEQ ID NO: 156 - DNA, 8755 bp, Butyricimonas faecihominis
cctttgtgcgaaggtataaaggaatttgttaatatgcgttttaaaagaatttatcaatgttgggttattttggaataatcaaatatatttccctgtttacattccctgcaactcttcccaatattccaaagcccgccgggtatgagggatcacgatggttcctcccaccagattggcaacagagaatatttcgaacaactcttccgtggttaccccgtactggtgacatttttccaaatgatatttgatacaatcatcgcaacgcaataccatagatgtcgctaaccccagcatttcttttacttttgaggataaagcaccgtccatatatgtattggtatccagattatagatccgtttgatcactttattatcggcagccagtattttctcgttcattttagcccggtatgcccggaactgttcaaccatttcactcataattgtacattttatagctaaacaaataatttcaatatatcattaatgttcgcaaacaacagcaggaacaacaggaagaacattcccacgatctgggcgttctccataaatttctcattcggcttgcgacgtgttatcacctcgtagagcaggaacatcacgtgacctccatccaatgccgggataggcaagaggttcattactcccaagataatggacaacatggccgttaattcccagaaagcccgccaatcccacacgctggggaatatgttcccgatagaaataaatcctcccacggacctgaaagcttccgggtttttaaataatttgaattgtttcagataggacttgatccagtcaaaccccatgttaattcccgcgggaatagccccaaaaaaggaatattctttcacggcgtactcgaaatcgtttatcactttcggatacaccccgatcactttaccacttccgagagcaatagggatagaaagagtatcacttccccgcaaaactttagcattcaatacactatcttggtgagaacggatcaaatcaaggtactcgtcatagaaagtaaatgaatgtccgtctaattccaacacccggtcttcttccaacattccggcattccgagcaggtgattcatcagcaaacccttgtatcgaaccatcatatttataacggggtgtcagtaaagctatccgcttaaaccctttcgaggaataggacaacatctcccctatcaatgtaggagggagatttatattcatcacctgaccatcccgcataacctgtatcgtcttcggattctccattaagatataccccggaatttcgaagaaattctctacttttttattatccaaggataagatcatatccccatttcgcaacccggcattaagcaataaagagtcgcatacaactccatatttcgcattctcggtaggcaagtactgctctccccacgcgtaaagaatcatgatgtaaatgaagaacgccaagataaaattaacaagtaccccaccgatcatgatgatcaatctttgccaagccggtttggagcggaactcgtaaggttttgccggttctttcatttgctccagatccatggactcgtcaatcattcctgcaatcttcacgtatccgccaagaggcaaccatcccatcccgtattcagtttctccccttttaaaacgaaacagggaaaaccacgggttgaaaaaaataaaaaacttctccactcgtaccttaaatatttttgccgccacgaaatgccccaactcatgcaacataaccagaatcgaaaggctcaacaaaaactgtaatatctttactaatacatccatatacctattttagattttaaattttagattttagattgagaaattcctcttttgctattcgtcggccctcttggtcagaaacgatataatcttccaaggtaggttggacaatataactcactttttccatcgttcgttcaatcacgtcagacatggccgtgaaagaaatttcatccttcaggaaggcagccaccataatttcattggccgcatttaacacgcagggggcattccctccacgattcatggcctcgtaagccaatcccagatttcggaaggtcgttatatccggtttttcaaacgtgagatcggaataaataccaaaatccaaacgcggtatctccgaatgtacccgctccgggtaagtcagtgcatactgaatcggcaaacgcatatccggaactcccaactgtgcttttatatttccatcctgaaactgaaccatcgagtgaacaacggattgcgggtgtactaacacctctatttgtgaaggttttaccccaaacaaccactttgcctcgatcgcctcgaaacctttgttcatcatggacgcagaatcaatggtaacctttgcccccatgctccagttcggatgttttaatgcctgtgctgccgttacggacttcaaatattcataatcccgtccccggaaaggtcccccggatgccgttaataatatcttctccaccgggttgttgtgttcgcccaccaaacactggaatatagccgagtgttcggaatccacgggtaatattcccaccttgtattcctcaaccaaccggttaattaaatctccggcaacaactaaggtttccttattggccagagcgatcgtcttacccgccttgatcgcgttgatcgtgggtaacaacccgctatacccaaccatggcagtaacgaccacatcaatcgtggatgtttgcacgacttgagcaatagcttcgctcccggcatatacctttatatcctcgtccttcaataactcggttaactcggaatattttgattcatttccgatcacaaccatgttaggcttgaactttctggcttgtcgtgccagtaattccacctgattatttgccgtgagaacctctacattaaaccgttccggattagcgtcaatcacctgcaatgtctgcgttccaattgacccggtagatcccaatattgctatatttttcatttcaaaacaatctccaaaaccactatttacgaatcatttaaacttaatgaaggtttccggattcaatgcttttcccgcttgccacaactcgaaatgtaaatgcggtccggttgtttcttcgcccgtgttccctaccactgcaatcgcctctcccgcacggacaaaatctccctgctttttcaacaataccgaattatgcttatatactgaaaccagatttccattatgctgtacttgaatcacgtaacccgtcttaattgtccaatccgtgaaaatgaccacgccatccaacacggacaaaacatttgaattttgcttagccaccaaatccaccccgtaatgacgagtcgtttcatcaaaatgattggttaccactccatccaatggtgagaagaaatgataaaaatcatcatcggaagaactgacatgcccaagggttaaattgtatttttcttctttttccacgatttcccgaaaaccggcctcttcttccgacatacctaacatcgaagtatcataggttacctttacattctgctgcatcgacacgaaactcgtcgtgtccaagttttcgtctctcaaaatagtttgtatggaatgaagaaaacgatccttcttctgcacttcatttaatagggaatcaacccgtagagcgttttgtgtaatctgacgtctcaactgttggctcgggtaacccgggatgaattcccgcaaatttgtgaatgcaatcaacatgatagtcaatataatcaagacaacggccaatgtacttaatgccgtgagaacgtgtaacggagagagccgaaggtgcatcacctcctcgtaagttgactcgttaaatatcgtcaacttatagcggttcctcagcttattccaatattttcgttttttactgctcatccaattatttttagccttcaaaaatagtataaaaatccaactttcccagccagagaattcataaactttatcggggcaattgaaaagagtttagaatgaaaaagattttataattgtcgattgaacgattaagtgattgaaaagagcgttgaattgagggcaggaatcactgagccggaaatcataaatcaaaaaatggatcagttcttgaatcaattcgtggttttgataatctccgggtattgatagattcgcaagttaaaataaggaatcacggctaacagatgatcgaatatatcggattgaaccttctcgtaggctacccattcttgaatccgggaaaaacaatacacctccagaggaatacctgttgccgtcggttgtaattgccggaccatgtatgtcatatccatattcaaatcgggattggcttccagcctgcgtaccgcatactgtctaaatacacctaaattcgtcaacttccgttcatccaacacggcagatgtccctttattttgttcgtccaacttcggcaacatatcttcaatataccctttcaagacattcgatttacgtaaagtatcgatttcctcatccgaaaggaaatgaacggaaagcatatctatattaatatagcgcataatccgacgaccggcagactcctgcattccccgccaattcgtgaaagaagcggacactaactgataggtgggaatcgtcgtgatcgtcatatcccaattttgtactttcacggtatacaagttgatctccaacaccgtcccgttggcattattgctcggcatcacgatccagtccccgatacgcaccatctgattggccagtaattgaactcctgccacaaaacctaatatcgcatctttgaatatcaacattaaaaccgcagcaaacgcccccaacccgaccagtaaattacggggggactccccgataaactcgctgacgattgtaatgataatagctgaaatcacgaaaattttaatcacctgcacgaaaacttttatcggacgatcttttgcgatcgggtacgaatcgtagattcggtttattgcatccagcactgcaacaatcacgaaaccggcaaccacaagtatccaagccacgataaaccgatgaaaaagttctacatgctgccacttcccgtacacgattttaaaagcaaaatctataaatatcggtggtatcagattaaatattttttgaaaaacacgctcctcgaaaaaaatatcatcccatttggttttcgtacgacgcaccattcccccgatcacccgggttattcccttgcgtaaaaagaaggtaaataaaaaagcgatcagacaaatgaccacgatctgcaaaaggacctcgacagccgaggccgtggaaggatctttaatacccaaattcaaccaagaaaaccatttgttaatatctattttcaacagcatcatatctttcccaaacttttacaggcgtatacgataaaccaccggataagttaaaccccattaacaacgaatcgttctaaataatctaaaaacccttctatttttccctattttcacacttaacccctaaattaacgttaaagaattaacgtatcagaacaaaattacttacactttgctatatttgcagacacaaacattaaaacattaaaataattcgtatggcaaaaaaattattaatcgtgtgtgctttattggcattgatcagcactagcctgttcgcccaatatgacatgaaggcaccacttcccatggatccgaacgttcgcatcgggaaactagctaatggattgacttattacatccgccataacgcggaacccaaagaacgagccagtttttacatcatccaaaacgtgggagctatcctagaaaatgatgatcaggacggtttagctcactttttggaacacatggcattcaacgggaccaagcatttcccgggaagaaaaggtattaccaacatgttggaaaaacatggtgttgaattcggaagaaacgtgaatgcttacacggcacaagacgagactgtttacaatatcagcgaggttcctacaaccaatcctgatttattagatacttgtctactcgtacttcacgactggtcacattatcttttattagtcgatgacgaaatcgatggcgaaagaggagttatctcggaagaatggagaaccagaagaaccccgagtttccgtatccgtgcccaaatcatgccggtattactgaaagactctaaatacgcgaaaagagatgttatcggtaacttggacattatcaagaatttcaaataccagacccttcgtgattattatcacaaatggtatcgtccggacttgcaagctatcgctgttgtcggtgatttcgatgtagaccagatggagaaaaaagtaaaagaattattctccaaaatcccgactccggtgaatccggctgtgagagaagagttcacggttaaccctcacgacgatatttacttcgtatgcgcaacggacaaagaagtaactcaatcgtctgtcagcgtgtatatcaaatacccctctaccccgaaagaagaaaagaatcatgaatacctgaaaaatggaattcttcaatccttctacaacaccatgttgggacaacgtgtttctgaattacttcaaaaaggcaatcctcctttcattaacgcacaagccggattcggcggcggtatcgtaagaggatggagtacctatatgatctctgctacagcaaaaccgaatgaagaagcagcagcactggaagctatctatcgtgaaaacgaaagaataaagaaattcggtttcacggaaggcgagcttgaaagagcaaaaaccaacatgctagtaggcttggaatctgcttacaaacaaaaagacaaaactacctccgaagattatatcggtgaaatgcaatctaacttccttgatggagaacctatcgtagatttcgattactattacaattttgccaaagctattatcccgaccatcaccgtggatgaagtttcagctttagctaaaaaacaccttaaccggaaaaacatggtgatcgtggcacaaggcccgtctgaaggagttaaacacatcacgaaagaagaagccatcgccgtgttggacaaagttgaaagctctaacttagagccttataaagaccaagtaacagaggcatctttaatcaacgaggacttgaaaggttccaagatcatcgctaccaaaaaattaccgcaattcgatgccgaagagtggactttggaaaatggagcaaaagtggtattccgcaaagcagactacgaaaaagaccaagtacaagtaagttcttacagtaagggaggtacttcattatatggtatcgacaaattagcatctgcccaagtcacagatcaatttatcggggcttacggattaggagactatgacgcaataaccttgagaaaattattaaccgggaaacaagcccaagccggtgttaacattggcggtctttcagaatcagtcggtggtgcatctactccgaatgatttcgaaaccttgatgcagctgatctacttgcgtttcgagaaacctcgtttcgacaaagaagtacacaataccatgatgcaacgtaactacgctgccatcgagaactcagccaacaatcctcaaaagattatgcaagactctgttagcatgatcatgagcaattatagcccgagaacattgttattcggtaaagaatttttagataaagttagtattgaacaaatcgaggagatctaccgcgaccgtatcaaagacatcagcgactttacattcttcatcgtgggtaacatcgatgcagaaaccgtaaaaccgttggttgaaaaatacttgggatctgtaaaatcttacaaccggaaagaaaattgggtggataacaaagtgagaggaccgaaaggaagaactgaaaaagttattgaactggatctgactactccgaaggcaactgtaatcaccagtttctctaaagagatgaaaacaagcattcacgacaatctttgcttgaatatcttgagaggcgtactggatcaaagatacatgaccaatatccgtgaaaaagaaggtggtacctatggtgtagccgttcaaccgagttcttctaaagaaccgtacgaaagctacagcatgagcatgagctttgattgcgatccggataaagcagaacacttgaaatcattaatctatgctgaaatcgacaaattaatgaaggaaggcccgacccaagaagagatcgacaaagtaactactatcctgaagaaaaataatgaacaaagcaaacctcataatgcatattggatgaatgcaattcaaacttattatcttcgtggaattgatgtaacagacccgaaaaacttcgataacattattgacaagatcacaacaaaagacgtgaagaaattcacccagaaattattcaagggagccgatgttgttgatatgatcttccaaccgaaatcaaaataaaattaggttgcaatttatataaaaggaaacgtccgggagtaattcccgggcgtttttcattcatacaaaatttcatcaagtgataagttcgaattactcctctcccactactccatctcccttaaatttaaattgcttagccaccctaaaaataactttttgagtttccgggtataaaacaactttttgggttgaaagaacatatcgatgacgaacagcacattttttcacgttgaaagatccaaaacccgctaaccccacatgcccctcttcttttagcccttctaacatcgtattgaaaatttcatcaaataccatcgtcacatctttttgtgacatgccattttttttggccacaattttaactatttttctcttgtccatatctaatta

SEQ ID NO: 157 - DNA, 8753 bp, Butyricimonas faecihominis
aacttatcccgaagtaactgaatagcacgttgtttatgagctcttacgctattaatagaaatttgtaaattatccgcaatctcttgatttttcaatccatgaacgtaggccatacgagtaacttcacgacattgaccgggtaaagtttctatggcctggtatattcgggaagaaatttcagatgaaacaatagcattcactatatccgtatcatcaaataccgggaattgatttttagcctgatactccttgacaatattattgtgcctgatttgattaaggcaaagatttttagccgtcagatacaagtaattctttatagcgatttcgtgttgactcacattctctttctgattccagaaattcacgaaagtatcttgagcaatatcctcggccccttcccgatctcccataatttggaacgcaaaataaacaatcctggcataataagtcacaaaaatcttcttaaaagtaacatccccctctaaattatcctgtagtaaattcttcatatcgccagatcgttttattcatatatcaataaacgttataatagatttacaaaattacagaaatcactgacaaatcaaagaatgttcacgaatctcgaataaaaacgtaaaatattttgatacgcaaacctatctacagtcatttaaagtgactacgagaatctttcgaaaataactaacggcaacgagagttgccgtagccaaatcaccctgcagaggtccatagaccttatgaaccttataaactcattttctcccccccaactcttctcgcaagaaaggagccgttacggattttttgtttaaagcaacttcttccggggttccggtgcaaacgacagttccccccattttaccaccaccgggtcccatatcaataagataatcggccactttaatcacgtctaggttatgctcgatgacaatcacggtattccctttatcaaccagcttttgtagcactcccaacaatatatttatatcctcgaaatgaagtccggttgtaggctcatccagtatatatagcgtactcccggtgtctttcttcgaaagttcggtagccaatttaatgcgctgggattctcccccgcttaacgtagtacaaggttgtccgatcttgatataccccaacccgacatcctgtaacatcttcaatttggattgcaggtgaggcagattctcaaagaactctaccgcctgattgatcgttaggttcaacacgtcaccgatggactttcctttatagcgaacctccaaggtctctttgttgtaacgtttaccatcacaagcttcacaatgcacgtaaacatccggaaggaaattcatctcgatggtcttcactcccgcacctttacaaacctcacaacgtcctccgctcacgttaaaggaaaaacgtccggccgtgtagccccggatctgtgattccggtaacttttcaaatatcttccgaatatcggtaaacaatcccgtgtaagtagccggattggaacgggggcttttacctaacgggctttgatccaccaccacgaccttatcgatttcagtcatcccttctatcgatttataaggtaacggtgcagccaaagcattataaaaataagcactcaatatcggatgcaaagttccattaaccaaagaagattttccacttccactcaccccggtcacgcaaatcaatttccccagaggaaaatcgacactcacatttttaagattatttccggtacatcctttcagggaaatcttctttccattccccactcgacgttccgccgggatagcgattaccttctcccctttcaggtattgtgctgtcagactatcactttccagaatatcggaataccccccgatagccgtgatctcccctccttttcttcccgccttaggtcccaagtccacgatataatcggcattctccatcatctccttatcatgttccaccacgatcaccgagttaccgttatcccgcaattcctgtaaagaatgaatcaacttccggttatccttctggtgcaacccaatactcggttcatccaatatataaagcacgtttaccaactgtgaaccgatctgagtcgccaaacgaatacgctgagactccccccccgataacgtcatggattgacgattcaaggacagatactccaagccaacatcaagcataaacttcaagcgagttcggatctctttcaaaatctccccagcaatctgtttctgtttatcctccagatgttcctccacgttaccgatccactcgtacaaatcagataactccatattcgctaattcggaaatattcttcccgttaatatagaaatgcagagcctcttggttcaaccgttgaccgttacacacgtcacaggttgttacggaaataaactgttccgcccatttattcgctttcttggaagtcgaattttcctcctgcatggtgacatacttcaatattccctcgtacgtcgtgaggaaattggatgataccccgatctccgcattctccaaacggaattgtcccggataaccgtacaatatatccgtcaaagcctcttcgggtaaatcccggatcggttgttttatatcggcaccatgttttctcagaatcgtttcgatctggtagaaaataagagatgctttatattttcccaagggcaagattcccccagcatgaatggataatgaattatccgggattatcttttccatcgccacctcgttgacaaatcccaatcccttacatttcttacaagccccgtgaggagaattgaaagaaaaggtatgcggggccggatctttataggaaagcccagtatccggacacatcaaatggcggctataatatttaatctcgtcagattcgtaatcttttaccatcatcacgcccttaccgtgtttcatggcagtacccacggaatttttcaagcgtttcagatcagcctgatccatgacaatcttatccaccacgatttcgatatcgtgcatcttataacgatcaacactcattccgatcgttatctcccgcaactctccatctacccgtgccgaaataaaaccattcttccgtaaattctcgaataactcccggtagtgtcctttacgtccttttaccacgggagccaacaacaatacacgccgcccagcaaaatcacgctgcaacaattccaatatctgttcatccgtgtactttaccatcttactacccgtggcgtatgagtaagcaacacccgcacgggcataaagcaaacgcaaaaagtcatagatctcggtggtcgttcctaccgtagaacgtggatttttattcgtggttttctgttcaattgaaatcacgggacttaaccccgtaattttatccacatccggacgttccatgcctcccagaaaacgacgggcgtatgcggaaaaagtttccagataccgacgctgcccctcggcatatatcgtatcaaaagccaaggatgattttccactcccgcttaacccggtaatcaccgtcaacttatcccgtggaatcgtcaggtctatatttttcagattatgctctctggcaccaaatatggctatattgttatcttcttcttctctgtactccatgaattcctattccttaaaaatcaacttacaaagatagggaaactatttcgaatggaagaaaaatttatgatttatgatttacaatttgcgaataaaaagtataaacttgataccgtaaaaatctaaaatcagtaaatctaaaattcatggagtaatgtgtggtaggaatttaaaatcggaaatcaaaaataaaaaaaaggagggatttcctgtagcgtcttaaatggaatacattgggactgacgaaaagatgttgtatgtatgtgtgtgcgtgcgtctgtgtgtgtggtgtgtgtgcgtggtgtcccgtaggatatattccagtacttttaagaactctatcagaaaatcagcttaaaccccagtcaaagctatcccctctctttatgctagatgattcaatctaataacagctaaaaataaatcataagttcatcatctattctacttctttaacgttaccgctaaagaaaggtttcgttttttctcgaaaaaaatcgagaaattttatttttcaattattcaaactaactcttcagttttcaaccatcaagaagcattccttgattgtgaatacatagagtataacgggaattgttgagataggttacactttcgagtaaaaaaatcatgattttttttgtcctgatgaaatccggtgtaagtaactccaagaaagcgtgtcaaacgtcatttttcaaactccctccccccttcggggtactccctctataaacagagggagagctggaatacttcctgtcttcggaaagagtcaccagctcctcctctgtttatagaggaggtggcagcattgctgacggaggagttaaaaaataacttttaaatcaacctccttcagaacaaacttcccgaaacacacaaaaaaaagagcgcctcacgacgctctttcttatatgaagattttaaaatcttattttttcacggcttctttcacctgatcgttaggaaccatttgttccttaaaagtataggcaccggttttcggagatttcaccattttgatgatttttgcaaatcccctaccatctgctgttttaagtgttgcaacaactttctttgccatagcttaattattttatttctctgtgtaaagttactcttctcagaatcgggttgtatttacgcaactccattctctcgggggtgttctttctgtttttggtagtgatataacgagacgtacccggcattccggattctttgtgttccgtacactccaaaatcacctgtattctgtttcctttgctcttctttgccatctcttcttactttatacgttcttaattaaaccattggcagtagcttctttcaaacaagcactaatacctttcttgttgatcaggcgcaatccggctgcagatacattcaaacggatccatctatcttcttctggccaataaaaattcctcttaaacaggttgatctcgaatgttctcttcactcttcttttggagtgagaaacatggttaccaaccatcgctttctttccagttatttgacaaattcttgacatctctcaatatttttataaacgctttccaaacaggatgcaaattacgcactttttattcaaacaatcaaatgtttcggtaaaaaagtttcaagttttttttacctcaatataaaatataatatcacgaggaatattgccaaggcaataaattcccggatcactttttttcttctctccgaacccgcctttgtatcggcctttctcaaaatatccagcaacgccccggtaggacaaaaatagttacaccaaggacgggcaaaaaatacggataagagtaaaaatatgacagccaaagcgatgacccaccccgttgcagcggtcaataaaaatgccgggaagggttccaacgatgccaattccaacgggattccccacaataacagagcgagaatcaccataaaatagatcacgcgagtatatttaaatacattcttccacactccctttggggctatttttttcttacgaactttccctaccaactcctgcgctgccccaaaaggacataaatacgcacaataataagccttattcaagaataaaggacaagccaaagccaacacggcaatcacgggcaacaaaatacgagccccccaaggtaccccgttcaacaaccagttaaataacaactctaatgaaacaaagtacccggaccagaaaccaagaatcaacacggaagaaacctgcaacacgtaacgccaacgtttcatccgacttcccctgaacatactggctaacgccaacaaaaccacgattccccccaaagcgtgctgtaacaatttcatccaatccacgtcaaaaccacccccgtcacgttctaggtaaaactccagcgctcttttcacactcccccggatggcatcactcgacatcgtggccccactcacggcctccacgttcagttgctcggcctcctccagcgtcttgccattccacgccgaaaacaggttctttttctccaaacgtctcaaaaacccgggcgactcgctattatctaacaaggtaagtcctaaaatcacatcttcctcggaaacagccaaaaacaaaggcacattcccggcataaccgatcagatcgtccgcaatcggtgtcgtaacaagtaatttaccgacctcttccccgccagccttcacaacatagtgaacttcgttcactttctcaacactcgtacaggtcggaaaatatttcttcaccgcatccagcggaacaacattcgaaacttcagctttcacctcttgattcttcgggacttctttgaccgccttgaaattcaacgaaatcaggtaaatgataacacacaacaaaattaccttaggtaacttcgtgataaaagttgcaacattttcttgtatatccatatcaattttatccatttttgaaggccacaaaaataaggagaaaatcatttatttgtatattctgcccgacttaattatatttgtcacattctaaaaccaaataataaaattcaaaatgaaaaaagtcacttacttagtttgttgcgtaggactggcgctgcaatcctgccaatcagggcaagtgaagaatgaaaatccatttttcaacacgtatgaaacccctcatgaggtcccccctttccacttgattaaaaatcaacattatcttcctgcttacgaggaagggatgaaacaacaccaagcggaaatcgacgcgatcatcaacaatccggaggctccgacatttaaaaacacgatcgacgcactcgaaacttccggcgaattactgaacaaagtagcatccgtgttcggtaatcaacaaggagcgaacacgaacgattcgatcaaggccatcgccaaagagattaccccaaaactcactgctcactgggatgcaatcaacttaaatgacaaacttttcgagagaatcaaaacggtatataacaataaggagaaagaaaatctgaccccggaacaattaaccgtactcgataaatattatcaaggtttcgttcggggtggagccaacctctctcccgaagacaaggaaacgttcaagaaattgaacagcgaactatctatgctcagcctgcaattcggtgaaaacttgctgaatgaaaccaacagtttcaagttggtcatcgataacgagaaagatttatccggcctacccgaaaacgtgattgccacggctgcaaccgtagccaagaatgtcggactggaagggaaatggatctttaccctccacaatccaagcatgattccgttcctacaatatgctgacaaccgggatttaagagaaaaaatctacaaggcttatatcaaccgttgcaataacgacaacgagtacgataacaaagaaatcatatccaaaatcacttccctgcgagtacaaaaagcccagttactcggttatgatacccatgcggccttcattctcgacaacaacatggccaaaactccggagaacgtgtacgacctgtgtaaccaaatctggaatgccgctctaccgatcgctaaaaaagaagccaaagaacttcaagacatgattcgcaaggagggtaaaaacttcaaattgcagccttgggattggcgctattatgctgaaaaagtaaagaaagccaaatacggactggacgagaacgaacttcgtcaatacttccctctggaaaacgtcagagagggagccttctacacagccaataaattatacggaatcacgttcacgcaacgtaccgacctccccgtaccccatccggacgctttggcattcgaggtgaaagaagcgaacggagatcacatcgggattctatacatggacttccacccgagagaaagcaaacgttcgggagcatggatgaacgcttatcgcaagcaatccgcactgggtaaaaaagtaaccccgatcatcacgaacgtgtgcaacttcacgaaacccacgggggatgttccggcattattgagctttgacgaggcacaaacccttttccatgaattcggtcatgcccttcacggtttattgtcacaatgtacatataataaggtatcaggaacttctgttcctagggatttcgtggaactcccgtcccaaattatggaaaactgggccgctgatcccgaagtactgaaagtttacgcccgtcattacaaaacgggagaaccgattccgcaagagcttatcgacaaactagagaatagcggacatttcaaccaaggattcgtcacgaccgaattcatggcagccgctttactggatatggcttaccacacgcgtaacacgaccgatcccgttaacccgaatgaattcgaaaaagccacgttagaaaaaatcggacttatcccggaaatcacggtacgctatcgcagtccctacttccagcacatatttgccggaggctattcttccggatattacgcttacacgtgggcagaagtactggatgctgatgctttcgaagcatttaaagaaaccggaaacatcttcaatcccgaaaaagcaaaagcattccgggagaacattctttccaaaggtggctccgaagatgccatgaccctttaccagaaattcagaggacaagaaccttctattgatccgctattaaagcgtaaaggattaaaataaaaaattagaggattgtgaatcacaatcctctaatt

SEQ ID NO: 158 - DNA, 8729 bp, Butyricimonas faecihominis
acatggataattccagcatcctttgtttcaatgtcgattttttgtctcctttgttcataaacattagagtctttatctttttaaagagacaattcatataataagaagctctcgtatgaaatgcttcattgaaaccccaacaagtaacaacaaatctcacaagattttaccatcttaaaaaaggatgtcaagaaacaaaaaatcacgcttcccttcttcacctcattcagaagggaatctccccttcaaaacattccaatatttcagggtgtagaactccatccggagccgtgaaatcaatccccaaaacttccataataaccggagcaatatctgtaatgttcatttctttgagcacctttcctgccgcaatacctttcccccaaaaaatagtggaagtcgtttcccgaggtaaaaggtaaccatgcttgcctgcctttttaataataatatcttcacccgtggcaatcgatgtaactccgacccccacgattggttctaaagcgatcactacatcccgagagcaacccaattcctctaattcttttctttcgaccacccgaaacaaccctttcttctcttccggcaacgaattcaattttgccctcactttatccaatgttttccgatcattcttatctttcaaatacaggaatgccgtggatcccgccccgtaaaactttgctttccaatttcccggatcactcgagagaagccctgcctccgtcagccatacattgggagcaatgcttcgatttacattagtaaaaccatgatccccggtaatcaccaatacggtactatccagcatccccgcgtgtttcaatccatcgatgatttccccaatcgcataatctaccgctgctagagattttttcgtctccacggattctgttcctgtttcatgctgggaatgatcagtactccataaatgtatggtcgtcagattcggtttatatttatccaataaatatactgccataaacgctgcacgtacatcaccattgcgctgaccggggcgacaggttttatcggaaaaacgtcctattgtttctttctctatctcatccaatatccctgccggggtggaagatttctttaataattcccataaagtgacattcttatcaatcgaccaatactccgggacattgtaatctatatccttcccatgagtggatacaggccagaataaagaacacgttatcaagccatgttccttcgcctttccccagatcgtggggcatttaatcgaatcggcataccaattcgcgacacctgttttccggtttccctcgaagggagaattatagtatatcccatgatggataggacgagctcccgtaacaagagtcgtgtgatttggataggtcatagccggagccacactgataactctttccactaacgtgcccgtaccgaccaactctttcaacacgggagaaggcatttccttttccgttatcatctccaatcgtaaaccatcaatcgtgatcagcacgacatatttcacctgactattttttaattgggcttgtgccaccgagtgacacaaaacaccaattaaagcaagcaacaaaataacccgtttcattacaaatttgtttttcattattacagctcccatcccttgttctgtcccaaagcaggatttatcaaacgagcatcttccggaatcggatatagatactttttctcttcaaatttcttattcacgttgggataaacctgaatatttcccgcattctctcccgtcaaacgcattgaagccgacaacacgtaatacacgacacccggttttgtttgcaccggaatcttcttcacgaaacaaacatccggttgaccatcctgattcaaatcatactccgtatctaatgctttcacgtagattccatcccacgtatcctccatcaaatgcccctctttccaacggcgaatatcatcaaaacgtaatccctcggacaccatttctattccccgttccctgcgaatctccaataaaacggcatcagatattgaaggaaaataatattcctgcaagtacgtgtcggcagaagcaggttccgcagtattcgtgattccagctcttccccgcagcaccccaatcgtgttcttccaatcctgagatgtaaactcccccaattcccgtgccgcctcggcataattcaacaaaacctcagcataacggattaccgggatggtattcgtattcttcgcctgtgccatattcgtattatcatcctgggtaaatttaatcacatgatatcccgttttcgtgtgtcccaaatccggtgccgtcagtttgccattcaatttataagaaggagtacgaatgatttgagctaaacgagcatcccgctcctgcacctcatccgtgaattcaatctcattataatccggctgatctgtaaaacggcgaccatctttacgcaagaaggtatttataaacttacgggtcaaaccgggacgcacccacgtggaggaagtcgtccatacccaattggcatcattatatcgagccatcgttccactataattatctgccaacatcacttccgtcgtgataggcttttcgttggtgaacaaatcccgatatggagtacttcccgctttattcaaagaataaccacccttctccatcacctcgcccgcggcttctttcgcctctctcaaccagtcattcaccgtattttccaaatcgaactcggggtgatacttccggaaagttccctcgaacaagcacacccgggatttgaatgccaatgccacccaacgattgatggtcgatgccgtattatctttcgtttcatatatatgggtacatgcgaaattcaaatcttccagcactttattcatcaccacttcacgagaatcccttcccttgtacaagtccggatcgtcattctgcatggttttatcgtaccaaggcacatccccgaatttcttcactttattgtagtagaaccaagccctgaaaaaacgggcaataccaatataatgattgcggacggtttccagtatttccggattatcacttcttgccaggaaataattcacattatacaaatcctcccaatcccagccagaagcatctaacgccgtgtaattaccattgataaacagatcgggagatgcagaggtcgcaaaataatcggataattctccatccgtcttatatatatcttccccctccggcaacatctcataaaaagacatcacgtaaagattcagatccttctccgattcaaagaatgtatccggattgatcttatccaccggatatttatccagatcacacgccaccaacaagatggtacacagcgcgtatagaacaatttttattgtcttcattttatcttctatttttagattagaatgtcaagttcaacccgaccgtaaaggtcttcaacatcggatagccatttccgccaccaaaagcatcctgcgtctggtcatcggggttttgggcttctattgtttccggatctatatttcgggtaattttaaatatcccggaataagtccataaattctgtcccgtgaaatagatggacgctttttgcagaccgacatgatttataagacgtttgggtagattataaccgacggtcaaatttttcaggcgaatataggatacatcctgtaaatatctggtctgtggcacactcaatgatttatctgttccgttagccaacaatcccgcgtaacgagggaagtaagcattcgggttcggattagcctcatcagcattgtaatatttcccgagaatatgcttcggtagcggagaataaggacgattgtattgcccccaaaaatacacactctccccagtcggataccaatcccgtttgcctaccccttggaagaatgctgacacgaagaaattattccaatccgcattcagattcaacccgaacatatatcgaggctctgaatttccgataatcttccggtcgccggaatcgcctacccgattagcaccgggagtaatcgcgttatctccatccagatttttgaatttaatatcacccgggtaaacaactcctgccgcgttcgacttaatccgggattgatcgacatgagcatcgatatccgcttggtttacaaaaagtccttccgtcacgtacccccaaatttcaccgatcttcattcccttgtaaaaatcatccagactcttgttcgggttattgtacttggttacttcagtctggttatcggcaatcgtgaatttcacgccgtaaccgaacggtttactctctccgatccgatcgttccaggcgactgccaactcccatccccgggtgcgtaaatccgcgttattccctttgggtacctctgttccgaatacttccggcaaagttgctccttccgtgaacattcctttcgtatcccgctggtataaatccgcgatcaagctaaaacgggaactaaacatcgaaaggtcgaatcccacgtttaacgttgtcgctttctcccatgtcaacgaacttggaattactcccggggctttcgtgtaagtcgggaatttacccccgatcaagcgggtcaaggtgcccacgggcatcgtttccatgaaaagatagggagatatatttccattccccaatgtcccgtaagatgcacgaacctttaactgagaaaccaagtccttgtttattttccaaaatccttcctccgacaatctccatcctaaagacaccgaagggaaaaatccgaatcgttgattcttcgggaacttagaagaaccatccacccgaccatttgtttctaacaggtatttttctttataattataactcaaacgatagaaaccacccacgattgcccagtcattcgatgcatccacggctgaatacacctgcccgtctgccaacgaaaaacccggattgttggcatccaaaagcccgtcccggctcacctccaaactattctcgtttgaaacttcataattataaccgaccaatccccggaactgatggttcccgaatgtttttgcatattccacgaacaagtttgtactgaaataattcgtgcgtacattcatatcaaaatacttggtagaacccagccagacaatcttatccgggatattgctgtacggcacggcagaataagcccttgttttcgtagaattacctatcgtgaatgccatatctcctgatatttttaacgacttatcaaagaatgtcgccgtgaaaccgctaatattattcaccttggaacttctggtcttggacttgttctttccgtaatagaaatcacctatactacgagcacccatctcggtgatcgttccgtcggaatttaacatcggcaccacgggaaaagcccgcattgtccatcccatcgatatttcgcttgtaaaaccgtatcccccgtaataaataggagccttatagtccatttgggaaaagtcaaaattattatacactttcaaccaatccgtcacctgaatatcacctttagcccgtacgttataggttttataatcatccgaattatagcgatatatcccgtcttgcgtgaaataacgcccggagatataataagaagcggcatcgcttccacccgaaaaactcaacgaatgctccatcgaaggattcacgtccttatacaaatctttcaaccagtcgtgattgtcgtaataaacgtatttcccggttgttggatctatttcctctttcggcagggaaggatcttcatcccgtcgtttcagttcctgcaaatattcctgcgagaaagggaatgcagaatttatcgctgttggattctgtccataccactggtaatgagcctcgttaaacatctttgcccactggtaaccattagtcaccaagtccggtatcacggtacgtcgattgatagaatagcttcccatgtaattaacgctcaccttacctttggttgcacttttcgtcgtgatcaagatcaccccgaatgtcccccgcgctccataaatagccgcagaggctgcatctttaagcacggaaacactctcgatatcattcggattcaatttactcggatcaccctctactccatcgatcaacaccaatgcactacctccagcaccgatagaagttgttccccgcacgttgtattccggacttcgggacggattaccgtcatacattttcaaattcagattaggaataacaccctgaatacctctcgagaggttcggcatcggcctattctcaaagacagtagcggaaatctgatccacagagcccgtcaagtttacctttttagttgttccataaccgacaaccacgatctcatccaacccgtaggtttcttcctccaacgtcacatcaatcgtcgttcgcgaattccaaatgacctttaccgttttgaacccgactgaagtgaagattaacgtatccttaggcaacaaccctccttttactttcaattcatagtatccgtcgacaccagcaacagtccctacgaccaaacgtttgacaactatagtcgcgccgatcacggcctctcctttcttatccaaaactcgtccacgcactgtctgagtcatccctgaaaaagaaaacgagagtatcaccaccagcaacaataatcctttaataaaagactttaacaccatactctttctcatagtttttaattttattgcgagagcaaaaatagtccccgcctattactaaacagctacgaaaaaaagtcggtatcgcaaactttcggttacgaacagattactaaaataacgtgagttcgatataactcaaaacattttcatatactgaaaagcaacgataatcccatcccacaagtcaagtttgcaacccacaagcaacccaaatacccctaccctctctttaattctctttatctttgtatcaaaatacacgacaagtcatgaaaagaatcatctatatcattttttgcacgttcctcatctcatgcgggcaatacaacgccgaactggaaaacgccttaaaactagcgggagaaaaccgacatgaactcgaaaaagttctctaccactattctcaaaacccgtccgacagcctcaaattgcgagcagcgacattcctcatcgagaatatgccgggccactacacactggaaggctccttgatagatgcttaccgggaaaagatctattctgacacgatcgcatcatactttgccaaaaagtcacttgatatatctctttcctacatggaccaatttcgacataccgccaacaaaaaggaagacgtgcaaaatatcaaggcggattttcttatccggcatatcgatcgttcgttcgaaaatctaaactcgtattcttggttagaagacttcccttttgagctattccttgaatacgttcttccttatcgcttcgcaaatgagcaattggatttatggatcgactctttgcacatctccccggatggattacaagaactagcacaaaaagataacatcaaatacagcccaacaggagcaacattgaatctaagattctcggaaccaacagtcaatcttcgtcccgatttcattcaaaagctattccaccaaaacatttacagtgattgccatcatatctccttacgagaaaacttcaattccagagctctctgttccccctccacgatcgatttcatcctgcattatgccaatcgaaacggctatcattactggaacaagatcgtatccccggaatttaagaattcagaagtaagaggagctttcgagcgaaaaacagccaaagtatatcgaaaaacatactctaaccattcatctataaagcccggcactaccgagtatatccctgaatttttcaaggacccgttccatctagatgtcagctccgagtatctttatacaaccgatgtttcaatacacatcccccaaaaattggaaaattcacctcattatgcttacttgtgtgttttcaataatctgacatggaatcccattgccatcggggaaatcacctcttccaccgccaaattcagagatatggggaaaaacctcgtatattttcccgcttattaccgcaggaaaaaactcacccccatcaactacccgtttatattcaactctagaggtgaaatcaaacatcttgtacctgataccaataacttacaaaaattggtgctaacccgaaaatatccctcgaacagtaacctatattattatatctcagctctcacgaaactctccgtggaagcagcaaatcaaccctcatttcagaacccggacaccctccttcgctctctttcgtccatgggagcctattgtgaaggaaaaataaacacggacaaaaagtatcgttactggcgaatctcccatccacattcactctcgtttgccgaattattctttctcgattcacgaggcgaactcgtccggggtcaagcagactctatattctacgccgcatttgacggggatccccttacaaatatcaataggtatgataaaaagaacttagtcattgatttcaatactcccgtcagcctatccaaaatcatttgtcttccccgaagtgacgggaacgggatatatccagacaatgaatacgaacttttctatcatgacctaaaaggttggaaatctctcggtcgaaaaatagcaaacggtttcgagatcgagtatgatcacgtcccccaaggagccttgtattggttacacaatcacaccacgggaatcgaggaaaggatatttaccgtcacggatggaattatacgtttttggtaacctcttttcatgaatac

SEQ ID NO: 159 - DNA, 8718 bp, Butyricimonas faecihominis
tttatcttgttgttgtgttgcatgtgctttgcatgtgcgaagtatccgggagtgccggaaaaatatcatgctttgttggacaaagctttagaaacgtcgggaacgaatcagccggaactggcaaaagcgttggaaagtgcgacgccggaaatgaaggagggcgtggcctttttgatttcttacatgccggagcgggatttgaaaacgatgaaaggggatgatttgttgtcgaacgtgaaattggcatacgaggctcgtaaccgttttgcttgggcgaagagcgtgccggattccattttcttgaatgacgtgttgccttacgcttcactgaacgaggaaagagatcaatggcgtgccgatttctacaagagattcgctccttacgtggagaattgcaaaactttggaggaggcaattaaagccgtgaacaagaacatccgtgatgaagtgaaggtggattacaacacggctcgtgagaaaccggatcagaacccgtcagagtctattcgtcagggaatggcttcttgtagcggtctgtctattttgttaacggatgctttgcggtcagtgggtattccttcccgtattgccggaacagctaactggcatgataaccgtggaaatcataactggtgcgaggtttggttggatggtaaatggtatttcaccgagtattacccgaacgaactcgatcgttcttggttccttgccgatgccggaaaagctgatccaaaggatcggatgcacgctatctgggcctcttctttcaaaccgacgggggagagttttccgttggtttgggattttaatattaagtacgtgcctgctatcaatgtcactcaacggtatttggatatttatcaagaggtttatcaatctcaattggctgggggaaattatgtacctctaaaggtcatgatgtttaaagataaacgcaatatgcgtaaatctgatgatcgggtagctgccaacgtggacattttctgcggtaaagaccaaatcggtggaggacgtactgccggaccaacacaggatatgaatgacgtgttggaatttatggtggaaaaaaataaagtatatacgttgaattatttcgataaagacggtaaatgggtaggtgaagaagtgaaagtgaaagagaaaccggtagaagtgaaattacacttgtaaaatcaaagggcggtcttttgaggccgcccttcggttattaattctttggtattgcagatacaatcttgagattgttagcgtctatcgtgacatcgaattcccgatctccttgttcaacttcaaaaatgtaaacgagagaaccgtctgctctttcttcataatcaatgtcatctatccggtagttcgcgtaggaagaagttttcaacacgttcatcacgttagccggaacattattttgcagtacttcccacgtggtgacaacccattgattctggtggttgaacactacttctttcatgattcgttgatcaataatgtcaattttcaatagccctttatcctgatctatttccacgatattggcctgcgggtatttctgccggatgaattgtaaaactgcctgtggtgcgctctccggttgatagccccgaccgttatccatgagggtttttaccagtgttccattttccagataatgcagggcgacttcttgttccccgagttcggcttcgatgatgtagatggtttccatcccggctctttccagtttgtcaacgtcttctacttcccattttccgtattctccggattcaaagctattgcggattaccacggggagggaactatacttgacgtcgctttctgtcatcacccattggccgttgttgtcaaaccaagcttcggcttccgtgaagtcgatatggaattcggccacttgatacgtgtttttcacttcccattctactcgttttgccgagggatatttggctttaaaggcactcacgacgtttttgggtggagtgtagctgctgtctttgcagctactaaaggcaaacgtggtggtgagtaggattaatgcggtaactaatgttgttttcataatttctaatttaagatcctcttgttttacgttacaacaacttaaatgttacctgtttattatcccacgatgtttccatccatatctacagtcacgtatttctcgttatcgccttgttccagttcgaagatgtatactttatttccgtctgcactttctttgtaatcaatatcatcaatgtggaaaccgggatttgcggccttcactttgttagcgatttcctgaacgtctctttctctaacatcccaagtcgtgtataaccattcattagcactattgaagtgtaattctttggctttgttatcgtgtaaaatgtcgatttcggtgattcctttttcgacttcaatgtccacgattgttgcttgcggatagttcttgttgatgaaatttttcaagacttcagaaaccgtgttaggctggtaattgttgttgttatcgacgtcttctacggctttaactaaagttccgtcttccgcgtagaataaatcgaattcctgtttgcttttttcaacttcgatcacgtacacggtttccatttcaactctttcgagcatatccacgtcatccactctccagtctttgtattccgattctgcgaaagcggtttgtatggcttccgggagattcttgaatagaatgtcactttcggtcattacccattcgcctttggtgttaaaccatgcttccttctcgatgttattgtcatagaagtcagccacatagtggtcgtgttgcagttcccaatcgatacgttgtgcgttcgggtatttttcgtatagaacgttcacgattttctcatccggagtgtagttatcattgtcatcgtcacagcttgtgaaagcaaatccggctaacaataaagaagcgaaaatagtcattcttgttttcatggcatataaattttaatgtttgtattctttgttccaatttctgagaacaaagtaaaggggtgattttggaaagatttgggaatcgaaattattttagatttaaaaaattgaagattctgtgatttatgatttccgattcagtgattttttccccgtgaatgtgtgccttttttaatcacggaatcattgaatcggaaatcacagaatgatatattagaattgtaaatcgaatcggtgtttaccgtcaaaggagtaggaaatgtggaaatgataaagatggacgatactctggacgattgccaatcctagtccggtggaatcactttttttgttgtcggcttggtaaaaacgggtgaaaaggcgggattgatccaaagcgtttccatctgtgctgttcgtgaagctgatcccggttgattgtatgcgaatggtgatacttccctcgttcggggtgtgtatcatggcgtttttcaacaggttcgtgattaatatatttgccaacgattcatttatatggattttacaaacggcattttcctccacttccacgtgcagttttttgtgctcgtaaatctcttgaaaatcttccacgagttctttgataatcgggttgagttccacttcttttgtttcgtggaattgaccgttctcgatacgggaaaggagcaacagggatttgttcaatttcacgatacgtcctagattccggtggatgtcctcgatttcttccagttgcccttccgtgcaatccggtcgttccgccagtaattccagcttgttccggcaaatggccaacggggtctggagttcgtgggaggcgttttcgatgaattgtttctgttgggaatacatctcttcgtttcgccgggtcattttaagtatcgtttcgtttagtcgttggaactcttttatcttggtcgggttctccaacgggggattcttcccgcctagggtgaatttgttcaaccagtccagtaatttgtagaaaggggccaagcttttcctgaaaacaaattcggaaacgatcaggatacaaataagtagcgtgatgtacaggatcacgattgaccataatattgcctcgatcatgtcgtcttgttccaaggttgagatcatgatggtcaactcgtaaaactttttgtcctgtccccggaaggccgtctttaaaacacgaacgggatcgaactcgtattcaagctcgtagaaacgggtcgaatcaaaataacgttcttggtagtgaatcgcctctttttcggatatttccttgataaagtattggctcatcaagtcactactattgttgattgctgccgtgtctcgctggacttgttgaatgatgagatgcttgtagttttcgaggctatcgtccgtctcgtccagaatttcatccagtatgctataaaagaaaaagcctgcccagaacgtgaggataataatcatcacgatcgagagtttacttatcgtgtggtggatgagtttcatgcttccggcgttgtgattagtttatacccgaacccgtacacagcttttatctccgggatggcctcggcgattttcatctttttacgtaagtttttcacttgggaatagataaaatcaagactatcggcttggtcaatgttgtcgccccacacggcttccgccaacgtcgttttgttgatcaggcggttgggattggtgacaaaataatagagcaaatcgaattctttacgattgagtttcagctcttttccattgatgaacacggtgtgatcgtcgggacggacggtcaggttttcaatttcgatctcggtattcccgtcggtttgatggcgtcggatcacggatttcaccctcgcgtgtaattctgccaagtggaatggttttgcgaggtaatcatcggcaccgagatcaagtcccgtgaccttgtcttcaatggaatccttggccgacacgatgatcacgctttcccgtttctttaattttttcagctcttctagaatcgacaaaccgctacccccggggagcataatgtccagcaagatacagtcgtagtcgtaatcattgatcttttgcagggctgtagaatagtctgccgctgtctccacgacaaaacgttctttctccagtgatcgggtcatcacttctcgcaagtctttttcgtcttcaatgattaatatcttcatggcgttgaaattttatagaacaaaaatagtaatttattctggaaagaatctggaataaattttaaataagagacttccgggagtgcatttccgatttattcctttatatttgccgcaatgcaaaaagaggttgtatgaaggataaagacctgtcttcggacattccggctacggtatggcctgtcctgttgtttgggattgtcatgcctgttggggctattctgatcttacatcattattatttgcttttttgatgtaataataatttaaataatagaaatatggaatatccgagtgttgaggcgttaatggaacagatccgggattgggcggaagaagaagattacgatgcaattatagaggctctgccagagctgaaaaatcccggtcaattttacgaggcggttttgtgtcttgcttatgcttatttgaatcaggggttttatcgggacgcggaagagtggttgcgtgaagtggaagaccaaggacgtgagagtggtgtttggaattaccgaatggccgtggccttaatgcatcaaatgagactggaagaggcattgccgtatgccgaacgtgcggtgacggtggaggcggattacccgtggggatggttggtgtatagcaaattattgtatggatgtcaaagaaccaaagaggcgctagaggctgccgggagaggtttggctttgatgccgggagacgaggaatttacttcgctgatcgaggatatttccaacgggttgtcattttttgaagttacgggcgtggaggaagacgatgggaaggtggagaacggggaagagaaggccgggactttttgcgggtccgtgttgctaaactcggtgagtttcgacgtggataaggtcatggctgatttgaaggcggagtggggaatagaaccatccgataaaccgggagatatggccagtgatgatacgcgtgcagacgaatcgacccgggtgttttatctcggtgagactttggtggcgatcagtctcatgccggcgagagttccggatggagaggccgagtattatgcagaaaccaattatatgtggccggaagccgttgagacaacaaaaacacataaggctcacgtgctggtagcggttcttgctcatggcttgaccccggtggaagcgggtaagttacacgtgaaagtgatcgctacttgtctgagacagcccaatgctattggcgtttatgtttccggaaccgtgttccaaccagaattttatatcgaggtggccaatatgatgaaggaggatgaggaaaacttacccgtgttggcttgggtgtatttcggcctgtaccagagcgaggtgggaaataacgtgtacacgtacgggatgacggctttcgggaaagaagagatcgagatattgggaagtaaacatagtttgaccgagttacaaggattcatgcttgaaatagcctattatgttatcggttcggacgtgacgttacgggatggagaaacattaggtggcagcgaagaacaaaaattaccgattacccgctcaaaaggggtggccgtggagggtatgactttgaagattgaatattaatcagaatctatttcgagtttgatcatatggagcgtattttataaggtctaggagtttgatattgttggcgattcgttatctttgttggtgataaatccttggaataggtgaaaacagtgcatggatagtgatgatatatttataggattgaagcgtcgggatgaagcggctttgtctgttcttttcgatacatattacgagaagttgtatcttttcgcggaaaagtatatctatgattcggataaagcgcatgacatcgtgcaggatgtttttctgaagatatgggagaatgccgaacgtttggagctaacgtcttccatccagcattatcttttcgcgtccgttcgcaatggttgcttgaattacttgaaaagtctgcaaatcgaggatcgtaataatcgtaagtatgcggaggcctatattgagtcgcagaacgtggatatggtggacgatgaagaactccttgcccgcgtccggcaagtgcttgacgagttgccggaaaagtgcagggaagtctgtcttctgcgtttcgtcgaggggtacaagtatgctgaaattgcggcccggcttgatatgaacgagaataccgtgaaagcccagttgcaccggggaatggagcgcttgaaacaggcctttgccacgtatgactacgtgcttgttctttgcgctctcggtcggattttcatggaccggtgattattccagtatgatattcgtgtatttggacacggaggctctcgtgttcaccggggagagggcgaacgcataagcgacgcagttggccggggtaaaatccttgtgtaaagggatttctttcgttccgggtattcctcgttttcctaacgggtaggccagcgtgtcctgttctttcgtgtcgtggatgactagatatatatcgtcctcgtctttggcgaggggactgaggggttgacggaaccactccgcacggacgatgcgttcgttttcccggatatggacctctaccgcgggttgtgtcaggtttcccgtcgtgcaggtcactcgttccaagcggatcgtgacgtcgagggtttccgcatcaatttccacagcattttgattcatcccgatgaatcgggttcgggcggtggaccaagattgacgggggaatccggcttgtatagccgcgtagaaatggtaggacaggtcggaaagtgccttaaagcgggtttgttggatgacctgtgccggggattgttttttctttttgaaaaagatttttcccttggcgatgcttttccccttgtacttgcacatcgtgacgttccccacggagccggaggcgttatcgaaaatatgtgagtgaaatatagccatactgattttagatttatgatttacggttttggattgaaggattcagatcactttagcttaaccttgtagtaaaggctattcgtgaacgagtccctgtccgcgttcgtgaagaaggcatagacatgagcttccgtggcatccggttgttcgaggggaatgttggcgatcccgtcagtccgggtgatgcccgtgttctcgatgatttggacccggaaaggttcgttgtcgtaaatcacggcgagtacgagttcatccttgtttctgcggtcaagaatccacggggtggtttcccagttgatcgagagaattccttccggggcatcctgttgccggaagtggaagggcatctgtaagtcccccacggtaaattttaacagggcgaaatccccgatgttgtagtccgtgtcgtacgcgttgatattctccttgacgaaaaggttgtatcccgaagcgatgttcctgttgttcgcctccctgttccacgagtaaaccaaaaacgtgttcttcacggattgataaagggttaccaccgatgacaatcgggtgttttggtgggctctggtgggtgaacctgcgttgccatcatacgagggaaatttgcgaccgaacgtttttcctcttttgtggtatataaccataccatcgaattgcccgtgggcatcttttaataaaccggatttaatttctaccataactttactattattaat

SEQ ID NO: 160 - DNA, 8705 bp, Butyricimonas faecihominis
ggaccaaaaatctgtttaactaataaaagataaacagaaacatggaaatagatgacaacatatttcaagccattcaagcttgttggactggaaaagcctctccggaacagatagaactcatccgagactggcttgacacaagtcaagaaaatcgggatctatttgaaagattaagcaagacccattatcagctcgcacacgttcaaacatggaaacgtatcgattccctgcaaggaaaagaaaaattgaattcccgtctaaaaaaacaaaagaaatccttccattggaaataccttgtatccggtgtagcagccgcttgcttaattctttttgcggtaacgagattcattcctcacgaaccctccccggaaaaaacgatcctcgacttggctcaagtgaaaagtggtagtcctaaagccaccttaatctttgacaatgggaaaaagattcaattaaatgctgatgataccttcgaaataaaaatcaaaaacaccatcgttaaagatggtgaaaacaccggactaaaatacgagcttagtgactctctttcaacacgggcaacaaatgaaaccgtcgagtacaacacacttgttgtctcccgcggtggagaatacatccttactctctcggatggaaccaaggtatggctaaactccgaaaccgaactaaaataccccgtccggttcacgggtaacacgagagaggtcagcgtgaaaggagaagcctattttgaggtaaaacgagacacgctccgctcctttgtcgtccacaccccgtactccaacacgaaagttctcggaacttcgtttaatgtcagcgcttacgaggatgaaacgaccacagctataactctcgtgagtgggaaagtcgaggtgtacaatcaacatgaaaaatgtattctaaaaccgggatggcaggccgtcacggagaacaaatccgggacgctgaaaacacgggaagtagatgtcactggctatgtctcttggaaagacgggatgttcgaattcaatgatatgccgctggaacaacttgtatcacagttaagccgctggtacgacgtggacttcttcttcgcaaacagcgatatacgagacttcaagttcacgggtgctatcaaacggagtaacacgctgttattcatgcttgaatttattgaaaaaacatctaatgtttactttaaagtgaatggaaatgtaatccagatatacgagaaataaaaaaaagaccgtcaggtgttcgcaccacctttcggtcccagttcagttaaaacttaatattacaaatgtatgaaaaaaaatccattaacagggttcgctttcaaaaaaagcgaacgttggaaaatctttttgattatgcgactaacaatgattctacttgtaggcttcatattcggagcaagtgccaactccctgggacaataccagatgaaggtgaacatgggcgaaacaacctatgaagaactattccgggaaatccgcaaacagacgggatgtatcgtgatgtataacaacgatatgctcgataaaaatgccaaagtcaaggccgatttcgaccagatcgaattaaaagacctgttacatcgcgtgctgacaaagcggggattgacttttgaaataaaccgggagttcatcatagtcatgaaagccactcccaaaacagacgacgtgaagaaatacagaatatcgggtatcgtgaaagacaagaaaggcgaacccatgccgggggtgaccatcaaactggacagtatgctactgggaaccgccaccgatgtcaacggtaaatttgtcctcgaacttcctgtatcatccggaaacctcgtatgctcgttcgtcggctataaaaccaagaaagttccattcaaaggaaataaagacctcgtggttattctggaagaagacatttcagaactggatgaagtacacgttgttgcctacggacaaacgaacaaacgggaaatgacgggggccatctctgtcgtgaaagcagagtccatcaagggaattccttccccaagcatcgccaaccttttacaaggacgggtagctggtatggacgtaaccaacatcacgggagcccccggtggcggtggaacccaagtcaccattcgcgggtacaactccctcagcgtggaaagtggacgacgattctctaatcccctatgggttgttgacggggttcccatggcctctttcacctccccggtaaccggaacaaacgggttggccgacttgaacccggaagtgatcgaatccatccaaattttgaaagatgcttccgccacgtccctttacggatcaagagccgctaacggggtaatcatcgtgaccactaaaaaaggccgtaaaaaccaatccgctcaatttgatgtcaacttttcatacacgtacaacgtgctaccggaataccccgtgcaaaccggagggaaagcagaacgcaatttccggctgttacaacgtttcaatgcccgtaaagcttataaagatcaagataaaaatatgtatatctatcccatctcttatgaagaggcttacaccaagggcggttcatacgatgcctactggggagatgggactgtttccgggaacaagaacggggatgaattacaagatagcttaaaccctttctacaacaactctaccaacttctataaatactatttccaagccaccaaaacactgaatgccaacatacaaacatccggtggttcggaacgaatgacttattccgtgggattaggttactacgatgaagaaggtattctgaaaggaaccgggtactcccgaataaacttgatgggaaacttcatcatgaacccgatacccatgttaaccgtggacttcagaaattatctagccttctccgatcgtagtcggggcgtgaaaagttccggattctctgccgggaacgaggtggaagtcattccgggtgacccgctatcgcaatccaccctactaccgggcaacaactcggtcaccgaagaggtattaaaaggtctacggggtgtagaggaaaaaaacaacacctaccgcctacgcagcaccttcggtttaaaactggacattatgaaaggtctgaatatttccaacacgatttctctcgactattcacaaaataaccgaaattacttctctccttcttggctgaatgacccgaaagaatccttaaccaacggagaggttagccgggaatacacgattctagacgaggccctgatcaattaccagcaaatcttcggtgaacgtcacaaaatagatgtcatgctgggatattcctaccagtacgaccaatataattatatcgggggaaccgcccaaaacggtccgagtgactacgtgcattacgccacgaaatacgggtggccctctctcgcagatagagactattacacgcaagccctgaaagactaccaatctgacttcaccgagaaaaagatgatgagttatttcggccgtcttaactatgtcttcgaggaaagatatatgctaaccgccacgttaagaagagacggaagttccgtattcgggagggatttacgctgggccaccttcccgtcggctgccatagcctggaacttctcggaagaaaacttcatgcaatggttcgaggcattaagttttggtaaacttcgtttcagttacggggtctccggaaaccagttcaaccaaccttatttggcttacggcttacttttaggcggccaaggttcttacgagggcaaccccatcattaccccagatttacaggaaggatattataaccccaaactaggttgggaagaaaccaagcaatatgaccttggtcttgacatgaattttttcaattatcgtctttccgtcacagccgactattactaccgccgcacggacaaaatgttaagcaaaaccccgataccgggaaatcattccggctactctgccatgtggagaaatgctggagccctttcaaacgaaggtattgaatttgacattaaatatgacatcatgcggacggatgattctttctggaccatatctgtcaactttgccaaaaactggaacaaattactggaaacctacaacgggaaagatatgaacatgagtgacatgaccgggaatagtcgtagctacattatcggaaagcccgtcggaaacatcatgggatacaagacaacgggatacatccagtccgaggaagatattaaatactactatcgccaagacggcacgtaccgggccatcgagaaacaatacttctcagatgtattctacaaacccggagatttacagatcgttgacgtgaacggggacggctacatcaacagcacatcggacgtcgtgtacatcggtagcagtttgcccgtactatacggtggtatcgtgaacgagatcaaatggaaaaactttgacctgaatatgctgtggtcctactccctaggaagagacatgatcaacctgctcccgatcgtctcaaccagcaaggaaacctccctgttccccatctttgaagacatacagaaagtatctttctgggagaaagaaggcgacaacagcacctatcccaaagcagaactcaacaatttcaatgatagctggtctccggtgatagatcgctacgtggaaaaagtaaattatctaaaacttaaaaccctgactatcggttatacactccctaaaaatctcctgaagaaaatatacattaaagacattcgcgtgttcttcagtggagagaacttgttgaacatcacgaactactcgggactagacccagaaaccgtggatataaacaccggactcgacgatggtaaaaactacccgttggcacgtaaactcactttaggtataacgattaaactatgatagccatgaaagcgaacaaaatattattcatactaagcatattatggggctgttttgcctgcacggacggattggaagtaattcctgaaaactccgttacttttgagaactatttcaaaacggaaaaagacattgaaacctccctgaatgccctccgggacgaatttagaagtacttgtgcctttaacgcaaataagacccccatcgacctcggttttgtacacgacacgttaagcagcacctccgcacaaaagagtttcaactgggatgcctcacaattcaccccgatttacgttgactttttctggaactcacactacgcaataatctgctacgccaacattttattggaaaacattgacaaggccgagattacccaagacagaaaagattattacatcggactggcacatttctaccgtggattcacctatttccgcattgcccaaaaatggggagaggcacctttacagactgacagccgagatatttctaaaaaagcgaaatcatccgttgcagacatcctacaattcgccctagatgaaaccaacctagcaattaaacttctgcccctgcgcgatggcttgattgatgccaacggatcacaggtaaccgacaaagccaccccgtccaaggagatcgcccaggctctcaaggcagacctttgtgcgtggaaggctgccatcaataacgaaccagaattatggcaggaggccattaacgccgccaacttcgtgattgactcctgtcattacaccctagctaccgaccccgaagaagtatgtaccaaagtcctacccggtggaagtgacgaaggaatctttgaaattaaattcaattacgtggaggctacccgtaatccatggacacccatggaagaattcgtcacgttcccgattcgaccggaagacggacggggagacatcaaatactgctacgcccgcatgttcgaaacaaccgtggataaaatgtacccgggtcactttgaagggatgatcgccgagggtgtgtaccaaggagacaaacgccgattggcctatttctatgacctcgacacaatccgtaaaaacgccgaatggcacgctttggccgagggatatgcctacccttacaaattccggaaagtacaactaggaacaacttcatggagccaaggtaaattcgaatgtttcgcctgtgaccacatcatttatcgcctagcagacctcattctcctccgggccgagtgttacgctcgcatcaacaagaatgatctcgccacaaaggacctgaaccgcatccgagaaagagcctacgggaaccggagtcatgattacaatgccgccacggaaggaagcgacctaaggtacatcattttcaaggaacgggaaaaagaacttttatgggaagggaaaagatggtatgacatcgtccgtaatggatactggaaaacagagttgtccaaattccatgccactcaaatgactcaacaagacgtggataacggggccctatacatgcctgtcggttacccggctttcaacgagaattcacttatgacccaaaacaaatattggcaagcacgctattaacattcaccggaataaaaattgaagattatgaaatacattttattaagcatattcaccattggcattctaactagttgtgatcccaaaagcaattacatagataccggtatttccaacgggaaacatgactgctccatgctcgaatacttccataccagctcctacaactgggactccctgctggttatgattcaacatgcagaactggaaagtctttttgaaggccgagaacccggctacgaacaaatcacgttctggggccccacgaaccattcgattcgccgctatatgctagacagggagattacaagaataagcgatatgagtaaaacattctgtaaacaaattatcctcatgcacgttgtgaagaaacggatcatgaaagacgaaatgaatttccgaattccggatgttaccgggaaaattgtcggtgccacagaaatgaccacggcaggcggcgttactctactgggttaccgggagaaatcagaatacgggggtgttgccgacgcaggagccgttaccctgtacctgttctcgaagaatgccgaaacccaaataccattagcctctccggacattgaaacgctgaccggggtcgtccattctttgaattacaattacacattaggagaccttgtccccaaaacagaacttgaaaaaattgaaaaactttaaatcgacaagaatatgaaatacatatctatcattatctgccttgccctattttcctgccacgatgtaaaagtaggatatttagaaacagaggtcgcccaatataatccgaacgtactggaggtcacgaaatcccaagatgcgaatgaacccctacacgtggtctctccccccatcgagggtgtggaaggaactcaacccatctacatcacaatccggcaggtgacaacaaccgatggcgacaaagtagcttttctgaaagaggttacggtccgaggaaacggtgcttttgacattcccgtttacaacaatatcccggcaggaacttatcaaatcagcttacaggtggaaaacgaggaccactcagccattctcgaagacatttttaccatcgtggtgaaagaataaggcacattaaataatcgtagtacacaaaatcggggcatatctttttgacaagtatatcccgattttcgatcgaaaccaatacctttgtactaaagattgtatgaggaatcaccaattttttataatggcatggggttacttttttcatgttgacagatcgctacttccatgaatcaagtcaatcccaagtcattatacttatatcatgtttcatcaaaaagactaaaatctagaatctatactcattatcccattgctaaaccctctcacagaaataatacagtttccgggaatagtatttaaaagcaaaatatcatcaaaatcagaataattcctatatacgataatccccaacaacaaattgaaataatagcttgtaataaatcaaaaaaatcatacctttgtattaaggattgagcggagagccgccataaatccgattatgatgttgaggttaaaatccgacatggtttaggagttgcgaaccaggcttatagccattaaaccatgaagattgcaacactcacgtttgttacacgtatattcttttcagaattatacttatagcggcgtggggttgcttttttcatgatggcagacgcaactcccatgaattaagtcaatcccgagccgttatgccatactccggattgacttgctcggtccggattttttattgaccgggatatagaaacaggaatagccggaacctgcattgatccggctatttcccctgttgatttttaccccaacatcaaataagacaatttagaattttcatcgttgacttggttcagaccaacacgaagtccggacttacatttcacaattgcaaccagtgaaaagacttcgtgcaggaagggggacgatccattttcccccttcctatttctattacagtatcttctacaagcatccatctcgacgctcgtccctgattgctccacgggtaaactagggataaactataacaagtgccaagtaatgacaaggcaagaacacggcaaatacatgagagattgttcttgctatgttcatgctatgaagatgctgtgttcttgtcatagcctatcgatagacaaaggatagtgtattgtcctgaaaaaagtttacagtaaacttagtaaaccaatgtcagaattaaattttccccctgttcgtcgtcgttattacgccgtgaagacgaaattatcagcggtacgagatcgaataatca

SEQ ID NO: 161 - DNA, 8688 bp, Butyricimonas faecihominis
gctttatacaatttattgaatgtcaaatctagtaaaccaattttaggaaactacacagctattgctcatgtataattccacaaatcgttattaacaagggcataaataaccacttaaaaatcatacaactaacaatatcaaaaacgattatttggaagaaagctaaaatattctccccgacaagcaattcaagttgtctaaatatctctcaggaaagaaaaatggagattttgaaactttatatataaaaatacgaaaataaaacagtacattagtaacttcatttaagaaggacaggcgttcttttagcgcccacacccgatattttacgatttagattatgccaaagaaagagaaaaaaagcaagagagacatcggtaaaaaagaattacaccgattattatacgatatattttccggtaaccccgatcaaaacttcaattacaagcaactagcccaaagactaggcatcaagaacatgaatgccaagcaattgatcatgacggttctttacgagatgaaaaatgacaacatgctcacggaagaatcgaccggggtatttaaattcaaggtaaataccatttacgttaccggaattattgacctgacggccaaaggcaccgcctacctgatctcggatgattgcaaggaagatgttttcatcccccaagtcggtctgaaccacgccttaaacggtgacaaggtaaaagtgttgctctacgcccggagttccaaaagacgccccgaaggggaagtagtggaaatcctcgaacgcaagaaagagaccttcgtgggcatcatacaatgctccaaacaatacgcctttctcgttcccacgggcaaacagttaccctacgatatatttatccccctagccgacctgaacggggccaaagacggggaaaaagccatcgtcaagattaccgagtggccggagaaccagaaaaaccccgtgggtaaagtgctggaagttctcggaacaccgggagacaacgacacggaaatgaatgccatcatggcagaatacgaactgcccgtgcaattccccgctaacgtggaaaaagcagcgaagagaataaaggatgccatcccggcagaggagatcaggacccggagagacttccgggaaatcacaacgttcacgatcgacccgaaagacgccaaggactttgacgatgccctctcgctccggaaactgaaaaacgggaattacgaggtcggcgtgcatatcgcggatgtcagtttctacgtgaccccggattcggtgctggacaaggaagcttactcccgtgcaacatccgtgtatctcgtggaccgcacgatcccgatgttaccggaacacctgtccaacgggttgtgttcgctacgccccgacgaggaaaaactttgtttctcggcggttttcgagttgaacgacaaagccgaggtggtgaaacaatggttcggacggaccgtcatcaagtcaaaccgccgtttcacttacgaggaagcgcaagccatgatcgagggcggcgagggtgactataaagaagagatattaacccttaacgatctggcccagaaattacgggccgcccgtttccagaacggtgccatcgctttcgaccggatcgaggttcgtttcgatattgacgaaaacggcaaacccacgggcgtgtatttcaaacgctcgaaagaggccaacaagctgatcgaggaatttatgcttctcgccaacaaaaaggtcgcggaaagaatcggaaaagtcaaagaaaatcaaaaagccaaaacgttcgtgtatcgtattcacgaacaaccgaacaccgagaaactggaagatttcggtcgctttatcgccaagttcggttatcgcatccggacaggcactcctcgccaaatctcgtcttccatgaataaattaatggaagacgtgcaggaccgcccggaacagaacatgatcgaaacactggctatccgcacgatggcaaaagccgtctactcgacggtgaacgtgggacactacggactggctttcgactactattcgcacttcacgtcaccgatccgtcggtacccggacgtgatgacccaccgcttgctgcaacgttaccttgacggcggacgttcagccaatgccgagaagtacgaggagatgtgtaaacattgctccgacatggaacagatcgccgccaatgcagagagagcttctatcaagtacaagcaagtcgagttcatgagcgacaaactgggcgagaatttcatgggaacgatctccggcgtaacgcaatggggtttctacgtggaactgaatgacaccaaatgcgaaggacttgtttccatcaacgagctggaaggagactattacgagttcgacgaagaaaactactgcatcgtggggcgtcaccaccggaaagtgtaccagctaggagatcaggtactcgtgaaagtagcaaaagctaatctggttgcccgccaactggatttcgctctcgcaggcagtgaaaacaccacaacggccgccccggcaaaagtggttccccctaaagccagtggcagccgccaacgcccggaacgtaaactccgacggggaagacggggagatgcacccaccaaacggaaaaaagaacaaaagggcagaaagaaaaaataaaagatacagacattatttatttagaaagaagaagttctctacaaaaccatttcgagagaacttctttttatgttaccacccgtaaatatccttctcagtgaaaggaaaactcaaagagaatccattgtgaaaatgttccaatatctcttctctcgtcaacgctttaggatagtgaatcggcggcatccctttttgtcccaatttattgcctatatatttcaatatctcgtattcttctattgttgtggaagttgcctccataagcctcgaaacgagcaacccatttgaaaccggattaaaacccaacttacgccccacggtcacattaccttcatgtgaaaaaactgcaatctttgtcttattcctcgcaatagaatcaattcgcagaatatattccgaataagcccaaagaaattctcctttccgattcttaaacacgtaagaacgaagggggaatgacacggggtacaacgtatcttgatgatttaagaaacgacaagacttactctcccccagagaatccagaacgtcacgacagggtaataacactaaagattttaaaccctccctatacttcttccgcacatccggcggaagttgaaatccgtgtaaagcaaaacacgaatccaacaccctccgtacttccatttctggaaaatcataaacataagacgtgggatttaacatttctccctcttggcgtacatcttcataataacaagcacaggaaataaaaagcagagaataaaaaaataaaatcgcttttctcatggttcattccccctccaaaggataccattcctcattactacaataataatcttttctcaatgtataatatcgaccgttcagccgcaaacgccgaattacatattttcccgtggcaagtcgatcattctcccgctcccgcatatccacgatgtaatcaaaaatgttatcggaaattctcaattccggcgcactaatatctttccattcataccggttatttcggatgtacaaatatctctcaacacgctcttgagcttttacaaaagtgtaggcattagccgcggcaaccgttggaatatttagatttccatttataaataaaaaagtcgaatcctgatatttccctcccacgggataaagttgaggattctttttaggttgtacaataaatattcccaattctaaaagaatatcatacctccccgtagccaaccttctattgtacttttcccacaagcggacaatatgattgaatatctgctccgaaactttcagttctgatccacttttcacatcccacacaaaacgaatagcttgtccctctatctgaaatctcatgtgttgttgcacccgtctataagcccgaatatacacttcccaatcccgacctaatacctctggatctcttagatctcccctcaaatccaaaaagatagaatcctgataattctccttagcaacttgtccgtaaagctctagacctataaacgggaagatcattattaatattatgcatcgacaatataacattccgtctattctattacgttaccggttttgattatcatccgaattttccgcagctccttaatatcatcatacgggttaccggggaggactaacaaatcagcttgtttcccgacttccacggaacccactttatcggcagcacccaacacctctgcagctacttttgtcaccgtgaaaatcgcttccatggggtaaaaaccgcatttctccacgtacaagtcaagttcgtcgaaaataaaagggaagggacgttttaaatcattgatgtaatcagtacccgcacagattttcacaccgatttggtttgcccttttgacaaagcgagcagcccaatccatcttgttctccatgcacaggaaaagagtgggatcaaaaataagcccttttgatttcacggtttgtagaaaccgttctaccgatattttatcatgatcaatcttgtcgtagaatttctcgtaattctcaaagatattcccgctcaactcttccgaaaccccttcccactccaacatataagcatgagagatcacctgcaccccggcatccgccacatcccacggtttagcggggaaaagcgtggcatgtccccatacctgtaacccgtgttccttggctttccggacaatcggtaacaatgtttccctatcaaacccgccataaattttcactcccgtgcatccccattctttcgcgtcctccatcgccttatccaaatcggaatccggacggatacactgcatccaaggagcgtaaggttcgggccagccttccaccatacttttctcgcggtcgtttccctcaaaataagccggtccggccatgaaggccgcgtaatagatgtccggtcccaagtatttcccctgttgtactccctccttcaattcccgcaacacacgggcatctcccgccgcatcccggatagaggttaccccgtggcgtaagaaatactccaaatgcttcgcccgatccgcctgtgattccttcgggtcatttgcaatatgcacgtgtgcatcgatcaatcccggcatcacgtacattcccgtcagatctttcacctctcctgaaacgccagtcccggcacctttaccaaccgcttgaattattccctcttttatcacgacatcctgacccttacggatgcttccttccacgacatccacgacattcacattcttcaggatgatcgccttctcctgcgcatttccatggaaacaacacaggagagatattataacacaacctattaatctcatgatctcttctgtcttatgatttcatgtatctcttcaacctccggattcttcaacaagatattcccgtccggacctatcagataaaccgtgggaacttgttccaccttgtaagccttccgcacttcactctgttcaaaaccagtctcgtcaatcaactgcacccacgctacccggtcttccttcaatgcctgtaaccaaggagcctttttactatctagagaaacagaaatcacttctaatcccgcatcccgtaattccggatattgttggttcaattccttgttcttttttcgacaaggagcgcaccaagatgcccaaaaatccaaaagcacgtgtttcccccggaaatcagccaatcgaattttctgccctttcacgtccggtagttcaaaatccggagcctgcccggtcaattgttttgctttcaacttattgtaagtatcaaaaatcctcgtcttcatcccgctattcggaatgctatctcccaatgcttcgattgcttgggtaaagaatttaaaatcgacctcacaataaaaaaggatttcgtgtatcaggttttgtgcaatttccgttccggcaaattcacgaataccttctaacacaagttcattctttctcgtgaacttttgatccagcatttccgaacgggcggctttctgatgaatgtccgtgatggtatcgtaaccctgacacgccttctcgtaatcctgattcaatttatcgagttctttcaggaattccacgtatcgattttgcaatgacgattcttcggaaagcaggtaatacttatccccggactcaacaagcatataatgcttttgctcgatatataccggtatccgaacataatctttcgggaaattaacaaacacaagcttacccggtgcaatattacccgaaagatgaaaagtcccgtctttctgaatcgaagcaaccatcaagcgttctcctcgtcgggcatcaggaagcgtgacttccacgctatcacttttccattgcttttcaacttctcccgcaatctggactgtagtttgcttacagccgaacagaacaagtaaaaataacccgacaataattattttcttcatgctattttcattatatgattatcccaaaccacccccgaagagtaagtttataaatcaagagggctaaaaaagcccccttgataaaaacaacacactgtattattttacattcgagaatccatatccctcttgctgaggataaatattcgtttccggatataacttcttccacacggctgatgataatacttctgccggaatttctcctgacattctgttcccattcagcttcaatccactgtaacccaagttcattttggccacctctacaggaattgttccggtaatattattattacttaaatagaaataactcaaggtcgaacaatttcctaattcggcaggtaattcacctgataacaagttgtgttccaagtacaggttccgaaccttcgtcagagttgaaatcccgttcaagttaccttctaacttgttatttgaaagatagacatcggtcaaattcggactgaactggctcaaatcaagttgcccggataattggttaccatccaatctcaacgtctgcaatgccgataggtttttcagccaagaaagatcacccgagaatgaattgttacttgcattcaattttttcaatttcgtcaaaccagagaagacatcggcagcaactccacggattcccggcgtaccctctttcccggtaacatccaactcttccaaggcggacaaagaagaaatcgcagcgggtagtgtcgttaaaccagttctcggcatggtcaatttcttcaaacctgtcaactgtcccaagctagccggaagagaagtcagtgctgtacattgactcacgtctatttccgttactttggtcaggttaccaatgctctcgggtaatgattccaaagcagcacaatcgtaaaaattcaatttcgtcagtttatccagtttaccaaaactttccgggacggctttcagtagcttacatcctcttaaagtcaaggtgcttacttgtaaatttcctatatcacttgacaaacgctccaacctctcacaatcagataaatctaatgccgtcaactggatcaagtttccaaaaccttcgggaagttctttcaacactttacaaccggataaggtcaaagttttcaaattcactaatttcccgatattctcacctaaagaggccaaagcctgacatccacgtaaattcaatgttgttaaattctccgccaattccccaatatcatccggtaaactataaatattcgttcctgcaagatctaacgatttcaagtgtttcaacttggatattccttccggcaagtccccgatcaggtatatcgttgataacgacaaggattccagcgcaggcaaagtatagaatgccgcaaaagattccatcgggattttcaattgtcccggcttaaattcctttaatgaaagcatggaagacatatcattcggcaagaaccactccgtcccatccgagaagttcacattcaaggattccaactttctcaagttaatcaagctattcggacatttgtaaactttcccggtaatccgcagagaggtcaattcccgtaaattacccacttcattcggcaggttaccagacaaactgaagtcagacaatagcaatgctgtcactcgcaattctccatttatctcttctaaggtaactccggaccactctgtcatcggttttctagggttccacgggttacgccatccttcaccattaagtgattcgtgaagaacaagtaatgccaaactatcacttctgcgagtatatttggattcatacgtgtactgaccaacgaacacggtgtcggtcacgccggtattctcctggcgaacaatcattctcgtgtagcgttcctgcatcccctcgtttaccctcaaagtaatcccgacaacagcattaccctcgtccccggatttcggttcataatcaaaaatccaattggtttcctcgatcggctcaatactccacccgccaccaatggaacgcaactcgaatccctgggcatttcccatggcatcgatcatgatctctttctgtgacaatttcaagcccggagtcagatcttctggaatcaccggatcaggaatatccttgaagtcgtaatcctcgcaagatgaaaatatccaaagcgacacaatgctataaagcactagatttacaatatatcgtttcataatcttcattattaatttctatttaatcttgtagaac

SEQ ID NO: 162 - DNA, 8606 bp, Butyricimonas faecihominis
agctgatatagtatagatatatagagtgtccttccttgtcggttgcgccaagcgtataacaggcgattccgggtgaggtaatatgtttttaaaggagaatcttgaccggtgctgcgactttctttgtggaatatggtgcaacgaggttcgtaccataactgatatccttgtcttgacatttgtgtacaccagtccatttcttcataatagagaaaatagatttccggcatcctcccgacctgttcgatgacttctcgttttatcatcatagcggctccatgtaaataactcgtttcttgtggtatgtcgaattgtccttcatccgtttcgttatatccgatagttcgattacgtaacgtgtatttgcttaaaggagtgaatccagcgaattgtatgtgttggggtggaaaagcaaacttgatttttggacttacggcacctattaccggggagctatacaatctttcgtatagatactttagatcgttggccgttaccaatgtatcattatttagcaagaatatccctttccctttggcagtctgaatccccaaattatttcctcccgaaaaacctatattttgttcactgcgaatgacgtgaacttccggatattttttttgaagaagtaacgcttcattctgaatagaaccattatcgacaacaataagctcgtacgaacaatcttgtgggtattgttgtagagattctattagttgacaagtttcttctaaaccgttataattaatagtaataatggatatatcaggttgttggctcattctgtgttaactctttatcgtaatagggtgcaatgaataggaatacaaatagaatacaaatgaggataccgttcgggtaagtcgtgatgtcattggcataggccgcaacaaatacaccagccagaccagctataatggaaaatagaatattcttcaattgtttatctttgatgataaacatggcaatataggaagctcgtataaaaatgaggaccagtaaagaaagatagagagataatcccacgattcctgtctccagccaatacatcgtaagtagggagtccgggggtaattcggataatttactatttatagcaaaacgttccatgcgtcccccgcttagtcccaatccgaccccgaaaggcttatccctcattagaggaatcattttttccttgttgatccctctgaccttaaaagaggcatcttctttattgaaggcggaacgcatcctgcggatgatggagttactattgcctatattggtttgggtgagaaataagataatgactatcaatattcctccggcaatgaatagattcttgaaacttcgacatagtactgcgtatgcacataacccgactaaaggaacagcaatggcactacgggttccggagattaataatccgtaggtagagacaagggcagtaagccaaaatagatattttatccaacgtgttttaacgaaaaagcctgaaatcccgaatacgactagcgaaagtcccattgtgattccaaagtttgccgcatccgacaggaaggaaaagtaacggaccccgtaatggataatatgggttcttgccccgccttctacaaacaaccagtataattcggcagagtcaaatccatgacttttttgccaatatccttttaaggctgccaatatggataagatagcccacaggactaatagccaatgaaaatgtttgaattgagtaaagaggacgggtataattatagcacttatcaacgggaaaagagcatatccatttatggcgataaaccatgcgtcagctaccgctaacgggttgaaaagttcaaataaacaataaaagaaccatataccccataaagcggttagcgcattaaagctacgtttccattcataaacttggaagatgttttttaaaagaagaagacatccgatccctaaagttaaaccgagcataatcattccgaatttcaatggaatatatcggtcaattccagtgatgacgtagtttatgacaaaaaagacgtaaaagtaatactgtttctggcaaaatttggctgtaaccatggctattgccggtaaacaggcaaaaaggagggccgggataattcctccctttagtgttaataggtatatagcactcagaccgatgaaaaatgcgatcgctgtaatataggacgagccatttttaatcattactttacggtttatctttagagatttgtgttgtcttgtcgtttgcagttagtcctaattgtgaaagttgatacaataatttgcgtaaaaacgagtaaggtggcattaaaccgttcacgtcttccgctgcatctcgtttcgtgtaatttaataccaagaacaggggtgctttatgacacatttcttttgtccgttcaaatcgttgttgatctgtatttttccatgtacgtctagaatctacaacttgtaaatttaggctgacattttgtaagatattggctgttaatgcggcttcttttagtgaaggatactctacgataacgattttttcctttaagctgttcttttccaaatcatccgggtcatccatgttcaaggattgaataaaagcttgagcatctgtctgtggttcattttgccaggacaattgtgttacgtcatatcctcgttccataaattgttgagccatttgctccatgatatagctctttccctctccgggttcgttactgattaaatttataatattactttgatcaggcttaaaataagtcgttgcggaattgcacaagttttgtgcggaaagcgtggtgtaaactttattatatcttctggctgcaagagataattgccgggtgaaagctcccagaaccttacatccggtcaattgctcggctttgaagagagagtgtaatgtatgatccagtatctcaataatcaagaagaaaaatattgtgaatattaatgttgccagataagctccgattgttagtaatttgtgtttaccaagtgcggagggaactaaggggtagtagggggcgttcattagtttcaaactggcagaattcatttgaatactcttctgttttaataaagctgtattcaaggcatcaagaatcgctaaatatcttctttcattgatgtttaccatacgttctttacgtgttagggtcgaaccgattggggcaaaatgaatgtatttttgagccatgtgaatctttcgtttatttaaaacgattagttctgcttgagcctttttataggcgagaacttgtttcaaccactcttcgatcatgttctcgttggaaatgccctctttactatatttcagataccctattttatgaacggcttcagttaaagccgtctcgtttttgtctaattcctgctggagagaatcaatggttactttcgaaacagcatcactcgtgtagtattttgccatggccaacttttcattgatctcgctgattttgctatttaaaaggataaacgaattattgttttgaataatttccgtgtataactgcatccttttttcgagttcccgttttaaactatcagttgaattataattatttagtgtttcccagtattgtaattcgtaatcccgattcaaagctgccacatgctttgtctcttcgtcataattgatcacttgtttttctactcggtatttggtaagggaatcttctgaaatcttgagttctttcccaatactatccagttcgtggcggaaatgtttgatgacattattagtttcgccgaaacgtagctcttgatattgtttattaaattcatcaatcaaaatcagtactgtttgatatgcgataccgggatcatttgtcgtgtatgaaacttcaagcacatcgctattaccgaggcgtttgacatatatttttttcaaggcttcccgattcacataagggaggttccattgatatatgccgtagacatagtttgtcggatcgtttgtttcataagcaagtaacttttcgtaggtacgttgctcgttaatcgaatcattatcagatttcttgtctatcaaattatgaataggtattccgtgattgtagagatttctataattactggcttttgtatagatgttgtctttatggggatcaccgtataccataatgcgagcatacaggcgtaatgaaacctgttttaaggtttgatccgcagtgatgatatttaacaggttatccatcatactaccttgggtataagatgtcgtggtaaccccgctttcggataagatattaactcctgtgataattccggtatatatggagcaagtggtcgtgtaatcgcggggggaattattggttttccagtagacgagagaggcaacgatgatcggtgctatgatcaaccagaatcgaatgcgatagaagaacttgataaagtaggtaatatatttcataactatttgtttctaaaatgaatattactgatgagttcaagctttaagaacatgatgtttaattcatttatgattttctcatattcaatttttgccactttctgtgaatgttttaagtcacttagcgacctatccttgttgtttttgttattgatatagtcaagctccgctacctggtattctgcgttatacaaggtgatggactctgtcgctagctttagtaatttcaattggtattgaatgttgcaatacaactcaataatttcgtttttgatttcatcgaatttgatctgttgcgtgtactctgcgttcttgacaagttctttttgttttttcacgtttacccgatggctaaagagtctgttgaaaggaatgataatattggctcctacggaccagctattttgagttgctccggaatatacggtcgttagaggggtatattgggtttcttgatcagtgtatgttccgagaattccatatgtgtacccagcccgtacagaaaagtattgtaaccaatctcgtttggttgcctttaggtcattacgggcagcctcgatagatgcaccaattgctttcagccggggatttgttttagctccttcaaaaagagagtccagtggaggtaattgatagttaatatattcattggtcgttaatgtttgcggaacgaaactttcataaggaggaatagaatcccttttctgtttctcttgagcaaagcaaacaaaatcagcacataataaacaggctataataatatatttagcacccatattttaaaatattgttttaatcacacattctctttttgcacaaacgccgtgaatgttttgcaaataatctttatatcattcccgaacgaaaagttgcgggcatattttatatctagttgttttctttcttctgcggaaagggctccttggtcacctcttttttctacttgccataaaccggtaagtccggcgggtgccatgaaacgctcgatgtattcgtctgtggtcagtagctcagcttcgtataaggggagggggcggttaccgacgatggacatatctcctttcagtatattgaccagttgtggaagttcatcgatgctatatttgcggatgatacgtccgactttggtaattcggggatcgttttcgaatttgacgaaagcatttttctgttgtttccgtctgttttttaataattgtttttctgtcgtgatgaaatcatcggccacgagaagtgtctcgttggattgattggaggttggggaagtttcagtatgagcctgttggtcttgtgtttcttcccggtattgattcaatgcttcgaattccttcaggcgtttgtctgcgtccacgtacatggaacggaatttgagaaaatcaaatatgtcgtaattacttccgactcgtttggatttatatataataggacctttactttcgatccggatggcaagtgccgttacaatcagaagcggggagaggcaaacgatagctgtcccggaaaagagaatatcaaatgttcttttccaccaagggagcttgaatctccggggattattttgaacatgaactgtcgagtgtcgctttattttgggcaggaaagccaaagtcgtttgtaaatcttctggggccgtgtcgatattgatgatttcactggcaccggaacgaagatagtctgcaatatcttcttttgatactttttccgaaagcaataataaatacgtgtttttcagattactttgctcgatagcctccaaccattgtaaatccctttttttattgtatgattcgataaagatataggtgggtgatatatctttcttcgattgttcattgatgcacaaaatcgttttaatcgggttattgaaagtaataacttgacactccagacaatgtgatatcctatttatccagtctgtgttttccccgatgtaatacgcgtacatatctttaacgcaataaattacggactcggatctttagttcctgcgggttaaaaggttttagcacgaagtccgaagctccggcttccaacaattcaatccggtcgttactactctccaagctggacaagataataacgggaataaaattgaacgtggaacttgcttttagctgtttaaggaatgttcgtccgtccatttccggcatgtttacatccgatatgatcaaatcgggaatatttcctgcatgcatccatgcaagagcttcaatcggatttccttccgaatgcacgttgtaatccctagatagttggatcgtgataactttcgctatttcaggtttatcatccacaatcagaatgcttttactcatatatcaccttcttttaacagtacaaagatacaatattgttacaaaatagcattatttttgttggtataaatgtgaaaaatattcattttttttgtacatttcgtcgattttaatcgaaatatagaatgggtgtatatgaaagccttacgagagaagaactcgttagaaagttgttagcgcaagaaaatttgtgtcatgagctgcaaggaaaagtcgggaaattgaaagaagagatttcccaacaagcaaagaacggggagagcatgagggcgaatgaaggtgatttgtgtgaaaatgtgaccgtgaaacgaacagaaagattcttgacggataacgtggctaggttatcgttaatgttagaggccggtaacgttttcccttggtacgcggatattgctagcgggaaaatcgaaatcggggatgaattattcaaggcgtatggcgttgatcgaaaagaatttcaggatgacttttttagtatagcaacttttgttgccagtatttatccggatgaccggggaattttcgaggctatttataataatcttttggcgggtgagtcgtgcaagattggcttggaactccgattggatttgttaaataccggggagtataaatgggtggatttaaaaggggtggctcaggaatttgatgaacgaggaaaagttacgaaagttctgggttttattgctgatattcaaaaaagaagggatgatgaacaggctttaatcgaggccaagcaacgggcggaagaatcggatcgtttgaaatcggcctttttggccaatgttagtcacgaaattcggacacctttgaacgccattgtcggtttttccgaggtgattgctcacacggaaggcgaatgtgaacgggaagaatatttggatattgtcaaggcgaacagtaatttattactgcatctgattaatgatattcttgatttatcccgcatcgaatccggtaaaatggaattcatagatgagaacatacagatggacgagttgtgcgaagagttgcggcaaatgcatcagatgcggatcaagaatgacgtgaaggtgattttcgagcgacccgcggtatctctaacgattgtttccgattctcaccgtttgagacaactctactcaaatttgatttccaatgctataaaatataccgagaaaggttcgatcactctcgggtacaagctgaaggggaatatgatggaagggtacgtgcgggataccggaagcggaattccggtagaaaaattgaataatgtattcgggcgttttgaaaaactggatttgttgaaacagggtttcgggttaggattgtctatctgtaaatccattttggacaaaatgggtggaaaaatctgggtagaatccgagcttggtgttgggtcttgtttttatttctcgataccttataatggtacgttaccggttgcaggggaacagaataaaccgttgatattggtagcggaagatatggattgtaactacgagttggtcaaggctatactggaagagagatattccgtgctaagagcgaatgacgggattgatgtggtgacaaaatacgaatcacataaaccggatttaattttaatggatgttcggatgccgggattggatggcctgtccgcggctggaattatccgggaattgaatccgactattccaattatagctaccacggcctttgcttttgaaacggatcgtgaaatggctcttgctgccggatgtaacgaatatatgtccaaaccgttagaggctgaaaagttgaaaacaatgattgaaagatgtctcgaaaataaattatagtttgtacatttgtggtagcgtttacgtgcgttaattaaaaaataaagtgtatgaaaataaatcctgctgaatataagatattag

SEQ ID NO: 163 - DNA, 8578 bp, Butyricimonas faecihominis
ggatcctctgctcccggggaatctgaaatcagtgtaaaatcaacaaaaatattaaatatgggaaagaacagacttctcatagtatttacgggtgtgattatcctgctcgcgtcatgtacctatgattattttaaagatgaaaccaattaccaagtttacgtacccgaagtggtggataataaggttagtgactgtcgtgtactggtttatgacgagaccggagtgttggtgggagcgcgttacgaggctgccccgtggaaagatccccgtatgagagcagggttgtttagttttagattaccccccggtgaatataaagtctattgttataccaacacggatagtctttcatttgtggatgaacaacaactggaaacctctgcttttatgttgaataacagcgattccggggagaatcattacgtgcatccttcggacgtgttgttccagaagtttgtacctgtgattgatcatccgggaattttgcgtactgacacggtcgagttggaacattacacgggacgtgtaaccgtgcgttttaaaaattttccgggtgatgtgtctcgcatagcaaacgtgcaattgttgacagaaggggcatccaccgtgcagtatttgaaacatgatacgatagccggtcggcagacctcggatgaccacatgtttcatttcggagagttaccggcacagacgactgctgattacttagaggtggatcatcgttatttaccgtctgtagaaggcgaatttatgagactgaattatacattccttgatagtgacggtattgctgtcaatcatttaccggtggaagtgaaagataaactgaccgggttgccactcaggttattacatggtcaacgaatcattatcgaaatcgattcttacaccgtgattaaagttgcgatcgtgggatggaatgaagatatagagagtggtaatacaaacatggaatgatgcaatattcatgaataaagagaatactatgaaaccagttgtacgatatattttacttgtttccgttttactttgcttgtttggtggggtgcgggcgcaaagtgtcaaggtaaatatacctttatggttgaccggttcacctaatatcggttttgaatacacgttaacgcgacaacttacagtgaatgccgagggggcatggttaccgtacatgtttaaaaagaacgaggaggttttccgcgtgttaatgggagccgcggagttgcggtattattggaacccgcaaaatttttacacgaatgattcatgggatggattttatatcggtccttacgccatgtatggcaattttaatatcgggttattgaagcataatgacccgcttcggagccatcgccggaaaggatggggggtatcgggaggtattactttcgggtacaagtttgcttttaattcccgtttgggactggatttgaatctcggtgtggggtatgctcatttccagtatgataaatataaactaggaggagaatacgtgaagttcccgttggaactcaagaagaccaaacaatggattggtccgacgaagttcggagtgagtcttacatacaatatattccgctagtattacagataaaatgttgctgaaaatgagaaaaaagaagatacacattctcttgtcggttgccgtgttccttttcttgatggacggggcaattccagtcgaggcgcatgaacgaaagctgggacgggtggagagacgggctgaccgtaattttgttagacagaagtttaataaagcgatggcgcagtatgaaacggctcttaaaaaagaagagaatctgcaaaatcaagccgctcttcacctgaagatcgcacgcttgtatttcatggtacgggattatagttgggctatcgggcattacgagaaggcgatggagctggaacgggatttgttcctcgtggatgacgtgtgtgattacattgatgcgttgcgtttccaaggtcagacacggaaagccgaggcgatttgcttggataatgcctataaagatcagtatagcaggtaccaacgctaccaaaatacactggaggctcttgccatgcgtcattccgtgcaggaatttcccgggttcacggccaaacgattggctttgaacacgccgaatgccgagttctggatcgggaattacggggaacaacctttctatgccatcagttacagtaagtttaacgatcccgggaagttgtttttccatcgtactcactattacgagttgaaggaggccggggagaaagtgatgtcacagaaatcaccgagatattccgattatttccggaggattccggtggatttgcagaatggaccggtgacgttttcaccggatatgcagttgatggtgaccacggtgatcgagtacgataaaaagaatgtatcggtggagatggtggacaaaaagcatcgtcctttccggactaaattgtattattcggtgatcaagaaccagagtaaacgttttggaaagtacattccggttttcccgcaagacccagaaaattcgtatgctcatccttacttgtttaatgacggaaaatcattgttgttcacttctgatatgccgggaggattcggtggatttgacttgtacgtcgttcattgggacgaggagacgcaagagtggggaaccccgatgaatttgggggcggatgtcaacacggaagggaacgagatttttcccttgctttacgagggacgtcttattttttcatctaacgggttaccgggtttcggtgggtatgatctgttcaatgccaactacgatcacgagggagtagttccgggcagcgtgcgtcatttcccttatccggtgaattcggttttcaacgactattttatgtgtccgctggatttgcgaaccgcttatttcgtttcggatcgggaaatggagtcccgggatgatatttattatctgcaaaccgatgaagatttggggacccaacaaggagaccctcatttcgggatgagcgaggaaaacgcgattttgggcggggctttgttactgaacggggccacggaagcggttaccaaggaaactatttcactaaaacgatatgcaccggaaggtttgctaatgactctttattttgatttcgattcggacaaattgacccgagaatccactcaatgcctagagcagtttatcaatgaaatgggtacctactatttcaccgagttgagatttgacggtttcgcggacgagatgggtagtgataattacaactatgccctgtcggctcgaagagcaaagagcgtggccgagtttttacgggatcatggtgtaaatatacaattcaatataaaggctcacggcaaggtgaaactttctccagaagagatgaaggaagaaatgggaactcagtcggagggaaatattgactggatccaagtgaatcgtcgggcaagacgtgttgagatatatcataagaggtagaattaaaaagtaaacgataatatgaagaagacaagaattcatggagtgtggatattgttcctgttgagcgttgtcacttgtttgcaggtgaaagctcaatacatgccggtggtgttcgataaggtgtatggtgataaaaatcagattcaactggtttgtccgctgcccggtgatgaagtagctttagtaggtaaagaaggtcagaaatataacctgacatgggtggaacgggaaggagacgtggtcttttcacttcctttgacgggttttaccgccgtgaacgagatagcggagttggataacaaccgggttttggtggtaggacagtctacgatgccgaatgttaaaggtaaaaaagatagaatcacgttgtgcgggcgtatcgctgtggttgaacgcaacggacgtatcgttaccgatatttatgccggggatcagggcagtaatttcctgaaagggatgttgttgcggagcggggcgttcgtggtgtccggttcggagccgaaaggagcggacggtcgtcagggaatcctattgaaactggacccgacgggtagcgtggtttaccagtataaaaatgccgggggtggttattgcgaccagttcgcggtgatgggaaattcgattgaatacatttgtgcggcgttctctgccggaaaggataaggagcaggctctcgtggttcgtctggatgataagggaaaaccttattacatgacggcgatcccggcaaaacaatttgtcgtgaccgggttgaatgccaatattaatgacggttcggtactggtgatcggtaattcgccgacagacggggggattatttacaagattcgtccggagggggacatcgtgtttgcgaagaatatgattcccgccaaccaaggggccgctatgctagatcatcttcaggtggctcgtaatggtaacattttggttggaggtagtggaagtcaaggatattacgctttgttgcgtaatgacggaacagccttatattcgggtacgtccaaggggaatgtacggggaattgggatgaacccggcaaccggggagtccgtggtgacgacatacgatatgggcggacgtagaggtacgtttatacgtattcacccgaccgggaaagtggagttcgagcgttcactggatggtaattttgacaaaatgaaagtgactaacagcggggagattttattgttatcttcttctgaaggacgggtttgtatgttttcgtccacgggtgaaaaggagtttgaccgttacgtgacggataataaaccgacggcttatcgtcaggcatataccgcttcatccggggagttacttttcctaggagcgggaggtcgtctcgtgaaactgggacatggtctttatgtttcggacgtgaagatcacgaaaccggtgaacggaatagccacggctatttttaccgtgactctgaccgggtatgccacgacgaaagaaggcgcaccaattccggtaagcgtgggatatgctacccaagagaaaacggctaatatcgcgaataattttacaccggtgaaaggaaagctttcgtttaccccatctcggggaacggctgaccgttatctggtaaaacaggatatagaggtgtccgtgaaagcgaataatttgatcgaggggatgaaagagtttgaactcgtactttcggatgcacagcaaagttatctggtgaaacccgtgggtaaggcggtgatcgaggatcaacaggctgttgttaagatggttcgtacggaacagggagaagagggaacaaaagatattttatacgaacttggattattcaaaccggatggaactcctttgacgaactcgacgggagccaatatcatcgtggatggtatctacggggaaggaacagccgatgctcttgactttgatatgggattaaccccgagagtgatgtttgccaatggatcacagaaatcatcgttctctgtgaaaacgttggaggatacccgttatgaattacccaagacggtcgtgattaactttaacaaggtacattgcctgagtggttcgaacgtggcttttgaaggggagttgttgagttgtagcggggtggttgtcgatcaaccggcacgtttaatgattgcttcccttggcgatcacagattgaacaataatgttgtatcgggattcttcacggtgtctttggtgcgggcttctgacggggctttgcttacgaatgctaccggaagtgatgttatcgtgaattgtgtggcggttcctgatgcttcggctaaagaaggtaaagactttgtattcacgaatatgcatgatctccgcatcagtggtgacgggaatcatagttccgcgaacgtgtatggtgtggtgctatatagtacggatgcagcggaaaaacaagtgaagttgaagatcaagtctgtaactcaacccacgggtgcgcaaccgatcagtgtttcggatgcggaatcctcggccgagttcacgatccgtaaataaacagattctactcccttcggggaggtagtgaatgaaaaaagagaattatggcaggaaaatatataaacatattgttagcggggttattgactattctcctatcagcttgctcggacgacagggattccctgtccgggcaagcgagtggagatcctctactgactttcaacatgacgagagcgggaggggatattgtcagtaacacgttggtctatctttttgatggacagggaagtgatgccggaaagttcaaccataaggttcaagaggtaacttacggcccggatcaactttcgatgactgttgctgccgggacgtggaatatagctttggtgactgccaatactgattttagcagtggattgatacaacccgtgcgcagtgtcgctcgcgaggattcgaagatgtgggaaacacaaccggtgggaggaacattgccttccatgccggaattacgtacggccagcattgacggacaattggttgttggcgggcaggataattcggttgcgggaacgacgatcttgtcacggaatgtggccttggtgaaggtggttattgcggatgcgggcggattggatgtgaacgggacgcataattttgaattaaaagatgtcccgactaccctgaactgggaaggcgggttattcccgacggcaaagaatcctagggtaagcacggtgccgatgaccgggattttccgggtcaaggatagcacctcgttaccgggacaccagcgtagtgacacgttgtacttcattatcccggcccataaagggaacgattacttgaatgctaacccgaaggacacgacggagagccacatgaaggtgagtgtcgacttggcttgtgagggtggaagtcgctttcaaaaaacagatgtggtcatcccgcgggttccccgtgtaaacggaatattactcgtgcgtcttctggtaggtggaaagttggatgtgacggctgatgttttgggttgggaggatgtagaattgaatgccgacttgtcccaaacccagctttacacggacaaggcgtccgtgggactatcgcataaagatacgctttacgtgaacacgaatgccccggatttcacggtggattacccggcaggaggttggattacttccgtccggaagattgcggataacggggttgagatcacggctaacgtggatacttacgtggatgggcagcctcgtagttcttatatcacggtcaaggcgaataacgtgacgaaaaagattcctgtgacgcaaagaccggacgagggaacgattacagtgaataacaaacgattggttttctgcccgaatcttcacacgagcaaacaagtcgagatcacgagtaccggcggtaactggaaattcctgaccacgaatcccagaaaggctaccgcaaacgtgcagagtggaaatgccgggataagtaacgttaacttcacccgttcttctgttgcttataacaaaactttggacgagggacaccttgtttatggcgatacgcttgtcatcgtgaagaatgttatgacgttggatacagatacgattcgattggtgaattgttatatctacgtggataatgataacacgattgacgctgttgccccacaaggaacagcaacgcaagccgtgacgaactcgcaagatgtgattgtatatggtggaacaaagatgatcgagaattttaatcctcaacaagcttggattcatgatatttcttgggatccgatcgggcaaatactatcattcacgacggatcgtaacacgggaaatgctaacccagaggatgacgatgaacctcgttcgggaaccatgacattcagacatgcttcgtgtccggattatgtagtaacggctaatgtttatcaagatataatcgtgacgataccgcctttccattactttgttgtgaagttcacttggagtggttctacggatgttgatattgccgtggagtttaccggaaatcatcttacaaatgtaggtaatgataatagtctatatgataaaatacctgttggatttggtatgcaagctaataatcccggaaaaggggtcacaggaccaggtggaggtgataataatggaagagagtcttttgcttataatggaggaactctcttggaatgggggggagatgccacgaggggacaaggagaaacaacatttttcaatgctccattatttgaaggggatgctaattctcctcgtaaaataaaattggaggtttatgctatttggtatacttcaagtaaaccatccaatacggctatgaattttcatatgtacgcatatgagaatggtacgatggaaaggggtacgaatgcatctggagataataataagtttaatttttataataggggaggtactctcctgtattcagaaggttatgctataaccgttgcaagttatgggcaaagtaaagctaaaacttacacaacttcctatgggcatatagctacaattacttatgatagggtgaaacattcggcttcggtttctgtgcatgttcctaacacgaaattgacgactactaggagaatgaatacgaatgtggttgaaacttcaagtgaagaggtgattgtagaacctgaaatgattggacgtggtgaaaatgggaaagccatttatgctgaataaatg

SEQ ID NO: 164 - DNA, 8518 bp, Butyricimonas faecihominis
ctataaacagaggaggagctggtgactcttcccgaagacagggagtattccagctcttcctctgtttatagagggagtaccccgcagggggggagggagtttgaaaaatgcctttgggggacagcccatgttgttttattttaaaatttaggataaaatcgtacattattgtaatataattgtttattttgtggaatcaatctatgtgaatgaatcgatcagaagaaatattggccgcattgaaaaagggagaaaagagtgcgtttcaggcttttttctcggagtattatgaagtgctggtattgtttgccacggggatattgaaagacgtggatgctgccgaggatgtggtgcaggattgtttcgtgaatgtttgggaaaatcgccattttgaaaagctggcggacgggttggatcgttatatgtttcatctggtaaagaatgccgcgttaaatgatcttcgagggactcaacgtcgggagttacgacatgaaaaggtcatggcggaaatggcctctgagaatgaaaacaggggagaaggtgagctacatgaaatggaaattctgtatgcagctataaatcagctgccccttgaacgtcgtcgggtttttatgatgatctgtgccgaaggcatgaagtatcaggatgttgcggattcgttgggtgtcagtattaataccgtgcgaacgcaaatgggacgctctatgaaatttcttcgggaaaaattgaaagatcaggtgttctcttctttgctttgtttctggttgaaggtgaagaaacaatttaaaacaattcgatagggtttatttttagaaaatcagcatacggaatcccgcctgtgcctacgagtaataccttttccggatgaaatttttgggcaaaaacgctcatgccggtattatcggaatgtatgccgctttttacttctagggctatcgttttatttcctttttccatgataaagtcaacttcttcatttccttctctccaataatagagattgtaccgttcggatatagaataattaatcaaatgggctcccacggaggattccactaaacgaccccactcttttggatttacacgtatctcttgaaatgtcgtgccgttttgagctgttaaaagggcgttgttgtggacttggaattttggagaagatgaacgtttacgaatgacatttccggcatatttttctaatccgcttaaaagtccgcaatcagaaagtaatttaagatagttggctaacgttgttacattaccggcgtcttgtagttgtcctataattttcgtgaacgataaaatttgtcctgaatacaatgaacccaattcaaataattgttttaataatgccggtttgtcaacacgggtgagcattagaatatctttggagatacttgtttcaataagtgcatcattgatgtagtttttccagcgattttcttcttcaattaaagatgctgatcccggatagccgccgaaatatacgtattgttcaacgccccatccgaaagcagcctgcatttcgagataagaccaatgtcctagatacaaagtttcgaatcttcctgttaatgattctgtgagtcctttttgtatcagaagtcgtgatgatcccagtaatataactttaatgtttgttcgttcccgggaatcttgatcccattgttgtttgattacttcactccaattgttgattttttggatttcatcaatgactaataaatattcatctgttttactgaccttcatttgcaatcgggctgtttcccaaacctgtaatagccaagttgagttggttgcggatatcgcatcagctgattcaaacgtgtaaggtatatttatttgtgataacaattgtgtcatcatggttgttttacctacttgtctggggcctaatataacctgaatgaattttcttggttcattaattcttttcttaatagtctgtaaatgaattctttcaaacataggtaactaatttactcaatatcttgagtaaaattactcaatatgttgagtaaatcaaataataggattgatattttttttgaaaaaaatcacttttcctgtcacatgattttgaatctgcggtgttttatgggaaatattgcagatcatgaaagatgagatttatgaaattatagccaaagtggtcgccggggagacgctaacggacgaagagcgacaagatttggaggtttggagggaggaacacgagagggagtatcagttgttggttcggttgaaagaacctgtgcgatttattcgggaacgagggggaatagtgcgggaagttgcctataaacaggtagcaaggcggcttgaacggggtaaacaaaggaagatcagacggtacgcatatatttctgcggttgcgggagtgttgctggtgataggaattgccttgacgtggtgggggctaccgtttggagagaaggggacgatggagcaaccgttcagaccgggaagcgggcaggtgatgcttacattgaaacatggggaagtggttccgttgaaaagggatgtgaaggaagtgatcgtggctgataccacgttatgtgttaccaacgagggaaatacgctcgtgtattccgtgatgcaaggtgaggtgcgggaagatacttacaacgtgttgacggttccggtcggtggggaatttcgggttattctatccgatggaacaatggtgtttttgaattccggttcggagttacgttacccggaagtttttcgtgacgggcagagggaagtctttttaaagggcgaggcttggtttgaagtggcgaaagatagcgtgcgtctttttagggtacacgcgggagaaatggacgttcgggtactgggaacgtcttttaacgtgaaagcgtacgagcggatggaatcgatagccacgacgcttgtgacggggagtgttgaaatcacgtgtgataatgaatcattccggattgttccgggggagcaattcgaataccgtaaagggttaaaattggcaagtgtcagggaagtcgataccgagttatatacttcgtggaaagacgggtactataaatttaggcaagcctcgttggaagaaattatgacaactctttccgtgtggtatggtttggaggtcttttaccagaatgaggaggcgaagcggctggagtttacgggaaaagtgaaacggtacgaggatgtcgggaatttacttcgaaaatttgaacagacggagaacgtggtatttaatcgaaaaggaaataacgttattattcagttgaaataaaaagctgttcacgatggacgggaacagctcttaaaagtaaagcatgagggtaagtctggtggtacatgcaaaccctgtatgctatgtgtaactttcaaagtataaaagtatgaaaaaaaatcgaatcggcacaagatccgatggttggatttttgtccgaaaatgcgtgttgatgatgaaatttgtatttatttttacgatgtgttgtctttttcagattcaggcagcggtgtattctcagcagacgaaagtgtctgtggagtttcggaacgtgtcgttggaaaaggtgtttcaagagttggaacgacaatctaattgtagtttcctttacaatcaccgggtggtggaagcccgggggagggtgagtattcaagttgttgataaagagttaagtcaggttcttgacgagttgttgacaaaattgggactgggatttactttcgatgataatctggtgattataaaagaacgtacttcgatgtgggggaaagattctgttcaaaaaggattgcggatcgtggggagagtcgttgatgagaaaaaacaggccatgcccggcgtgacggtgaaattgacgggaacgactttaggaacggcgacggattccaagggaattttcagtatgatgttacctttggccaagggggcgttagaattttctttcgtgggctataagacgcagagcttgactttttcggcaaccacgcgagatacgattcggatcgtgatgcaagaagatatacaggctttggatgaggcggtggtagtggcatacggaacgacaacccgtcgggaggcaaccggggccatctcggtgattaaagcggatgaattgaggggaattccgtcggggagtattgccagcctgttgcagggacgggttgcgggaatggacgtgacgaacattaccggggcgcccgggggaggtggaacgattattaccatccggggatataattctttggacgtggaacagaagagtcgccagttttcgaatcccttgtgggtggttgacggggtgccattgaattcgtttacttcaccgattacgggtacgaacctgttggccgagataaaccccgatatgattgaatccgtgcaggttttgaaggatgcctcggcagcctctatttatgggtctcgtgcggcaaacggtgtgattatcgtgacaacgaaaaaaggacgggcgaatcaaaaggctactttttcagtcaatgtttcccaaacgtggagcgtgttacccaagttaccgacgctgatggtcggacgggctgaacgatggtggcggataaaggcattacggaatatgcctaaagcttatctggattgggaaaacaggcaatataaatacccgagttctatatccgagatggaaaagaatcgattgtcttttctggattggttttatcccaaaagtgattcacaaccggcagacgggattattcttcaggatagtttgaatgcgttttataatcatgccacgaatttctttccaatgtactttgaaacggggaaagtgacgaatgcgaatatacaggcatacgggggatcggacaggataaactatggtatcggtttgggatattataacgaggcaggtgtgttgaaaggaactggatttaatcgtgtcgatttgacgaccaacctgaacgtcattccgacgaatcgtttaaacgtggatttgcgtttctatctttcattgacgaatcgtaaaagaagttccgagaatcaaatggaaggttttcaaaccagtacgaacgtggatgttattcccggtgatccttttgaattgacaaccttacttcccggtaaagggagcgtggtgtgggatgaggtgttgaaatctcttcagggtataaaagaaaagaatcgatccgtgaggggaagggctaatataaagatcggttatgacgtgttggaggggttgaatgtatcaacttctcttgccgcggattactcgattcatagacgtcactatttctcgccgtcttatttggatacggacgggtattctataagcataggggagaccggaattaacgtgatggctttgagcgaaaccatgttaacctacacgaagacgcttaaggaagaccacacgtttaatgtgcttgcggggttttcctaccaatatgatcaagaggaatataatgggggcagtggccggaattctcccagtgataagatccagtatgtaccaagtggtttcccgacgttagcggaaaaagaaatttacgattataaggaggtgattcccttgcaggcatacgaatcagacatgaaagaaaaatccttactatcgtggtttgcccgtttggagtacgattatcagaaaaagtatttcatttcagcaagttttcgtcgggatggaagttcaaccttcggggcgaaaaatagatggggaacctttccttccattgccgggggatggaattttagcgaggagagttttatcaaggataatctggaatggttgagttttggaaagatcagggccagttggggacgttccgggatgcatttcgaggagtgttacttggctttgggatcgctgtattccggacagccgtttatgggagagagtaccttgtcgtggggaaacgggttgtataacgaggagttatcgtgggagaaaacagaccagtatgatttcgggttggatatggatatgttcaattatcgcttgggtttgacgttagattattactatcgttattcaagtgataagttatggcagattgaattaccgggggattataacggttttgcttatcaatggagaaatgcagcggcggtatctaacgaagggattgaattgttgatccggtacgagatattccggaatgataatttgtattggaagatttcagtgaacggggccaagaattggaatcgattcgagaagtcatacacgggggaggatattccccgaattggtattatcgggaaggctttaaatgggatatatactttggcaaccgatggttttgtgaataaacaggatgaattgcctgttacttacaataatgcgggaatcagttcttatttgaataatggagataaaagtacattttataagccgggagattataaatttatagatgtaaatggggatggaattatcagtgaagaagatcggatttaccaagggagtgctttacctgtcgtgacgggaggtatcgtgaacgaggtacgttggaagaatttcgatctgaatatgtcggttaccttccaaatcggccgacatatcgtgaatgcacaggcaaatgcctcactaaagacaagttatccgaacgaaatcttacatccgtttttgctgaatatgaataagcagcatttctggcagcaaccgggagacacgggagcgagatacacgcaatggcaaaccgatcaaggggttgggaactataatactacagatcgggatgtggaaaaggtgaattggttaaagttaaaaacattgtctatcgggtacacgttgccggcatctttaatgaaatcttgtaagttggaacaggtacgttttttcgtgagtggggagaatcttttgtcttggcacaattattccggtctcgatcccgaaatcgtggacgtgcgtacgggattcgatgatgggaaaaattatcccttggcacgtaagtttacattgggtttaacggttaaattttaagcagatgaaacatattattattttgataacaagcatttggttgcttgccgggtgcgaggatcttttagaaatggaacctaagaattccttgacttacgggaatagcatgacagagaaagagttggaagcatctgttcggggggcgcaagcgattatcaggacttatatgatgatgcactataataatggttcaaattatgtgaatggtagttatgctgatgaggtggaatatactctttctttgagacggaatctggacccgcaagtgattccgggtggagattgggggcagcaatataacgtgatttccgtggctaaccggacgatatatttagcgaaacacagtgatcttgatcaagatcggaagaatttgtatcttggtcaagggtattttctaaaggcttttatttattatgatttattgaaagaatggggggagtgcgtgttgattaaagatgaggtggaacccgagccggtggctaaatccccgtggacggaaattgcagattacgcgatagaagtggcacaggaggccgtggatgcattacccgatttctcggaaataaaggattctaaagggcagtttgcccgctataaatcaactccttgtaagggtgcagcgaatgctttgttagctcatttatgcgcatggaaagccgggggaaagtattttgcccgggaagaccagagagattacgacgaacgggaactttggctaagagcggaacgggcttgttcgtgggtaatcgattcgtctatttatcaattggcctcgtccccggaagaggtttgcacggaggtcatggttggggggagtaaggaaagtattttcgaatccgtgtacaaggaccaatgggtggaaatggggggcatgtgggaagcgttgaaattcaatcctgcaaaagattacgagaactggccgattaataatcttgccatgccttcggacaatgaatggaatgcttttaatattaaaacaacgactgtacaggagatgtttcccgatggtgatttgcgtaaagacgcttatttttataagtttgaggaaatggcccatccggatagcgtggaaataactcatggctttgcttatccctataaatggagatatggttattataaagatgatggatggggaaaatattggcgtaatattaatcaaaacaaaatttggtggcgtttagctgatattatcctgttgcgggcagaatgtcgggcccgtttgggaggggaatatgttgctggggcgatagaggatttgaacacgattcgccgccgggcaaatgctaaactctattcttcttcagaatatggcggggatttacgttatgcaatttttaaggaacgggagaaagagttgttgatggaggggtaccggtattatgacgtgatccggaatggatacgtgcggatggagttggaagaaggtttccgaaaagcctccgatcaggattttatagacgggtgtttctttaatgcaattggaagtggcgcgtttagtaaaaatacgttgatgcgccagaattcatactggttgcggtatatgtaatttagaattttaaaatttagaataatgagagttataa

SEQ ID NO: 165 - DNA, 8509 bp, Butyricimonas faecihominis
attctgcactgatcgaataattttgttgtcgtttcattgtcggggtgtacgaatcggcattcatactcatcacttcaggatcttgatctcccagacggtgattcttgatgataaacgggttagttaccgttatacccaagtttatttctgcgacgcgggggatcttcgtttggtaatttaacgagatccggttacatcgcaaatgactggcggatactacccgctccgtactccggttatataatgaatagcggtacacggtgttataatttcccaagctcagcgagttatccggtaaatactgggacacgtcttcatcccgtgtggatagggcgggaatacgggtgcgtgtctcgtctcccggttgttgccaacgattcagtaattctgtggatgcgtttacgtcagctcccggaatggacaacatgccattattggaacttgtgataaatggattaagacgcttgtagtgtcccaattgataattgaatacggcatttagcgtgaaacgtttataacgtacggtcgtgctgatccctcccgaaacacggggttcactgtccccgctgtacacgaggtaatcgagcaaagaaccggacaccttttgcatttctcccccgacttgatccatgacggcaaatagcggggccccgtttttaggcgatagcccgatgaagggaatcgaccaaaatcccgataccggaaacccgtccagcgcggcgttcccgttcgtgaagcgctctagggcaggctcatccgtgtaactcctttttaaaatatctttcatataggctgccgtgaaattaaccgtccagctccagtcacacgtgtggagagtggcgataacttgacctgtaattcatatccctcgctatcaatggcaccgctgttgatgtacattttgcggaacccgttttcaatcgggatctctttttccaccacgatgtccgaggtctctttcttgtaataatcgaatgaaacttccatgctattttggaatagcgataggtcaatcccgacattccaagataatgtcttctcccatttcaaatcgggattgggaagttgttccagttgcaggtaactctcgtccgtgatcggatcactcggcacgtggctgacaagtgctttcggtgacacgttggaaactacatttccctgtttcccgtaagaaacccgcaacgtgcttgcgttcaaccacggtttggtggggaaccacttctcttggtgcatatcccagcgcgctccggtggaccagacggggtagaaacgattgttcgtgtgtttgccgaaacggttggacgcgtcgtttctgacgttgatgcacaccgtgtagcggctgtcgtacgtgtaaccgattgtgccgtactcggagaacgtgttttccacccggtcaacgagtgtcatgtcatgttccgtttcgggcgtgtcggatgattcgacaagttcaattccggggaattgttccttcacctgttgaaacttgtctgccggggaacggtaatcttgtaatagtgtactccttttccctctcacgtatccccattcaattccttgtttcccgtcatatttatttttccgggtttcgataccgagtgtcgcggttatcgaatggaaagtcccttctccccacgttttccggaagttgatttgtcccttcaccgtgagggaacgacgggtgtgtcgtgtatagtcaaggatacctcctgtcgggagcgggctgatgtattccatgagattctgaacctcttcgggaagcgtggcattatagtcgcatccccggagtaaggcgacgttccatgattgtgcgtctgcccacaactggctgtcgttcgttccttgtgagtacgcgggtgtaaccgttatattcaggtaggggaggagattccaagtgaattgtgcgttcacgttgacttccgaagttttgttatcgttacccgtgtgttgtaattcgtgcagcatattgaaatggacactgtttctgacgaattgatatatcccgttttttcggtatgacagtgaagttgccttacccttcgtgtaaaactgatcgctggtaaccgtgcgactggtcgtcagggcatattgctccgggttaattcccgtgtaataaccggaagtcgcgatgtgatacccggaaaggttcactgcgattttgaatttcggtgacgagttgtaattgaaattcagcattccggtaaaagtctcccggtcattcccgatgtacgcgctgttttccttcctatacccgaaagaggaatagtaagccatcccgtcctttcccgagttgaaactgacgtggtaattctggctgatggcggttctacccagtgccttgaaccagtcggtatttgttttctccagccgggtaacttcctcgttaaattcagcgtgggaaatctctttgttgatcattttcatgtaagcggcctcgtacccgattccatccggaaagctgggtaacgggattcccgcttcaatcatttctttcgataatttgacccgttgtgctgagttcatcaccttggcgttgcgataggtgggtatagggctgaacgtgatgtcacttcggaatctcacgcttggctgatcggaacgcccttgtttagtcgtgataacgattaccccgttggaggccctgatcccgtaaatggccgtggcggaaacatcctttaacagcgtgatgctggcaatgtcgtccacgtttattcccgacaagttgttgcccatgatgctggaacgtgccgagttgctgagatcgttctcgttcaacaggtcgtaaagcgtattccggtcaaaaggccagatgttttcccggatgattccgtccaccacgatcagtggttccgggttaccgataatcgttgaggttcctcgtactttcatgcgtcccgtggagccgatatttccggaaggaatcatgatttccaacccgttcagtgtgccttggaaggcggcctctagggaggtcgctcccggggtgcgtatctctttggcgttgaccgtggaggtcgctccggtcatttcgtttttggcgatgacttggtagccgttcacgatcacgtcttccacttccgaaacatctgtctctaagataatcgagtatgaatcatctcgcgtgatcggggtgtaacaggtctttttgcccacgtaactcgtgatgagtatcgtgttttctccttccggaatccggatagagaattgtccgtttttgtctgaaatagttccccggttacttcctttcaccaaaatggtggccgaggggagcgtgatcccgtcctcgtcccggatgactccctttatggtacgcattgcggggatgggaaccgtgttctttttcgtgataatgatggtttgattatagatgcgaaaatccagcgggagtccttgcaggcagaaggtcaggacttcctgtagctccgtttcgtcaaaatgaacggatcggcggctgtcgatttcttttacatctttcatctggtacatcatgtcatattttgtctttttcttaatctttttcaacacctcttccagcgtggcgttattcatgtgaatgctgattttttgagcccatacttcccttgaagtccccaacaggaccacaaaaattgtcaagagaatgaattttctagcacccatcaccatcgtttattaggaaaacactaaattatttcatagctttgtaatggttttaaggttaatttattggtcaatattttaatctgttataattgagggatggtgtcaacatccctcgatttatttatatacccggatttcgttcccgtcctttttgaacttgacgcccgtggccatgtgaataattttcaaaatgtcttcatatcctttgtctcgttgaatggagataaagcattttatatcttgtagttccgggtcgtcaaacgtgacgttcaaggcgaaacttctcccgatgatggtcatgatgctacccagatcgacatcttcgaatgtaaattcgcctctgcgccaagctgtttgctcttccacgtccacggaatccacttgcaacacgccttcccgcggttggaatcgggcttgcaatccgggggttagcacggttgtccgtgttgtcgtgtccgtctgggaatggcaggtaacggcaactttcccggttaacagggtggtggtcactaccggatcctcgggataagctgtcatgttgaacgtggttccgagtaccctgacatccattgacttgcttttcacgataaagggaacaccggaatgtgtcacgtcgaaatagccttccccggaaagttcaacgacacgggcatctttcccgaacacggacgggaaaacaagcgtgctacccgcgttcagatgaacgtttgtcccgtcacttaactggagagtgtactccgtgccttccggaacgaccagtttgttgggagagacgtgggctgactccttctcgtgttggaaagagacctttccttcgttcgtgttgatgatccttaacccgttgtagtccatttgcatttgccggttcagttcgacctgtttcccgtcatctagtacgagataggcactttgtgccagcaaaccggatcgcgggtctgttcccccggtggtttggtaaaagtagtaccctactcccaacatcacgaggcaggccacggcagccgcgtatttgtagaccacggacaaccgtcgtgcgggacgtgtggcggcgatgaatttgtttaacgctttttccgtgtcgaaactgtcgtgtcgttttatattttcatgcagccgtgcggggattcccacctcctcgcggagtcggggggaatcgggcgccacttgttcccaatcaccgttcgatagtgcctgttctatctgtcgggcgatccttcgggcttcgtttattttattttcgacttcttccatctctgttcgttttgctattaaaacaactcatgtcgggaaagtgtctaaagaaaaatgatatttttttattttttcgtgtttttgttgtctccgaatgtgttccggggagtggggataacgaggggtaaaagaagggatgtaattgggatatactgactcgtagggtgcttgttgagcggctgttaggtgactgttaggcgccatcgcccgattgtcgcccgattatcgcccgattatcgccgccattttaagagagtttaagtaaatataacagacggggcaggtacgttattttaggcaattatgactctatagttttgcaaccgggatttctcgtgccggtttatcccgattttaaccccggcaatggggatgttagtggaggtggggttaattattttgttgcaggaaaagcatgagtagcgcgtatagttctggggaaaccatttttttcaatagcgatataccccgctgtttttgtgatctgaccgtgctggatgaggccccagtcagggtggaaatctcggtactgttgtacccttgcatcacgagttccataattttggcacattcgctcggaaggtggcggatgtagtcggataataaactaataatttccgtctcgacaatcgtgttccatgtctgttcgtcggtttcttcttggacgaggttctgggcatgttcctgaacgatgttatggtgtttgatgtagttcaggcaactgttacgggccgagaggtagaggtaggatttcagcgcaagataattctcgaaatgattctccttttcccatagccggatgaacacgtcttgagcgacatcttcggcaacatccgtgtctttcaggattttgctggaatagtaagcaatatcttgaaaatattctcggaacagttgtttgaatgcctcgtgatcgcgggaatttagtctgttcaaaaatgttatgtctgtttcggatgatttcataccactgcaaacttatagatttttggacgatcttgtatagattgtcattaaaaaaatgtgatggaaggtgcatttattattttttgatcgttttagacacttgcaccgggtgagttgtttttacgatatgattgaataaatcaaccttaaaaccaaattgatttttttatgaagaaagtattgttttgtattgtatgtttgaacatggccttgctgtgtttcggacaaccggtgaaaataaaactggtggcggagcgggaggcttttgtcgtgttcgggaacgagcgttatgatttgaaaaagggagaaacccgttggattacgttggagggagaggatatgtacgggaaaaggttgttggcaaacgaggagtgttttttgtttttagaggccggggatttcttggaagtcgttttgcatgaaaaccggggggtggagttgaaggatgacgggagtttatgcgcggatcggaataattggttgcggaaagtagatttgttgaaacagaggttgcagtttgcacgcgttatgccgcaattgttgcccaaggaatacgaggggttgaatctggagagggtgtgcgactctttgaatgtttggttggcgacttatctggaaaagtatcctgccgatcggaaaaatttcgagaaggtgatgcggacagagtttaagtactaccgtctgttggaagcgaatggcatcaagtcttcaagggcaacttttcaggaattttccggggagatgttggctcgcttatctgaagtgatcccggatgcagaagatgatcgggtggtttattctccttcttactggcgtgcggtggaggtgtacgtggattatttacggatcgaggatccccgtaagttgcaaggacggggggaccggatatacgagaatgaggtgaagttggcaacgtatttcccgaaaggtgcggtgagggataaaatagcttacacgaatttggataatatcctttactgggtgcggccggatcgtcgaggagattttgataaatgcgtgaaacgattggctccccgttatgctgacgtgttacgggggaagttgaataaacaggacgctgatcggaaggcgcggaagttggtgccggaaaacttgtatcccgtgttatcgggggagaccatgaacggggagagggtggatttgtcttctttcaagggatcgtggattttgttggacgtgtgggccacgtggtgcggtccgtgttgtaatgaaattccgtttctggcaaagatggaagaacgtttgcagggacggaatatagaattcgtgtcgttgtccgtggacaaggccgccgaccgggagaaatggataaaaatgatgcgggaaaaagagatgaagggggtacagttgcgactgacgggtaagaaaagcgagttgaacgagacgttgtgtatcagtgggataccgcattttgctattattgatcccacgggaaaactggtgtggaacggtttgcccggtgtttcttacgggctgatttaccggatactgaaagaggttccgataagataagatgtacatgtatttttaattgatttttcatgaaacatattatattgttattgggatgtttgggatgtctgtttgcgggatgctccgagccttcctatcgtttgactgtttctatctatgggaacggaagtttaccgggagatacggtttacctgtatcgttttaacgaggagacgttacaatttgagaaaggggattcggccatgttggatgatcggcaacaggtttgttttaccgggaaatacacggggccggagttcgtgtgtgggggagtaaggaaaaaggctacttcgaagttctttatgctggactccacggaagtatttgcttataatgttttattacatgaggaacctaatttctttaatccttccgggtataagcttacgaagaaatatatgatcgtggagggaggacgtgagtctgccatactggattactatcagggaatggaacggttgacgttgcttccggatcagttgaagagcggagacgcgtttaaggagggcgtgatgatggatatgctggtcaagttcccgaattcgagagcgatgctgatgattttgaataacgagaggaagcgtttttcgatggatcggttgggggaggcattaagtttgtttgatagtccggaactgatcggacatcctttgtacaaagagttggtggcttaccgggaggcggtgatgaagacgtccgtggggcaggtggtacctgatttttcgttgccttcgatgaacggggaagaggtcgcgattcgttctttccgggggaaatacgtgttgttggatttttgggcttcatggtgtggtccttgcatcggggagatgcccaacgtgcataaggcttatgatttattgcatgataaggggttcgaggttatttcgatttcgacggataggaaggaatccgactggcgaaaggctatgaaggagaaacaaatggagcatttcgtgaatttgagagacacgaaaggagtcttacatgagatatttaaccgggatgcgattccttttatcctgttgctcgatccacaaggtcggatcgtggctaaagagttgcgagggaaggatatttacgaggtggcgattgaaagtatgaataaataattgattaatga

SEQ ID NO: 166 - DNA, 8425 bp, Butyricimonas faecihominis
ccctccccccttcggggtattgagcccggaagccggtctcgaatcggctctcgctcgacagacaacgagtaaactctctgtctgtcctcgcttactcgccgatttccctctataaacagagggagagctgaaatactccctgtcttcgggaagagtcgccagctcctcctctgtttatagaggaggtggcacgaagtgacggaggagttttttgaggataaaaaaatgttgacataccctctttatttatacttaatctaccataccctgccggatttacgccacccttttttatagtaattttcgcttaggtggttaaccatgacaccttttgatgtgctggcatgagcgaagtaaccgtttttgaggtagatacccatgtggttgagggttcttttttttcgcttggagaaattgaaaaagacaagatcacccggtttcaaacggtgtttcccgatgcgctggcagtctttattatagatattaacaaccgtgcgttgtagggatttatggtaaacgtttttatacacggctcccacgaaacctgaacaatcggcacccgtgcgggtggttccgccgtaacggtagggggttcccaaccatcgactgacttcttccagtaggggtaggtcgtcttttcgattcaccgtgaagcctagtttgcgggatagctgtgcagttttacttttctggatggcgagttgtttggatgaggtgcaggacgaaaaggcgagggccagtaaaagaatcccgatatatagcgtgttaaatttaaatgttcgattcatattcaattagttaccaataatgtcaacaaagatagggaattcgggagaagggttcgtctttttttgttatttttgcttttggattggtgttaaaaaaagtccgaaaaacttgaaacttgttatagggtaaaaacgtagaccaaagaatgaattatttagcacatatattcctctcgggagatgatcggagagttcagatcgggaactttgtcggggatgctgttaagggacggacttacgagaattatccgtcgggttttcgggagggtattctgttacaccgggaaattgatgattacacggatcatcatctcgtggttcgggaggcaatagatatgttgcgaggtgatttcggacgttattccggcgttttgacggatatttattttgatcatttattggcaagggattttcgacgttattccgggcggtcattgaggtggtttgcttgtggtttttatggggcgttagtcttgaattattgttatttaccggaacgctttaaaggattcctttggcattttatcctgacgaatcggttggtgcgttacgcgtccctttccgggattaagcgttcgctggaaatcatggtggagtacaagaatctgggagttgacccggaggcggccatcgtttttttcgagagaaatcaggatcggttgcaggagttgtttgatcgtttcctgccggatgttcaagagaaatgtcgtttgatgttggaggcggatataagttgttaatcattaatataaatttaggtgtatggaagaattatttgcaaaaacttctaatgtgtcattagatgtgttcgtaactaagatgatcgatttgggaatatcggtcggttctaagattttgttggctatcgttgtgttcattgtgggacgctggatcgttcggcgattgaacaagttgttggcgaagatattggaaaagcgtcacgtggaggcttctttgtctacgttcgtgaagagtttggtgaatatcacgttaacgttgttgttgattatcgtggtgatcggggtgttgggtatcgagaccagctcgtttatagccttgtttgcatctgccggtgttgccattggtatggcattgagcggtacgttacagaattttgccggaggggtgatgattttgttgttcaagccgtttaaggttggagatacgatcgaggctcagggacagagtggtacggtgagggagatccagatatttaatacgattttagcgactcccgataataagattatcattatcccgaatggcggtttgtcaacggggttgatgaaaaactattcacgggaggctactcgccgggtagattgggagttcggaattgcttacggggatgattacacgaaggcgaaggccgtgattgcccgtttgctggatgcggatggacgtgtgttgaaggacccggcttattttattgccttgacttctttgggagagagttcggtgaatatcgtggttcgtgcttgggtgaacgccggggattactggggtgtttattttgatatgaacgagaaggtgtacaagacgttcgccgaggagaatctgaatatcccgttcccgcagttggatgtgcatttgcacgggaaggcagaataggattctgccgttacaagttaacgggttacaggttacaagttatttaaatagaggggctgtctaaaaagtcatttcatttcaaaaaactcctccgtcacttcgtgccacctcctctataaacagaggaggagttggtgactcttcctgaagatagggagtatttcagctctccctctgtttatagagggagtacggcgaagccgggagggagtttgaaaaatgacttttgggacagttccttttttgtgttgttctggaactttttttcttatggaaaaagcgttagctttgcggggtagggaaggagagggggaaaggtacttgtaactcgccggaggcgaacactaaaattgaaattgttatgttacttctttggttggatttgaattcttcgtatgctcattcttcattggctcttccggctattcatgctcaagtggaaggaaaggaggggaatgtggaatggaggaaagtttcagcgacgattaattcaaatgtggggagtgtggtggccgagatcgtggcggcccggcccgatgtggtggcggctacggcatggttgttcacgcatgaggtgttgttgaagatcacggctcgggtgaaggcgttgttaccggaatgtaccattatattcgggggaccggagatgctgggggataatgaggagtatttgcgtcggaatcggcacgtggcttgcgtgtttcggggagagggtgagttgggatttcacgagtggctgggggtgtacgattgtccttcccggtggaatgaggttgtggggctgtgttggttggatgcggagggtgtgtatcatgatgggggattggcgagggtgatggagttcgatcaattgatgattccggaacacagtcgttttttcgattggacaaagccattcgtgcagttggaaacgacgagggggtgttttaatacttgtgctttttgcgtgagtggggcggagaaacccgtgcgggtgttgtccgtggagcgtattcgggaacgcctgactgttattcgggatcatggtattcgggatattcggttgttggatcgtacttttaacgggtcttcccggagggcgattcgtttgctggagttgttccgggagtttgctccggggatgcgttttcatttggagattcatccggcgttgctttccgatgaggtgaaggagttgttgcgggagttgcctgccgggttgttgcatctggaggcggggattcagagtttacgggagaatgtgttacaggcttgtcggcgaatcggtgatttgcaggcggctttggacgggctgtgttatttggcgtcattacctaatttggtggtacacgctgatttgattgccgggttaccattgtattctttggaacagatgatcgaggatgtgcgggtgctggccggtttcggaacgggagagatccagttggagttgttgaaattattacccggaacggcgatgcgtgcggaggcagaggctttgggaattgtctattccccggacgtgccgtacgaggtgttgcagacgaaagcgatgtcggtggaggatttgcgtcaagcccggttgttgtctcgtttgattgatggtttttataatgctttggcgtggcagggggtgacccgtaagttgatcgggcatgatgaatgtttcctgtcggattttctacgctggatggaggaacgggagttgttggagcaaccgcttagtttggaacgacggggggcgttgttgtacgaattttgcgaggaacggtacccgatgtttctgactgatatttcggtagcgtggattgttgcggggattccttttgctaaggaaccgagtaagcggctgaaaccgtggagtaaagagattccgggggatgtggtgaacgtgatgggggaatacgagagtgtgatgcgggtgtatcatttaccgggagaaaaggaggaattctggttcggtttcgatcggggaaaatcggcgtcaaggccattgtacgtggggaaaaaactgaggggattttagattccggttgcgggggcaaatgattggggttcataaggtttataaagttcataaagtttataaggttcataaagtcacgggtgtccttcggacaatgttttaacggcagttcaagctgccgttgacaaagcgccccgcaggggtccataaaccttatgaaccttataaactttataaaccttataaactcttttcttcgtttatccagttgttaatcatttggcggccttggcgggtgatgatggattcggggtgatattgaacgcctcggatggggaggcttgtgtggtagaaggacatgatgtgaccttcttcgtcgagggcgctgatgcggaggcatgaggggagcgtgtgagggttcacgatccatgagtggtaccgtcctacttgcacgggataggtgaggccgtggtagagaatgtcggtgggatcgacgatggtgaggggactttcgtggccgtgtttggggagaggcagttgttgcaagctggcaccgaaggattcggcgatggcttgatgaccgaggcatacaccgaggatgtcgtgagtggttttacaatgctcgatgagtgcgagaagttctccggcctcggctggaattcccggtccgggggataacaggagcttgtcgtagcggtcgagcgaggaaaagtcgatttggtcgttataaacgatgtcgaattggcagtgttcgttttcccggaggatttggacgaggttatagacgaacgagtcatgattatcaatgacaagtatattttttatttttgaattctccatgccgtggctttctttgtgaggtggatgacctgttttctttcgcgaaagtaggaattcgggggaaaataaactacttttggctgttgtgttttatcatataagttgtgattatggcgaagagaaagaattggttttccctgtttttcacgaattatctgggagttttgaatgataatttcctgaagacgctggcgtgttttatttgcatagcttgggtggggaaggagaacgagtcgatggtggtgacgctggcatcggcggcattggtgataccgtatttgctgttttccccgttggcgggacgattggcgaagatatataaaaagcgaaagattgtggtttgggcgaagtttgccgagatgctgattatggtcgtggccacggccgggttcctgacgcactcgacgggactggtgttgtcgtccattttgttgatggggttgcagagcgcgctgttttctccttcgaagtacgggttgattcgtgacatcgggggtgaagaggggatttcttacggttccggggccatggagatgttcgctttcgtgggtattctgacagggacgttgatggcggcctttttgtcggagagcgtgacgatcccggtgctgtgcgtgatcctgttcggggtggcgttgttcggttggttgtcgagtctgacgattcgggcgaacgagagcgagccgatgaaggagagccacgagacgttgaatcccgtgaagtttgtgaaagatatgttcgtgcgggcgttggcgttcaaggggttgaatctggtggtcgtgggactggccacgttctggtttatcggttcgatgattcaaatggtgcttatcgtgtactgccgttcggatttggggatgaacgattcggagacgggtatcgtgatgtcgttggctgccgtgggaatcggggcgggatgttatcttgccggggtgttgtctcgtcgggacgtggagttgggattggtgccgtacggggggatcacgacgggattgacgttgctggcaatattcgtttttgacgctcacggggtgacgttcggtgtacttgtgttcctcgccgcgtttttcagcgggatgttcaaggtaccgctggatgcttggattcaagcgaacgtgaaggggcgggagctgggggatatgttggcttactcgaacttgatcacttttctgttcatgttgatggcgtcggggtgtttcgggggaatgacgatgtttttcgacacgaagtacgtgtttatttttcttgccgtgctgacgttcgcgatcacgattgttttgttctcgtgcgtggaggaggtgagggtaaggtttaagaagtttagactaaagaattagatatgggttataagaaggtattggcggccttttaccggggcgttttgagcgcccgttaccgggtgcgccttgagggggcggggttgctggccgagcggcgggcaacgttgtttttgcctaatcatcaggcgtcggtcgatccgcagattgtttgttctcagttgttacgttacgtggatgtgtcgccgttggtgacggaagggtattttaaaatcccggtggtggctcaggtgttgcacttgatgaacgcggtgcgggtaccggatttggagaagagccgccggggggtggagatcgtggcggggttgaaccgggtggtggtcgatgctttggcggcggggcataacgtgttgctttacccggcggggcagttgacgagtagcgggttggagcgtgtggggaacaaacagggggcttggcaggtgtgccaccagttgccggagggaacgcgtgtcgtgggtatgcgcatccggggtttgtgggggagtatgtggtcaagggccaagacggggcgctcgccgaatttcgcgtggacttatctgaaaggggttttttacgtgctggcgaatttgctgtttttcgtgcctcggcgtgatgtgacgattactttcgaggacattaccgacgacgcggtgcgttatgccgcggagggacggcagccgttcaatcgtttcttggagagtttttataatgctccgggtgaggagcaacctttgtttttaaaacatttcttttacgtgaggggacggggtcactgaccgtctttggggttatgagtatgattacagcaaacgaggtccgggtgtgcatgaacgaggcgggagcccggcgggaaccgtttttgttcggtgttgatttcgagttgtcggaaggctttttcgtgtccgacccgttgggacagcaagagattcttttcgaggccgggggtgtcactaattccccggtgagggaagggatgccgggggaggtgtcggaaagggtgttttccccgaatccggtggcatacgaggtttaccgggagaagtttgccgcggtgcgggagggattggctcgcggcgattcttttttgttgaacctgacggtggcaacggggttggagacgggctggacgttggaagagattttccaccgtgcccggtcgccttaccgtttgttggttccggggcgatttgtctgtttctcgccggagattttcgtgcgggtggacgagggggtgatttcttcttacccgatgaagggaacgattgatgcctcggtgcctgacgcggggcgggtgattctggaggattacaaggagcgttcggagcataacacgatcgtggatttgatccggaatgatcttaaccgggtggcggaacgggtggacgtgcggcgtttccggtatatcgatcgtttgcgggtgagccggggggaaattctccaagtgagttcggaggtgacgggacggttgacgggggattattattcccgtttgggggaggtggttttcgggatgttgcctgccgggtctatttcgggtgcgccgaaaccttcgacgttacgtattattgcccgggcggagggtgaacggagagggttttacacgggtgtcttcgggtattttgacgggaagaggctggattcggcggtgatgattcgctatatagaggtgcgtgacgggcggtattattttcgtagtggcgggggaatcacgattaatagtgagtgccgggcggagtacgaggaggtgctggcaaaggtgtatcttccgttcgataagtaatcatgctcaaactcctccgtcacttcgtgccacctcctctataaacagaggaggagctggtacttcatcctaaagacagagagttacttagctctccctctgtttatagagggagtacggcgaagccgggagggagttaatt

SEQ ID NO: 167 - DNA, 8413 bp, Butyricimonas faecihominis
ggactaccccctccggctcccccttacacaaggggagagacggacgcaagaaggcactacgatgtaacagtgtggcggtatcctccccctgtgtaagggggagttagagggggtagttaaaacgttggtcttgtgcggtttaaatctaaaatctaaaatcataaatcaaaaaatatatgagtaggatattgacaaataaatggtttaaattagggtgcgttcttttcgtgtacctgctgtggacattatggatcgggagctggtggttgttattaggtgtgcctgttctgtttgatatttatatcacgaagaaggtgcattgggctttctggaagaagaaaggagtggaaaaacagaccaagacggtggagtggatcgatgctttgatcttcgctattatcgcggctacgttgattcgtatgttttttttcgaggcgtacacgatcccgacttcctccatggagaagtctatgctggtcggggattatcttttcgtgagtaaggtggcttacggaccgaaattacctaataccccgttgtcagtatcatttactcatcataccttgcctttcacccagtcaacgaaagcttattcagacttgattcaatggccttacaaacggattgccgggttgggagagattaaacgtgaagatattgtcgtgtttaactttccggcgggggatacggtagtagtcggaagggaaaacccggattactattcgcaaatcaggggacaggaggctgctattcggtacgtggcacaagagaaggggttgagtgtaaccccggaggaggcttggtctatcgctcgtaaacagatttggcgggagaacgagattattgctcgcccggtagataagcgggagaattacatcaagcggtgtgtcgggattccgggggatgttctggaaatgaaggatgctgtactttacgtgaacgggaagaagttggaggataaagataagatgcaatataattatgatattatcgtgaattctccctttaataaggtaaagttgcaagagatggggatttccatggaagatattaatggggggtatatggggaataatcattacgtgttgcctctgacggttgaaatggtagagaagatcaagaaaatgccgaatgttttatccgtgaatcatcaagaggatgatggacaaatattcccgtatagcccgaattacccgtggacccgtgataattttggaccgttaccgatcccgaagaaaggggaaactattgacctgacgttggagaatttaccgctttatgaccgtattatcggggcatacgaggagaataaactggaggtcaaggattccgttatatatattaacggcgccccggcagataaatatactttcaagatggattattactggatgatgggggataaccgtcacaattcggctgactcccgttactggggatttgttcctgaagatcatattgtcgggaaagcttattttatctggctttctctggataaagataaatctttcttgggtaagatacgttggaacaggatattccggttcatacattaaaaaaagcggcatgtgccgctttttttgttattatattttgtaacttgtcattgttttaaaaaattacattatggctaaaactaaaaataagaaaacatttgtattagatacgaatgtgattttacacgattacagatccatctacaatttcgaggataatgatattgttattccaatcacggtattggaggaattagataagtttaaacgcgggaatgaccagattaattaccatgcccgtgagtttgtccgggaactggatcagatttccggatcagatttttttcaaaaaggagcgccgttaggtaaggggagagggcgtttgtttatccagacgggagtgcctttctctcccaaaatgaatgattcttttagcgaggatatacccgatcatcggatattggcaattgccgaatatgtaacagagaagagagaaggagaaaaggtcgttttggtgtcgaaagatatgaatttgaggatgaaagcgaggtctctgggaattttggcagaggactacaagaccgatcaggtgaaggacttggaaatgtcgttaaacaagtgtatagaaacaaaagaggatttctctcaagagttgatcgcaaagctttacgaaagcggggaggcaggagttccggtagagacgttttttccgaaggaagaaattaaaggaaataattactatatattgaagaatggtagtaattcggtattggcttgttatgatcccgtccggaaagtggtgcgaaaagtggagaaactaaatactttcggtatttacccgaagaactcggagcaggcgtttgctctggatgccttgatgaatccgaatatctcgttggtagcattgagcggtaaggccggtacgggaaagacgttattggctttggcggcagctttgcaacaaaacaaagcattcgagcaaatttaccttgcacgtccgatcgtggccttgtcaaacaaggatttggggtatttgccgggggatgtaaacgagaaagttagcccgtacatgcagcctttgtttgataatctggccgtgatcaagcatcgttataatatgcatagtcaggagaaccggttgattgaggatatgttgaaagatgaacgtctggtgatttcggcgctggcctatatcagggggcggagtttgtcaaatgtctttttcatcgtggatgaagcgcaaaatcttacgccacatgaagtaaagacgattatcacccgtgcgggagagggcgtgaagatggtattcacgggagatattgaccagatagactctccttacttggatcgacaatcgaatggtttatcgcatttgtttgaccgtatgcagggacaggatatttttgcccacgtgcatctggagaagggagagagaagttacctagcagaagtggcaagtaacttgctgtaaagataaaaactaaaagataaaagctaaaagttcaatgatttaggattgttagcttttatcttttgggttaaacttttatcttttagttttcaacttttagttttttcaagtgaatatactgggttttttaagtgcggccattttattgactttgatgccggggccggatattttattcgtgatcacgcaaagtattacccggggaaagaaagcgggaattatttttgcttgcgggttgtgtacggggttaattgctcacacggcggctgtgagtctgggactttctttgattttatataattctccggtggcattcagcgtactgaaatacatgggggcggcttacttgatttatttgggcgtgaaatcatatatccaccggaaggaaaattcgttagctttgccgactgctgccggggtagaatataaactgtaccggaagggaattctgatgaatatactaaatccgaaggtgctgttgttctttattgcattctttccccagtttgtaagtcctgccacggagaatccggcaggagagttactggtgctgggattgctttttatggcgcaggccattgttatattctcgttgatagccttgctggcagaccgattatcacgtcggttgatgcaaaatgctcgattctcgttgatcatgcatatcatcgaatcgttggtctattttgccatcggaatcagtctgattttcgtgactgtttgatcagaattttcttaatcgaagtattcgaggtatataggtcgagatgtggcgggctttcttggtttcgtatacatctgcaatcttgatcaaaattgctgtttcttccacaccaccaaagcccgggtttatggctgtcccaaaggatttcatggaaggtgacaggctcatgtaggcatttacaagcggggggatattttccccgtgttcccggacgtaacgagaaaggattcgataatcctcgtcataattatttccgcagagtattttcccgagtttattgtcatcaatatgaatttccaacggagtaatcggctcgacaagtcgttccgtgtctttgaaatactttcgcatgaaatacaggatcatgtcacgggcctctatgttgaaactggtgtacatggttactttcccgaagaagtattccatacccggattctccacggtaagagcgcccagaccgtcccacaagttatccaaggcgaacagggatttgcgtcccatttttgtagactggtacaaaggttgtacgaaagaacgccccaactcgatcattttagtgagatattgctttttgaaagcctcggagaaacggaataattcagtcgtggccaagttgggttctccctcttgatttaaaggaaggttgtcacataaaatataccggtacccgcctaggatttcctgctctttcgggtcccatacgattaattgctggtagggaacctgttcgtcaacatcaaacggatcaatgtctacctcttttccagtaccccccccggcagtcctgaaagttaattcccgtaatcttcccacctctttcatcaagttagggctgttgaaagcattgaacgaatagatctcgtttccccctttgttggttttacgaatgaatctttcttctgtcagttctgctaataatttcgctttgtttacaggatagatgactggttgcatagtttatgtagactataattgatagacaatattctttatctcttccgcccactctttcggggttttgctcttgtccagcgtttcccatttaatgggtttcccgatgacaagggtaaaagttgaacctttcttgttgaatgtttccttgggaagatacatcatttccagattaacctttagccctattttggtacgaaagtttgctaaattataaaagaattttgaattttccgcttttacccgtatcggaataatgtctcgttggtatttgactgctttaaccacgaaacttttttgccattctaagtcttgaatcacacctttaactttgcggcttaccattccggcagggaaggtgatgatctgggcatcggaggcaaatgcgttttccaaatccacggcagcttctttggccaaggctccatgcttgttaaccggtaaaaagatattattcagattcttgaggttcatcaacaaatcgtttaccgggaatttaagttttttatatattttccctaagaaagagatcagaatgataccatccggccctcccagtgcatggttagcggcgaaaatgtagcgtccgttgggatcgggtaaattctctttaccttcgataatgtaagaaatatcaagatattctaagataccttcggcaaaatccaaacctttttgatccccatatttagagatgaagtcgttaatctggtcttggcagatcacacgttttaaaaatgaatagacgaatttcggaatccagcgggctaacttcggattcttacttttaaaaagctgttcaatatatatcggtttaaccgtttcttccataataaatgtgaattgaatctccttgtttcaaaacttttgacaaagataaaaaaccttattcaataaaattcgttagagaggatatgaattgaaaaatatgaacatttttaatggatagaataagttaaacgcaaaaaaagagaactatgagaaaattatctttgataacgagtggagttattttgatgctctctttcttgatggtggggtgtaataccatgaagaagttggagagagaggccatcgaaacggcaattgtggggaaagtttctcctcagcagttgactgcggtggatggggttgtgaattttaattataatattgcttttgctcccaagcagttttataaaaagttaattttgaaagtgactcctaaaatgcaatatcccggtggggaagaagcgatggaaccgctttatttccaaggtgagaaggtgaaaggaactaattatccggtggtggaatataaaggaaacacgctgggaacttataatttatcattcccttatcgtgacggcatgcaaaaaggggtactaatcgctgatatagaggcgatcatgggaaataaaactgttgcgtttactccggctatattaaacacgaatggggtgaaggaatggaaaacatacatgtattctctaccgaacaatccggatgcaattcctttgtttactgaaacttttgtgaaagatgttccggcaacaggtgtgggaatcattagtgggtacgtgttattcccgttatctaaatccgtgattacagatgcgcagaaaaaatcgtctgtcatggcacaggcagcccaagagatgaagaaaattctggcagacaagaatgccaagattaccaatatgttaatgtacgtttccagctctccggaaggaccggaaagattaaacaagaatttgaccacgaatcgtttcaatacggccaaggcttatttcatgaaagatttgggattggctaacacgccgatggcaaaagatactaaatttatcgtttccaacacggtgagcgagaattgggaaggtctgtatatgttgttgaatgattccaacttaaagaataaggcacaaatcgtgaaggatttgcagaatgccccgaatttacagaaacgggaggctgttttggaatcatatattaagactgtaccggaattgaaagatgtgattcttccgacattgcggcgggccgatttctacgttttctatgccgtgcccgaagtgatgcaggtggaggatcaggtgacaacttattacgtacctcaattacaagagacttcagttttgtcagctcgtacggatgtaaatttgttgaatgatttggctgtcatcgctatccgtaacaaggattacagaaaagctaaaaagttactggaatcggcagctgtaattaatcaaaaaccggaagtgctgaataatcttgggattgtttatcaaaatgaagggaataatactcaggctaaagatatgtatacgaaagcttctataaagaatgaggcgaagtataacttggggatgttgttattgaaagataaagagtataataaggctattccttatttgaaagcgatgccgaatgtgaatctggcttacgctcagttgatggctaatgataatcgtgctgccttggagactttgaagaagttgaacctgacagaagggtacgagtattacatgatggccgtggctgctgcaagagtaaaagatgtacaggcaatggctgttgctttacagaaagctatacaacttgacccgcaattgaaagagagggcaagtactgataaagaattttatccttacgctcaagaaagtatttatttggatattgttgattaaaattgtttgactttgcattttaaatcgggccgtagcgagagctatggcccgatttgttacaagttacaagtttgcaagttacaagttatggcgaacctgtaacctgttaacttgtaactttgtgaaacaatttattgttttacagaaccttgtctggattctgtttgatgaagtctccccagtccttgcatttggagtttcccgtggtgggtaagttgccttgtaggtggtggcaataggcgatggcgatggcatctgtttcatccaaggtggaaatggtggtcggtatagtcatgaatttgcctagcaaaagggcaatctgctctttggaggcctctcctgttcccgtgatgctcattttaattttcttcggggcatattcgaaaatgggaatattccgttgtagagcggctgcgatggctacaccttgtgcccgtccgagtttcagcatagactggatgttcttaccgtagaattgtgattcgatggccaattcgtccggatggtaagaatcaatgacttgcagtgtgcgttgaaatactctttgcagtttgagatacggatcggtcatttttttcatgtcaacgactcccgacacgacaagttccggtttgcaattctttccggttgtcctaagaattgcatatcccatgaagtttgtaccggggtctatccccatgattagtttttccatctatcagttttagattacaaatatagcgaaaatctgtcagaatttcgatttattcaatctcttcgagagtggtactgaaatataaaagatcctcaccgaacacatctaccagcatatgtaataatctgtctttgtagttttctataaagatgctgtattcttcggcagaagggaatatgagttgtagggatagggacaggccttctccttcacgaatcatgacacgggtaaatagtatgtcattacaaaggtttttgcccttgagataagcgatgtaaccaccccggataacctgaatgaattcctctgcaatgttttcgtcaatactgaatgtcgtgttgtatataaagcgcatattaagctaaaagataaaaactaaaagataaaagataaagttaaaaactaaaagat

SEQ ID NO: 168 - DNA, 8400 bp, Butyricimonas faecihominis
  modified_base (1697)..(1796): a, c, t, g, unknown or other
  misc_feature (1697)..(1796): n is a, c, g, or t
atttataagtattatcaccatgtaacgccctatctattccttccgttaattgcgtggaatttaacgatctatctaggaagttatctatataactgctcttgttagcaccagtaagcatgttatagaatttccataaattgatctcgttctctccatgttcctttttaaagttatcatcatggtaatacgccttggcaataatgttcacctgtgaatccgtcaattccatgttgggaagtaacttcttctcttttgcgggcaagcattgatacaacctgcttttccccaagaactgtgcgaattgatgttccgttaagtaagaactagtgaagctcttcatcaaccgtaaatgcttgttggcatcgtactgttggaataacttcataacctctctaaacaggtcatgttggctcgtggctctaaggtctgttttaaaaccgtctgtaaatgtacacaggttacaacatactttgttttggaaaccaatagcgacactaaacctctctgccactttctttgaataaaggttctccctgttatacgctctcacgccagtgatacataaatttaccctgttaccgtctatcgtttcataaatggtaggaatctcaaaagcgaatgccattctctcgtaatagattgtcttgtcactttctaacaattgtgccactggtttatgtatggcttctggtatccttccctttataacgtgacttaccattatatctggttcatctatgctttcccctctaaacagttcactcgctaccttgtgtaccgtttcaataaacgagggatgagatattgtcatctcgttatccttgctgaacactgggacgatgcaatcactttttaaacggatcatgtcaatgggttcagtgttagcttcaatgaaatgttttttccttttgtcctttctaacaggttcattcactacttcataagatgtgtatgtaggttcttcctttcttgtattattattaccaaataaaactggcaataacccttcattttgacttggaattaatgttgtcgtgttcataatctaatctatttaacggtggtggaaatatttgaaatttcagtttatatatgcaatccattaatttcccaccaaccttggtttctaaagttcattatcacttttacttgttttatttgttctctagcttcaagccaattaaaaaattaaactggaaatatacttttacaccatgtataataatggtgaaaattacctcccttacaagctatatataccaatacagccaaaaattcaccaatcttgatttttaaagcttatcattacttcttgttattccttttcctctttaacttggaataaactaagaaattcaactggcaacacacttctataccgtatacatatagtggtgagaattatttcccctcttggtcgtatataccaatactgggaattattcaccaacttcaatttttaaagtttaccgttatctgaataactgtaatagtcatcctcgcaatacaagatgtaatccagtaaatctatatccacatatgaaagtgcgatcttcaactgttccaccagttcatcatccagtttagcgggttcaagatcaccagaaggttggtttatacaaatgatcactcctttacaattagaaagtatagccagttgcaatataaaccttacatccgtaatgttgtaagataannnnnnnnnnnnnnnnnnnnnnnnnnnnnnnnnnnnnnnnnnnnnnnnnnnnnnnnnnnnnnnnnnnnnnnnnnnnnnnnnnnnnnnnnnnnnnnnnnnngttcatcatccagtttagcgggttcaagatcaccagaaggttggtttatacaaatgatcactcctttacaattagaaagtatagccagttgcaatataaaccttacatccgtaatgttgtaagataacgcaccttcactcacggtagatactcccagtaccctgttactaccatttaatagaataattcttgtagagatatgatgctctattgtatctttaaacggggataccagtaactcgtaagcgtcccttgcggattcaaccttgtactttttagttggttttctcctgtacaccagttctaccactggtaatttcacttgctcgttcatgatctatttacactttaatcacgttgtcgttttcatgattcaggttcacgttagcttgttgggtttggcaagggaagagaaacttcgtgttcctatattacctgcttggaaagcctgaatgacttcccccgctttaatatcgaaacctcgtttccctccccgtgcgctcgctgtccctgtatctttttaactactcttccactagagcgaacttcttaacgagtaattttgccctttgaccacggtaaacggctggtgtttcaacctgaccgcataacacgattttcttgtctttaagcgtggtgataagggcgtctagcatcatgtttctggcaaaagaatagatgaattgtaactttttaccgtacttcttttcaacgataggatcgcatggaatatcgttaggcgtgacatctcccgcttggctagttcgcacgagttgagtgtatttaatctccctcacctcttcctctcccaaggcgcatacaacttgtaactgctgcgggttctcccccttgaagtcaatgacggtcatttcatcgcctactttcattgggggtggtattactgccacctgatttttaaaatgttctagcaaggctggattgatctcgatagaactggaaggtcttgtttcctccctgttttgaatgtaagtttttaagtccataattgaattgatttttaattaattaaattggtttttatctggcttggggtaggggtatcatgaggttacactactcttgtatagaacacacctgtatatattgccaacctaaaattaaaggggagggggtgttaaataaagggaggtgtacttgtgatattctggttggtgagtttttaacggatcgggtatataacagtaaatacctcgtgaattttcacccaataacttttaatgacatatcgtgatattgattaaatttacggcattaaccgtaagattaaaagcgatggaacttgacgatgaaagaatgaaatacgtgaaagagttttgttacaagtattattcatacgaaggtatggtgttaggagagttcacgttttatgaatcattactgccagataaatttgcatcatggtatgatgatattgtcaagagtttaccaaagcatttcaacgagaaagagtattctgaatttagaacgttacaagaatatatcacgtattttgatctggacaaaaatgctttctgggtattcttggttttcatgtatcaagcgattgaaagttccgttaccaaagaatgggttacagtagacgaggaagtggaacgtatttatagattcgtggaagaaaactgggaaaaattgcaagttcaaatttccacgacagataacaaaaagttacccgttataaaagataaggaggttttacattggatattcgtgttgcgagattcaaatcgaacccgtgaatcccagcatgattggattcctattcttgaaaggactgacaataaaattaccacgaggaaaaaaagttatatcatggtaaagactattgcaaacgagttcgttgcgaatagtaaaataacaaaagacaatcccccgaaaggcgcatacacgaataaagaacgagtattttacttgtgtatcttgtatctttgcggttatttggttggtgatttaacgaaaagatacgatcacaagaataccgctcctatcaaccaactattacgtgattttaaagacactgacgtgcatttaaagaatcttgaaatggtatttgccttcaacaaggaaaagtagagtttttgccgagcaaataatgccatgttgtcatgaatgtaaatatatgtaaacaaaacatgacattcaagaatattcgtgtcattctggcaggaattaatatcttgcttgtaagcctgcaaacagaattcataacaatgtaacgtattgaatataagtaatttattacaaaacaaatggttgctcggtaataaatcattctttcaagttttcccctttcattatagaataatggtatgccaaaaccaattttgtttttcaattttctctagtttctgccattataccgaataaccccattaaaaaaaatgtaacatcatcttgctgattatcagggtagggtaagtaatatatatcattatattacctcactttttggcatgccatcgcacgatacttgttgaaaactaagcatcaacgttgatattaaatttttaataataaaagatgatgacaaaaaataaaagaagcatggatgcaaaaaaggtgtccaccactcggggagagggtagagataccagaagtgaagtaaacccagttaataacaattcaaatttaaataaaatggaaacagaaaagagtattagtatggcaaataatgaatctcaagtgaacaacaccgtggacaataccacccagaaaagtatggagaatttgaaaaaagatttgaaaaaagcagaacggaatttagattctttgataaaaaagaaatttcccttggtagttatcgaggcgcaaaggaaaatcgtggaggagctagaaacagaagttgccaatcatcccgaaatgaaggcaagcgagataaaggttaaacctgattttatcacctttgaagtggtggatggcgatacctaccagaaaacggaggtaagcaaaaaattggcttttgtagaaaacaatcgccccgttgatcccaagaaggtgagtacatttatttctaccatttcagatgggaagtacgagaaggcctatcccgttatcgtgattcccgctacttcacttgtagaacagggatacacggtaaaagatattgaagggaacgtgatcaccaaagaagaggcggaagattatttcgtaattctggacggtcagcaccgaagtatcgctttcgccagaataaatgccactggtgaaacttgtgttattcctaatgttagggttaaggaaaaagagaatatcggggaataccttgttgaaataaacagggtgggtaactgggataccaaggataaaataacggttgcggctttggtgaacaaggaggacgagttgttgaatgttatggcaatgcgcatgggcgagggctttaatccttccaccttggggttaatctacgccaagaaaaaattgtctgacaaggcaacgaactcggctctaaagggagaagaatattccttaccgcagggagcggaaatcaatatcgagagaggtaacaagtttatcacgctctgtcaaatggcgggaatagaggtaaaagaacttaccaaacggtactttatagaaggtttcgatgggtacagtacctcaactagcgaggaccaagcttttgaagcattgaaaaagctaggcgaattgaaagataaagagaaaaaattcaagaatgttaaatctggcaatgactttatcgccttactaaagaaagttagcgcataaaaaaaaggaattctggttttagttatcacgtgtaaaaggcctaaggaaggctaaaaccagaaacctatatatattgttcaattttaaaatttgttcttatgaaagaatataatgtcaacgagcaaactcttgccataattagattatcactagcggcaatggcaggtgtgcaagtaaaagttcgaaattttgtgaagcaattcaagcaagcgagaatggcaggtagaactgtggccaatattactctcgtggagaatatcgcagctggggaggaatatgaaagtctgatttatgaggattttccacgtgcgatgcaattgattttggatgaattgttaccatccatttttccagatgtggtatttaagaaacccatgctgtgtgtttcccccgtccatgatgaagaggacaacgagatagcgggacattattccatgaatcttttggcaacggtttcgctacaagaaacgggacaacaaacaaacgaaaaatgagtttgttacaaagactagttactcaaacgggtgactagtctccctcctttttcatggaagcaagagtgttaatcggtaagcaagaaaaaaagaggttaaaaacgagaattttaccatcccgtccaagagcaaccatcaagatcagggtatagctatctctttgcctcaaaatttaaggtcggtgagaaaatgtctggatgggcatataatagttaatcgggggtaaaataccaccaagtaaaagataatcaacatgaaaagattatttcaaaaattgaagtttgaagttatcccagcgatattgaaaaagggacaacgtttgattgacgctttaaaaacgataggatataaggaaattccaagtaacgtgatactggataaaacgctaacaggtatcggtgccacttatcaagaattacacgctaaacgtcactccattattattgaaccaacgttgccagtgatacacgataaagcgtacggtaaagatgaaatattgccagtttatgaaaattgcaaagttcctgacgtgaaacggtatttacaaagagcagaagtgaaatacaagaaagttcttaccacgccagaaagtttctggaaggtgaagaatgcttgtgaagagttgaaatggaacatgtacaatacctttttctgcctgttcgatgaatgcgagaggttgacggaggatagcgattttcgcaggaaaattaccatgccgatgaaagatttcttccagtttaacagtaaagcgtttgtttctgcaactccattacaagtgagcgatccacgttttgaaggtttccagtggataaagatcaagccagatttcgattacaagaaaccgctaaacttgatagttaccaacagctacgattattcagtccgccagttattactgggacacttggtaaatagttctcgtgtgtttatttttttgaacacaacgaatggaattgacaagatagtgaacactttaggtattgaaggacaatcgagaatattctgttcagaaaagagtgtgaagaaattgaaaaagaaaggttacacaaacgtttcaagcttgtattctgaacctatcgccaaatataacttcctaacttgtcgcttttactccgcattagatattatattgaaggtgaaaccagatatagttatgcttaccaacttgtatgaggcggaacattcaatgattgatccttacacggaagcggtgcaaatatgcggtcgctttagaaaagagattgatggtagcactttcaattctatcacgcaccttactaacgttcgcaacaccttaaaagtgaaaacggatgaagagattgatattgaactggaagagaagttgaaaacttacgagagcttgcaagcgagatataacgaaacaacggatgcaactcgcaagaaggcaataattgatgatataaacaggttaggtttagcggaatttgccacgaaacttgatgatggattgcttgaaatagatcacttcgccattgataactattacaacaacgagagggtgaaacggtactatttatctggcaatgctttaagggaagcgtacgaaggaacgaaccattttacagtgaattacaggaacgtgtttcttgcggttggagatagtgacaggttagaattaaaggagcttccaacatttatggagcgctgtaaattgatggttgataagttgaacaagttacaagctgatccagatcgtgatttttatatcaatattcttaaacaggaaaaagatggcgagttgataattgaagcgtacgagaagttgggtgttgaggtatttgcaaacaagaagtaccagagggcagatattaaaaaggaactggataaatacaatacagaattattgcgttttagctcgatagttgtacaagaagttaaagaagccttccctttaaacgtaccaatgccacaagaagatattaaaaaccagttacaagatatatacaaacggtatggcattgattataaagtgaagaaaaacactattgaggattattacgatgcaagtccctcgtatcacaagaaaccgtatacatacactcttaaagcgataaaaaagtttccaaccaactaaaagcatagttaatgaactaatagaaggtgtacctgttgatgacattgatttttaattgcttgataggtatttctgatggtaaaattgcagttggtgaattatttacgagatgggtatataaaaggaattagacggtattttttcacttgcaagattaattttgagaattaatatcaaagttgaaatgcactctctttgctcatttatttttatttttgtaaaaagatttttttacgagatgaaatatttgatattagacactaatatatat

SEQ ID NO: 169 - DNA, 8395 bp, Butyricimonas faecihominis
gaatatattaagtgttacgatgccattaacgaatcccgtgttaattttttctgtaatcctttttattattctgtttgctccacttgtattacatcgttttaagattccggatattgtcggtctgattattgccggtgctttgatcgggccttacggcttgcatatcatggatcgggatagtagtatcgtgttgttcgggacggtgggtttattgtatatcatgttcgtggcggggctggaaatcgacatggcggattttaaaaagaatagtaaacggagtttgatatttggtctttatactttttttatcccgatgattctgggaacgtttgccggggtttatttgttagatttttcttatcctacttccattttgttggcgagtatgtttgcctcccacacgctggtgacttacccgatcgtgagtaaatatggaatcacgaagaatcgggcggttaacgtgacgattggcgggaccgtggtgacttgtttgctggcactactcgtgttggcggttatcgtgggaatgtccacgggagagttgacccaaggattttggatccagttgggggtatcaacgctcgtgtttgcttttatcgtgctttggggatttccctttgtcggacgttggtatttcaaacgatatgatgatcgcgtgggtcagtttatatttgttctgggccttgttttctttgcctctttcttggcagaggcggcagggttggaggctattatcggggcattcttggcgggattggcattaaatcgtttgattccgaatacgtcggcattgatgaaccggattgagttcgtggggaatgctttgtttattccgtttttcctgatcggggtcggaatgttggtaaattttcacgtgtttttgtatgatttgaccacgatatgggtggctgttgtcatgtgtgtggtggcaaccgtatcgaagtttatcccggcttggttggcacagaagaatttccggtttacgacttctgaaaggacattgatttttggattgagtaacgctcaggcggcggctactttggcggcagttttggtggggtataacgttattttgggaacaactccggaaggagaaccgattcgtttactgaatgaaagcgtgctgaacggtacggtcgtgatgatcttggtgacctgtattatcgcctcttttgccacgcagaaaggagcgcaggaggtggctttggccgagtttgcagaagatgagagcgtggatagtgaagaagtagaagatcgcattttgattccattgagtaatatcgagaatgtggaggagttggtcagtttggctgtaacgattaaatccaaaaaggcgaaagccgtgatgacggctttgaacgtgattcaagcggacgagggggacagtatggcggagaagaaggcgaatctgttactggaaaaggcaacgaaagctgctgcggcaacagacaatgagttggtgacttctctgcgttatgatgaggatattgtaaatggaatcaaaaatgccacgaaagagcataagataactgatattgtactgggacttcgtaaggaaggggtcatttctgatacttttttggggaatctgacagaccgggtgttgtcaaaatgtgcgacgaccacgttggtttaccgtcccgcacaacccttgtccacgataaaacgttacattgtggtggtgccgtttcgggcagagcgagaaatcggtttcccttactgggtaattcgtgtatggaatatggctaaaaattcaagcagtaagatcgtgttttatgccgatactgccgtgttgaatgtattgcaggatatacaggctaagcatcatatagaggtggaatttaatgaattcaataattgggatgattttttgatcatatcccgtgatgtaaaggagaatgatgctttgatgatcgtgatgagtagaaggaattatccctcttatttgaaaaatatgacgatgatcccgacttatttgaacaagtatttctgtaaaaatagttgtattttggtttatccgatgcagataggtattggcgaacaggaattaggggcgttaaagagtatacctcatgcagattctcatgacagcttggatgatctggcggatgtgttgagaggattgttcaagagaaataaatgatttaattcgtttgccgtatgaaaaaagtgatcgttcttttgggtattattttattgggatatgcttttaacgagttttctccttttgaaaagaagttgatcactaattttacggcacagatccgggagttgcaacaggaaaaagtgtacctgcacacggataaaagcgtgtacacggtgggggataagctgtggttccgggcttaccaagtacatgcggctgcggtgtttcccatggtttatagtcactatatctatgtcgatttgatcgatcgacgggattccgtgattcagcgggtgaaagttgctgaacgggattcttgtttcttcgggcagatcgagatccccaaggatttacaacaaggggattatgctttgcgggcttttacttattatatgcagaatggaggggaggattattttttcaaaaagaagatccgggtgattaacccgaaagattcaagggtatggacggatgtgacttacacgaagaatcgggaaaataattatacggcaacgattcgtttgtctgacgggcagggagaaccatatagccggacgtcggtaacttatattgccggggtgaagaaggatcagtattcggtgaaaccagcccggacggataaagacgggaagtttgaagtgaagattgataccacgatgaaaacaatcgaagtggaatttcgggatggacaacctttcccgtttaaacgctatatttatatcccctcacaattaaaggattttgacgtgcagtttttcccggaaggaggaaatttgttatcggggaattttcagcaagtggcgtttaaggctatcggggctgacgggagagccgtggaggcctcgggagaagtgtatcaagattcgatcgtgattgctacggttcatacccagcatgacggaatgggaaaatttcgtttgcccgtgaatccgggaaagaagttttatgccgtgatgaagacggaggaaggggtagaaaaacgatttgatttgcccgaagtttcggagacgggatggggactttcggttagccggaaggattcaattctgagttatcgggtgatcaaaggggagaatgctatattgccggaggaattgtacacggtagtgcattgtcggggtatcgttgtcgggataaatcgggtaaatggcttgcaaaggggaagtgtgaatttgaatattttgccggaagggatttcacatatcgtgttgcttgatgctgcgggaaaggtgtatagtcaacgattattcttcgtgaaacgtaaccagcgtccggagttgaaaattacgacagataagccgacgtatattgcccgagagttggtggaaatggagatcgatttcgaagaggcatataaaggcctgttagacggatcgttttcaatatctgtgacagatgatcaaaaagtggtgcaggattctttggaggacaatattttatccaatttattgttgacttcggatttgaagggatacattgataacccggcttattatttcaatgatacgacaccagagattgcggataatctggatttggtgatgatgacacacgggtggactcgttttgacgtatccaagttggctaggggggagtttgatgatttaaaatacccgttggagattgggcaggtgatttccgggagagtgaataatttctgggggaagaagtcgaagggggctaatatcgtattgatttccaattatggattgtgtcggatggcagaaacggatgagaccgggaattttttgattgacggtctggctttccatgacagtacttcatttttggtgcaggcattaagcgctaaaggacgtcggggggtaactgtgaatatagatcaagatgaatttttacctccacattatacgttgcctaacacgttggagacaaagaaaaaagaggacgatttttataaaaagttcgggcaggattattattacgagaacggggagaaggtgtacgtgctagacgaagtactcgtgtctcgtcggaaacagaaaaagagctattctttttacgataatatagctaatcatcaattggattcagcccagattgcagaaaatgcagctttggatataacttggatcgtgcaacagttgccgggtgtgacttttgaaaaagatgatgatggggaagattgtttcaagcaattcggacggaaattgtacgttttggtaaatgattttgaagaaacgatggatcagattcgtttgatcccgacgggtgctttgcggaatatatctttgttggatcagatgcaaggaaaaatcttttttggagatcggggggctaacggagtattaattatctccgcagaaccggggtggacaccgaaggatttgggacgtcccaatgtgttaccttttaaaatcatggggtaccagatcccggacgaattttacgtgcctaaatacgagattgattccgtgcgtcgggataatcgttatgacgaacgctcgacaatttactggcaaccggttgtcaagatcagtaaagatgcctcggctaaattgtctttctacacggcagatacgtacggaaaatattctgttatcgtggaaggaataacttcaagaggagtgatttgtcggaaacgtgttcccttgatattgaaataattcaaaatttatttgcatatttgccattcatagagatggatgataggtatgaacaggaattattgttttacattaactaatggtacacggcttgatttcaagcaagtgttcgatcaatattttaattccttggttctttttgctgatcgttatttgggagagcgagaagagagtgaatctcttgtgcaggatactttccttgctctgtgggaaaacaggttagagtttccggatgaactttccgtgaaggcttatttatattctacggtacggaataaggctttgaatgtgttgaaacatcgtaagattgagcaacattatatgaatgaaattcttcaggacgaggatgcggagctttattatatgaggtcggtgattgaagaagaaacacgccggttaatttttacggccattgattctttgccggaacattgcagaaaggtgtgtctgttgaatctcgaaggaatggataatcaggaaattgcagatgagttgcggatttccctgaacacggtgaaatttcataaaaagaatgcttacaagctattacgggataaattgaaagatcaattttatcttctgtttcttatttagaacatccttactaaaaagatcgatttttttaagtttttcactacccgcttttttatttcagttgttctaggaatataaacgaatagatatgactagaaaatatattcgaatagcggaattgatctataaggataaaatcggggaacttaccgggcaggagaagcaagaactgcttgcttggttggaggaatctgattttaataggcagatattcgatgaattagcaaaaggaagttcattaagtcggagttatgctgaataccggaatgtacatcgggaacaggtgtggaataaaattgaaaaacagatagctccgcaaaggtctcggttgtcgttgcgatggatcgggtatgcggcatccgtgatgatattggtggtggcgggatggtttgccttccaaatgtcggataataaggattcggtacaggaaggtaaaaaagtagcccggattacaccggggacacaaaaggcgatattgcatttggataatggggaacaagtcgttttagcagacaataacacggtgattgttgaagacagcctttcagggaaaatagaacaagtggataagacgttagtgtatcaaacggaatccaccgtgaaggaagaacgacttaacgtgttggaaattccgaatgggggagaatttcaagtaacattagctgatgggtcgagagtatggttgaatgcggggactagattgacttacccgattgctttcgtgggaaaagaacggcgggtacgtttggatggtgaaggttattttgaagttgagcgggatgagagcaagcctttcatcgtggaaataaatggaatggaggtgaaggtgctggggacatcctttaatttgaggtcttttgctgcagacaatcgttcgacggcaactttggtgagtggtaaaattgaggtgaaaactcccacgcaacgtattgaacttttaccgaatcaacaagcggatttattggtaggggaaaacaaacttgctgtgcgtgaagttgatgcagttgcttacagtgcttggacgaaaggaaggtttgtgtttcgtcgggaacgtttagagacgatactggatgatgtgtctcgttggtataacgtgacggtattttatgaacaaagtcgggtgaaggatatacttttctccggaatcgtggagcgatatgcagatatatccgaaacgttggaaatgttagaaaagacagggaaagtgaattttatagtagatgaacagaaaattatagtgcgagccaaataaaaaaacaggaaagtgctccaacacttccctgcttaaagtttcattattggtagtttgctccaacaaactagcaatagagtttaaccttaaagaattaaacaaaactatgaaaaaaaaacgagaatttgactttctcaaggggagaaagttgcaaattagtttgttaaagatgaaagtgacggcattactacttttagtgtgtgtcctgcaaagtatggcaggagcgtattcccagacaacgaagtatgatatttcgatgacaagcgggaggttagaaaatgtgttcaagttgattgaacagaaaggtgaatataccttcttgtattctattgaagacgtggatcagatttcttctgtaaacgtgaatgtgaaacaagcggatttaaaggaagttttggacatttgcttggcgaatacaaaattgacttacgagatcaatggccgtttggtaattatccgggtgaaggatgagaatcctgaaaataaaatggtcgtgattaaaggagtggtgaaagataaaaagggggaaccattgccgggggtaacaattgtagggaaaggaacgactgttggtgttgctaccggaataaatggagagttttcttttacgaccgtgaaacaagatagcgtggtactattattttcttttgttggaatgaagactaaggaagtgaagtggcagggagagaagatgttgaatgttgtcttggaagaggatacgaaagaggttgaggaagttgtcgtaacgggttaccaaaccgtgaaaaaatcaaatatggcgggttctgtcagcacggtgaaagccgaggatttggttttaacaggtactcaatctttggaacaggctttgcaagggaagttagccggagtggcaattcagaatcaaagtggtttggttggtactcgtcaaaaagtgcgggtgagaggaacttcaactttgttaggtagtcaggatcctgtatgggtagtcgatggaatcattcaagaagacccacttccttttaaggcaaccgatttgtctatgtctaacacgaatccggacaatattgatatgatccgtaatttcgtgggtagtgcaatctcttggttaaacccttcagatattaaagatgttactgtattgaaagatgcttctgctacagcgatttatggcgtgaaagcggctaatggggttatcgtgatcaacacaaaaagaggagaaaaaggacgtatgtctattaactattctggcagtttttcaatagggtctaaggtaacttacgacaagatgaatttgatgaactctaaagagcgcgtggatgtttcccgggaaatatacgagagaggtttggttaacggtaacgtgttgcaggatgtagggtatcaagaagtgttacagcaatatttgcaggataagatttcctatgaccaatttaatgctagtgtaaagagattagagacagttaacacggactggttcgatctgttgtttgaaaatccattctcttattctaatagtatcagcgtgtccggaggtagtgataagactacgtattatgcctcttttggtatgtcaaataataatggtacggctaagggaaatgattctaagaattatcagggaagtgtgaacgtgacaacgatattttgggaccgtttgcgtttttctgctaaagtggccgggagtgttgctaagacaaagggatttcatggtagcgtgcaaccctattcttatgcttctactacgagtcgtgtgatttcggcttttgatgataatggagatttatattattacaagaa

SEQ ID NO: 170 - DNA, 8381 bp, Butyricimonas faecihominis
atattgattatcactcaatccatgcgttcacggattaacttgtgtatgtcacttgcacggtagaaatattttccgtctaacgtcaagtaaggcagtattcctttcttccggtaacgttgcaaggttttggtactcactttcagcataaagcacaaatcctgattgtcaaggagtttttcaccgttcaggtaattgtgaccgcttaacagacggtctatctttttgtcctgcatatcgagcctatccatgatacgctccatccaagccacaaaattttctttatctatatacataaggctaccggattaaataagacctatcataaaatagctttggttcaccgggtctttaatgattatctcccgttcacgcataaagcgaatataactctttgcggtgcgttccttgacatccaagacctgctgtaactgttcgcaaaggtctatataagtgatatgtgcctgtcgtccgaaaatatcacgggcaacacctaccagttccctttccttgcgcttctccttttcctctcgtggcttctcacccttgtaaacgtgcatcccggcttttttgtcccatgcaaagagcatcagtggaacgtccagcgggctaccgtcacgcactttcagtgcttttacgaccgattgggtaggttcttcgtctttctctatcgaaagaatagtagccgccttgcgctgtagctcactacccaaatgtccccgcaactttaaaccgttcggtacgaagtgcagcacacaaagaatacaggtgttgtagatgcccgccaaccggtaaagttcatctatcaccgccacgctttccgcttcatcgttggcactctttacaaggtctgcgatgccgtcaatgactaccaactggatgccgccgtactggtaatagaacttatccatgctctgcacaatggcgttcaagcgttccttgcgtgacatacctgtaagacaaaatgctttcagttcatcgggtttgtccggctgtttggcacgtgccagcaggttacttacattcttgaacagttgcacttccgactgttcggtatcataaagcaataccgccttgtgcctgctgttggcggttatctgtatgcccagtgtatctacttccgcaccaaccggacagatgcagcctgccacgattgcggctacataattgctctttcccgttccctcgcccccggtgatgccgaacaggttgccttgtgtccctaacggaacgtcacccgccgaaataatctcttgcgctttggcgggcggattgttgaaatctatttcgcacgattttagcataatcaatgtgtcgctatacaggttgtctaaaaattcgataaacaatttcagaaaatcttcacgggtgttcccggctttgaagtagtcggatatgtccttttcctctttcgttcccggaagtggtagcaacagacgtttcacgccaaattcttccaatagcttttcctgcttgcgtgaactttccttgccagttttatccatatcgaaaagcaggatgatgtgtttgaatcggaacgtcagccgataaaccagcgtgggcgggatagtcaccgtttcgctgttgaagcagatagcgtgaaaaccgtgtgccgccagcgaaagcacgtctttttcgccgcccgtgataaagagcgtatcgcctttggcgggcagttgctccagtccgaaacagtagttttcgccgaagctgccgccgtagaggaagcggggcgtggagaacgggcggtacagcttgatgtgctgtttgcccttgtagccatacatgggttctgccaccgatgaagtgtaggtgtatggtttgccctctgccgtttcgctgctgtattcccggagcgaacataccttgtaacgttccagcagttcggacatgatgccatattgctgccagtattccaactcggagggggtgaacttctgttcccggaactggtagggcttgacgggcttttcgggtgtttcttcgggtttgtccggcactgcccggcagacggttgccgggggaatggaaaccggagtgccggaagccagccccaagcccaaatcccggtcgatgatttccagtatctccacgaagtcagccgccctattgcagtccagcccctttaactgccccacgaagaagaaacaatcaccgctataattgtcgttaccgaagtctttcatcttgtacataccgctatggcggtcgaagtagatattacaggaagccttgctgtcctcgtacaatgggttaaggaagttccgaccaatgcgccagttgccgggcagatagtgtttgaaaacagacaatccgttatttgtcctgcttagaatttcgtctttctttagcataagcctcatgatttgcaaccaaattacgcatacattcatcattactttttatcagccgttcttccaacaggcgttttaattcgcctattttatagtaacaacgtcccccaatgttggaataggcaatagtgccatttgcccgtaagcgttgtaatgtacggtcactgatttgaagaaatgtgcagacctcgtaactatccacccaaatttcatcttcattcgttttgttttcgtccaaacggttaaagataaagtttgctatggtggtaatcttgttgtcaagttccttataggcttttgactcaaatgttattatctccatattgctaacttattgatttaccgcaaagttcgggagaagaaataacctaaaagtcatggttatatctatcatggtattacttttttcaggctattttagggaaatatcggcgtaaaagctccccaaaatgttatttttcaaagtatatttcaccataaaaagaaagtaccatgttggggtgaacatggtacttttacatactgaaatacaaagtgttattttatgtcatctttgttcatccgcttaacaagattatctatcagatgatgaagatacgccgtccggtcttttctctctttcatggctatgtatgaagcgtaataatcccctaaatcaatgtggaatatcgtgctaaggaaattcatcatttcttttatttccacgttgccattgtttatgtcgcccgaagatacaagagaatatcccagttcgataagatatgactttttgcctgtgaaacggaaaatatacttatccagttgttgcagcttgtgttctaactgattagtatttccaagttttaacaaccgttgatttaagtatatacgcaacatttcgttacataatatcttcgctatcttataatcgtattccgttgaaaacaacgggtcacggtcatattggaaactgtcaagcaataactgaatatccgttttcttgcgaacgaaatacaaactatccatataagtggattttgaccgatagtattggtaaaaatccaaattgtcacggaagaaacgggttaattcctctaattcttggttcaaatattctttgaaaatctcattgttaccaatgggacatttcatttcgatactgtaaaccttactgaaatacagatatttgtcgaggatattaggcttgatttccttgaaaaatagaatttcgtcttcatttgttggaaatacatagtctgatacaagctttcttaattggctgtatagcggagtaatgaactttaccatgtgcaaagcatcatctgctgtaatatcattgtcataattgagcaattttatttcagcatttatccgggacaacatttcttccgctattgttctcatagctacctatttttcatagccactattttttctaaatcgccattcatcagataaggcaaaaactcctgtatcttatctaccgaccagtcccaccatttcaaagtctgcatctgttctattatatcaagactgaatcgctttcgtatctctttgctagggataccacctacaatggtatagggcggaacatctttcgtcacaaccgcccttgtaccaacaatagcaccgtcaccgatatggacaccagccataataacggcttcatagcctatccatacgtcattgcctattacgatgtcgcctttgttgtcccaagcggaagccacatttgccttatccaattcccaatcttcataaaacagtgggaacgtgtaagtcgatagtgatttcagggtatgattggcgcagttgaacagaaattttgcaccgcaagcaatagaacagaactttccaattatcagccgttcatggttaatgggataatgatacaatacgttgttttgctcaaacagacacgggtctgaaacaaaatcattgtaaatggtatagtcgcctatttcgatagacgggtcttttacgacagcattcaaataaacggtttgcgtgtcacctttacggggatatatcttgttcatcataactttcagttcttagtattgtttatatttaagataaatgacggattgtgtaccaagcagtatcacatataagtattccactgcccaatatgccgctaacgggacatcacaaaaatctaatccccataagcagaacagataagcaatagtagttgtcacctgaaaaatgaataccgtccgtgttgctcccgttcctgttgcagcattcagatagacgtaaccgggtaatgcaaagaagtaattcaatagcatgacaataaaaggcggccatgcaagctgtatgatagcgggattttccgtataagcccctataatgtgctggtgaaagaacaacacaaaagcaatcagtggaatgcttgtcgcatatcctaaacggataatcttatggcaaagcggaaaaacttgtttcttttcacctgctccaatcaggttactcaccaaagaaccggtgacaccagccaacgcattgacgataacggaaaacagggcggaaacacttcttacaatgttcgatacagccaattccgtttctcccaaacgttcgatcgccacgaagaacagaaaccaaatggctacacttgtaaaaaactggagcatactccataccgagatagaaaatacctctttcaataccgttatatcaatacgccagtataagccatacgcttttttatcaatgtgccgaaacatatatgcagccaatacagccagcgaacacatttcggcaaatgaagatgcgatagccgcccccgatatacccatgtcgaagccgaatatcaggagccagttcagcggaatgttcaccagtacggcagtgaaagctgccatgttcagagcttttgtctgtgtaatgcctaccaaaaacgagcgtaaggcaaggaacgggaaagagaacaacaatccccaaatacgccaatccaaatagcggataaccgcattatagacatcatccgaagttatcaaatgtttcaacagaacgggagaaaatatcttggatagcagacagaggagtaccgccagtatttgcaagaaaaacaatccctgaaagaacgtttttcccgtttctgcataccgctgttctccgttacggcgggcaattaccacttgcaaccccaaactgaacccgaagccgagcatataaattgccaagaaccatattccggcaagggcagatgcgcccagttccacatcacccacatgccctaaaaacaaagcatcagtaatatttatcagttgttcgataaggatgctcatcattacaggaaaagcgatgagccagattttcttataggtataattcatttgttcaaaccaatatgatacaatatatcctaccgctttaagcagcacgacaatcttatagatttataataagggataatgacaaaacaatgacaggcaaacttaaaacataagcctgtctattgctgaatagcaataattggaagtgctattcgttgagcgtagctatatgcacaactgccatttcatattgttgaacaactatttctttttctgttagttctgcaaagatagcgtttttccctgaacttatattctcaatttattaatttctttctgaaccctgtctaaaaagcgggaagcgtgcgccccgtccatttgcgtgtggtggaactggaaagaaacggtaagtgtcgttttcagcaggcggcgcttgtatttgccccaaataagaaacggattattaaaaatgccgctatacatcccgacagcaccgtctatttcatattgtgccaatgcggaagttccgataaccatgctttccgtcaagtcgtgattgacgcaactttcagccacttgtttggtaagtcgcagatagtgttgattaaacacagataaatcatcgcaaaaaggaatatcacacgaacttacctcgcccttccggttggcgacaatggtgtttactgcaatggtgtcgtactgcatcagtttaccgccaacgggcagcatataaaattctttcacgctccttgcggctttgccgatgcaccagcacatcaacatattaaacttcatgcccgatttccggctgattttcgcaaggcgtgacacgtcgagtgtcttaaagaacgtcaccatcggcataggtgcgttcatccacatttcaaaggcgtatgcccggccggtttcttggggatttacttctttcatacttaatgctattttcattcaatgaatcaggcggcaaaagtaggagaagcgtttgaccccggatagaacaaacgggacatttacacgggattggtgaacaaatcggaatatggatttgatactttcagcaaagacacgggcgtatatccgcagaatttcttgaactcccggataaagtgtgactggtcggcataaccgctggcgtatgctatttgtgcctggttgaattctttacccgcttgatgctgcatctgcgccaaagccttttggaagcggacaatacgggtatattccttgggattgattccgacaaatgaatgaaacaaccgctcgaactgctttttgctcaggcaggcaatggaagataattcgtttacagagatttgcggagtgatatacattcgctgtatggcggcatctattcttttaattctgtatgtggtatccgccaaattatcggcaatttgtgacaccagccatttttctatatagcttatgcaaatagaattattctcacagtcgaatattcgtgtagccagttcattcaaacttttgttttcaaggctgtaaccggaaacttcctgattgtaaaagagcgatgtcggcatgttcagaaacatactcatagcgtgagggtggaatacaaccactatcatttctgtatttccgtctgcatataggtgtgacgagaaattaacttgtccgctcacagtcaatttgtcttgtgtaacgttcagttcagggatatataacggtgcttgtttatggaaaataatttgagagcaaccgataggataagtaaaggcatccagcggtcgattgctcttgaatacccaataatatcttatataaggttgcagcaacttacatggcttgtaaaatttgaattcctcttgaatcattttacaaaggtaaaagttttaatcctatcatgtttatagcacaactgcttttttattttcactgactaattctaatacctcatatcatcctcattcatccgcttaacaagattatctatcagatgatgaagatatgccgtccggtcttttctctctttcatggctatgtatgaagcgtaataatcccctaaatcaatgtgaaatatcgtgctaaggaaattcatcatttcttttatctccacgttgccattgtttatgtcgcccgaagatacaagagaatatcccagttcgataagatatgactttttgcctgtgaagcggaacgggtatttgaagcatctttgtagattatcttctatctgattattcgttaccaatttcaccaatcgcttattcagataaatgcgcagcatttcattggcgataatctttgccactttatagtcatatccggttgagaaattagggtctttatcgaattgtgcgctatcggtgcataaacgcaaatccgctttgccccgaacaaaataatattcatcgtacactgttgaacgtgaacgataatattggtaaaagtccaaattgcgattgaagaaataggtcagattatccagttcccgattgatataatttctaatgacttcatcgctaccgttagggaattgtgtttcaatcttgtatatcttatagaagaatagtaaccgacctagtatttccggtttctgtgtcttgaaaaataaaatttcgtcctctttggttggaaatatataggtttgtatttttgttctcaaatcatcaagaactgtttgcagtttatgtaccattgaaagagaagtttcgataatatcatagccgtagaggtcgatttctgaaatatcaacttctatttgcgctaacatcttatctacttcatctttcataacagacctatgtgt

SEQ ID NO: 171 - DNA, 8381 bp, Butyricimonas faecihominis
aattaacataaaatacaacaaacaaccttcttcccttccgaaaattgctactttcattttcaattcatcagagatcatcctgtagcgcttaataaccacaataacatatctaacattcacgaacaccttaattgccatcaatcaaaaatatctacacgttagaaagttttaattactatacacacacaagtaccccgattcatgtaaatcgatggcgtagatacaggcatcttacagtataatcgtgccgtagtctcaagggtaggtcaacgataggttaacgaaaggtcaacgaaaggttaacgatacggtgtgagaattttttgcagatttcacattataatagaaaggacttctccacgagtcaccaaagagagtataaggaaagagtaaccggagatcactgagactaatttacagaaattaaaaacaaaaacatgaaaacttcagcaattgaaaacaaaagagaaaaatggcatactaacggactcacgttctattaccaagcaggcaaattatgccagtgccgtagcaagcgcccccgtttacgaaatggcaagaaaaaagacgggaccccgttacaaccaagtccggagcaaataaaagccagaaaggtttttaaaaatattatcgcactcaaacattattattttaagcaaatcaaagatctcccgatctgggacctggctcccggggaagcaggacaaacacggctgtctaaatttcataaggtaaactcggaagcttgtgacgaacggggcgtggcgaattacgcggctttcaaattcagtatcggccagttgtttcgccccgtcaatgtccgggcaacacggaagggatgggaaatcacgatgatatgggaaaaccgggaaaaccgcaaactatcactgccatcagactggttacgggtaggatatttctacggctcctatccattttcaccgaggttactacccgacgtggtagccaaacgggaagattgccaagcaacgttcagtattcctaatcccggtctggaaatttcagaacctatccatttgtatttgtttttttccagacaggatcggattgctttttcgacaagttaccacgttcaactttaagaaattcaacatcaaacattcataaacttataaataccaacgttttattcaagatttcaaccaatcgtaattgttaattattcacaaatctgaagaatgtatgggaattttcccacgctcttatattttactaacacagggagcgactctcgatgagtgttcgagaaatctcccttgattaataaccttaaaaccaaaaatcatgagtaaagaactagagccggcagcaaccggcaaaagcgggagacgtggaaacgaaattttctggacccatcccacgaagtccggtatcatcgttgccagagccgtcagtgcccggacgataaaactcgatgcggaacgtaaaccccacgccgtcgcattcggaagtatcggacatctcagccgaaaaatgattaaagctatccggctgggatttccgcccaacattatccgtgagaaaggggctaccctttttatccggatcaatttaaaaaacggagttgccgaaggcattcaaaacgatccggatgcgccagtaagtaagaacaaaaaagcatccgaagaattccacgcagagattcatttcgatcgtctgctcgttgcaaacggggaactggaagggccggacgtgacggttgccatcgataaggaatctcgaatgctcacgttcacgcaaacggagaacttcctagaaggaaccaaaaacgaagagaatgatcgtatttatgccgtgatttatgaaactaaaatcgaagcatgcattattcgtgaacttcgccaacggaaagaaaacggggtgaccagtgtttctctaccggagagatacgatcttgaccagctagcaatctacacgtttgccacgagccggagaggagatcaggcatctaattcccaatgtctccaaacaccgaaaaacaagggagaataaatcgcaagaaggagtatctcgaaagggattctccttccctttgcaactatttcggattataacaaatgattcagtgattctacattaccttatctaaaatcactgaatcataaatcaaaaattacaacgtcttatcccaatttctcagccttaaacccggcctcttttaccagctcgattacccggtcatctgacaaatcggaagtaatcgtcaacacccggtcgggagtggagagatcgatattccattggtcacgagcgactactttatccagcgtttcaccgatcttggcaacgcatccgccacatttggcggtggttttgaatttacttgttttcatatccttcttgtttttaattacgattccacccgtgaagaacattcggcacataaccccttcaacacgtagtttatactttctaacgtaaaatcgccgggcaaggccaccgtgggcacgtgaatttttcttaaacaaaaggtcttatggcaattccggcaatagaaatgagcgtgaagatcatcgatagaacaggtacattcattactgcataccgaatatttcaacgaaccggaaccgtcatcaatcacgtgaatcaagtgatgatccaaaaacagattaatcgtccggaatatcgtcgatttatccacggtatccaattccgtctctaggtccagtaggctaaacgcccgggtaaagcgagtcatcgctttcagaatcaacagccgcatggccgtcggcttgatctcccgcttttccagtttttccaaatataccttctcgtccataactctctatcttgctcgtttctgtattcttatcgcattcaaaattgccaacaaggctaccccgacatcggcaaacacggcctcccacatggtggcgagtcccccggcacccagtaccaacacgatcaatttcaccccgaaagccagcgtgatgttctgccagatgatccggcgggtctctttcccgatccggatcgccatggccaaccgaccgggctgatccgtctggagaaccacatccgcaatctcaatcgcagcgtcacttcccaagccccccatggcaactcccacgtcgctcagggcaagcaccggggcatcattaatcccgtcacccacgaaagcaacacgccttcccggatcgctcttcaatgcctccacgtgcgccactttgtcctcgggcaacaaatccccgtaggcctcgtccacgcccaaataccctgctaatttagaaacaattgtttgtttatctcccgataatatctgaatattatcaatatttaatttttttaatgctgcaacggcttctttagcatcttctttcacggtgtccgccagcaacaagtgaccgacgtactcgccatttaccgcacacacgacaagcgtttcgggaaccccggtcagctcggacgggaacgagatcccgtacttctccaacaaacgagtatttcctaccagtacctcctgcccatcaacgagtgtcttcaatccgtagcctgccagctcggagacctccacgtcacgccggatggagatttgccgggatttagcatactgctcgaccgccttggctatcgggtgattgctccggctctcgacagaggcaattgttcgcacaacctcctcttcggtaaaaccctcccggacgtgtacttgctgcacctcgaacactcccttcgtcaacgtcccggtcttatcgaatacaaccgtgttaatcttcgtgattgcatccaagtagtttccccctttaaagagaattccctgccgggatgccgccccgattcccccgaaataccccagcgggatactgaccaccagcgcacacgggcaggatattaccagaaacacgagcgcccggtacaaccaatcattcagcacgaaagagaagtccggttgtacccacgacacgatccaaggaaccagcacgatcaacacggccaaccccgtgaccacgggcgtgtagatccgggcaaacttccggataaaaagttccgcaggagctttacgctcggaggcgttctgtaccatttccagaatccgggccagagcactctgatcatagggcttcgtcaccttcacccgcacaacccggtcggtcacgatcattcccgccagcacatcctctcccgtgcggatgttccgaggcacgctctccccggtcaaagccgccgtgttaaaagccgccacgtcacccagcatgatcccgtccaagggtacccgttcccctaccttgatctcgatgatctccccgacacgaacttgttccggtttctcgatcttttcttgcccgtcacgaataaccgtcgcctgctccggacgtacatcaagtaaagcccggatattcgaccgggcccggctcaccgcactatcttggaatttctcaccgatggaataaaataacatcacggccacgccttccgggtactccccgatataaaaggccccgatggctgccagtgacatcaacatgaattcgttaaagtactccttttcccgcaagcactccacggcctctttcaacacgggaaaccctaccggaataaaagcgaccaaataccatacaaatcgcacgatttccgtctgaaaccaagcgacattcccccaagataaaccgattccgcaaaccagcaacccgaaagaaatcaattctgcactatattttttcatcattctactgttttaattttccgtaaaattacgattcatttcgtgcaactaaattgcaaaaaacagaacgcacatgaacatgatcccaagatcatcccatgcgcgttcattcgagctgacactccatagttgattattttaccatcacttcccgatgtttcatgatttcacccatatgttccaatgcccaatccaccagcatctgcacccgcggcatcaagctttcacccagctccgtgagccgatattccacccgcggcggtacctcggcatataccttccgcgaaattagcccgtcggcctccaacgtccgcagggtgaccgtcagcatacgctgggaaatgtcggcaatcgctttatgaacatcacagaatcgcatggttccgttcgcattcaacgtcacgaggacgagcattgaccatttgtcacccaagcgactcaaaacatcacgaatgggacaattatcgttcgtgtaaaaattttccatttttttcttccctatatatggtttagtatcaacaatagttatctccgtgtaactatcttatctataagttcgttcttgtttatgcaaatcaaatagcttacatttgctaaacaaaagtaataaacctactttaaagaactattgtttaactaaaaaaatttacccatggcaaaaaaagtagccgtattggcagttaacccggtaaacgggttcggtttgttccagtatctggaaacatttttcgaaaatggcatttcctataaagtatttgcagtggcagaaacgaaagaaatcaagacgaattccggcattgccctcgtggcagatgacgtgattgctcacttgaaaggacacgaggacgagttcgacgctcttgtgttcggctgtggtgacgctgtacctaaattcggggaaaacgccggaaagccttacaaccaagatatgttgaccgtgatcaaagctttcggggaaaagggtaaaatcatgatcggccactgcgccgccgccatgatgttcgactccgtgggcatcgccaccggaaagaaagtcgccgttcaccccctcgccaaaccggccatccaacatgcaaaagccaccgacgagaaatccgagatcgacggcaatttctataccgctcaaacggaaaacacgatctggaccatgatgccggaagtgattgcggcgctgaaggaataaaaagtttataaggtttataaagtccataaagtctataaggtctatggaccctgcaggcgctttgtctatggcagcttaagctgccattaaacttgtccgaaggacacccgacactttataaactttataaactttataaaccttacgaactttacaacctctcccccaaataggcctcaattacccgaaagggagcatccttcaacaaaacccgtttctctcgatccaacaaatagaatgtcgggatcgcccgcaaatcatagaggcgttccttcgtgatcacttgaccgtcatcataagtacacatccattctttcggttgttccggcaacattcgccgccatacttccagctcgggatcagggaaaacagataagaataccagtttcttccggtttccctgtactttgacattcaacaagttcttcaccaccccggatgcctccacctcggccttaatggcccggcaggcattacaatcgggattattgaagaagagaatcgtgtaatccgcgtttatgcccgacaacttccctttcttcccggaaggtaatgtataggtgaaatcggttgccggattccccacccgattctttagcgccatctccagccgaaaagcgggacgcattttatctatctctcccacccgttcggaattcacaatatatttcagcacgggaatataaaattcctcgttcaacatcggggaattcgggttataaagatatttatcatacaacaccgtaaaataagcaaacatcagcgtatcagccgaaaatgccttatccaacatcccggaaatctctttctcggcatcggtatacgagacataaggcaacacctgcaagaagtccacgaaagcctgttccgtgatctctggcatccggatcaaggaagtatcggcaaaattaaacttatcccagtaatgagtcaccaagtatttcgcccgctcccgctggtcggtgtaaacaggtggaatttccggtgcctgaaatgatttgatttctgtatttttaggttcctcttttccctgttttttaggggaagaagaacaagcggagattactagcgataaacacgcgacagcaatccaaacccgaacgatcctactcttactcataatttaatctttcattttcctacacaaagatacatttttatccgaaaaacgaggaacaaaaaaagaacccgggagtcaccccggattccatcctaaaatttacacgttcacactataacgcgtctactattttcttttgctcattaaaaaacatcatccgttggatctcgccactttgcgaaatcagcgtagaatgtctcttcaacgaatgaatccatttcttctggtaatcacatattttactgtctcgcgaatccatcgagttgatcgaataaacccgcaaaaaacatatctggaatccggccttttccacgtaactgtatgtcgcttcaaaattcacgttagaaagataaaccgacaagccgtttccattgtggaatgaccctttttcagacaatacttccaactcgcgtaaaagctggtgtaactccttcttcatgtcctccacgtctgttgtcgaaaccagtcccaattccgagaaatacttgatctctttcacgaatgaactgaaaagattctcatccagaataaagcaagtcttcctgacaagccttacatcctcaagcaattctttctgaactttcaacaatttttccggaagaacgatatcggacaaggatgcgggagttctcaagcgttcgttctgatataaccatctgccaatccggaactttgacaaatgttcgtaaggggcgtaaaatgtataaggaatcgtgttcgacgcggtcactacctccgtcgtcggatccgtcttcacataacgaaaaagcctctggtaacgcaccagaatctcgtaataggtatccatgggatccgccagattaagcacgttcagatcgaacatcgccccactggacatactgttaccgataatcttatctaacgatatgcccaattgaccggcgatgatcgcaacttcactgaacgtaaaagcaacctccccccttaatctccggtaaatcgcctccttactcatgcacaatatatccatgaggacattagcaagattaccctctttaggggtaacctcgcgcatcgtgctgattaattcatttaccacggcattcttcataggggtattattccttaatcaaaaaagtatttacctatagaaaatttaactactttcttagccggaatcaccatgttttccttgctattcgggttgtaaccgttacgttctttacgttctctgatagcgaaagatcctaattctaacaaggatattttttcacctttttttaacgtctcagccatggttccgattacagcgtttacagccttagctgcttctactttactggttccgtttttctcggccactttttcaattaattctcgtttgttcattgtaaatggtttttaattaataaatagagtttattgccacatat

SEQ ID NO: 172 - DNA, 8347 bp, Butyricimonas faecihominis
atatagtgatgatttatatctatttttactacatttatcctactaaataatataaccgtgatggacctgcaaatcattcaagataaaatttatgaaatccgaggacaaagggtcatgcttgattttgatctggctgaattatatggaacagaaacaaaatatttgaaacgttccgtgaagaataatttaaaacgattcccgtcggatttcatgttcgagttgacaaaagaagagtacgatagtttgaggtgcagaaattgcacctcaaaccaaagaggtggtaatagatatatgccttttgctttcacggaattaggtgtcgccatgctaagtagcgtccttaattcagaaatcgctatcgaggtaaacatgggcatcatgcgagcttttgtcgccgttcgacagttaatagccaactctccaacagataaaataggggaaattaaaaacgaattgaaagaactgaaagagtatatcaaggaaatgtttgccgaccaaaacgatataaacgaggacacccgaatgcaactcgaactaatcaaccaaacacttgccgaattacaagtaaaaaatcgagggactaacgaacgaaaacgaatcggttatcagctaccagaatgtgataatgaataaaagtgccatacactcgagtaaaacttatctccataaaaaaaagctagaagtaaccggaataccttaacttttagcttttaatttttaacttttatctttctgtacccccgggcagaatcgaactgccatttaaagtttaggaaacttccgttctatccgttgaactacaagggcccttatttggactgcaaaactaatcgaaaaaaacgtttattccaaatcaatcttatcaactaatcatgaatatcacgcaaatatctatccacaatcgattattcctcatcagaaagggccgcaaccttctgttggaaatacgcctgcaactgcgggtcttgtgattgcaaagacatcataaatgcctgattgaaacactctttagctttctgtttattctccaaagtcagataacaatcccccatggatgcgacaaatacggccttttcacttacctccatgggaaaagaaatcagtttatccaaccaaagtaaagcttgggtggccgactcacgtgttaatttattttgcattttcaccaataagttcatcgctgcattttggtaatcctctttcccggccaagtcccccattttctccaaataatcacgttgaagttggatgtatttctcctgatctttttcacgaaacaaggtgtacaaggcatccgccttggcggtcatcagatattccaccggtaaactttttgtctgcacgacatcgaaaatcggtttcaaatccccctgcaaacgagccaatacttgtttgtatgccaagtctccagccatagctaaattattgaccaaagtgttcacgtatgaagccaaataagaaatcaacatctgagccggaataattttcgcatactcttcgtagtgtttgatcacgaattccactgggtcgtttttctcctcccacttttgacaataaagcacgatgattccaaagtctttctcgttgatcatctcttctcgaggtttcgcgttccaataggtttgaaataacttttccacgcgatcttgccacttttccgcatccgctcgagaggttaatcccaaggaataaatcggcatctcccgcaatatttgccccatgagcgcaagattgtctttatcctgtcgatattgctcccacagcatatcaacggaaggtttctcacctgtcaggacttgcgcccaatagataatgtgctcgggggttacgccacctaacaaccgcttgatctcttttccccgggaatcaaggaaaagcaaggttggtaatccttggatttggtattgtcgagcaacctgctgatctttggaaatatccactaacacactaacaaaacgagattcgaaatattgggccaattcctgagattcaccgatttgccgtgcaaattgaacgcttggcgcaagtccttctgccacgaaattgacgaaaacaagtttattttcggatttcgctttctcaactgccttttttaggttcgtttcccacgagacagaggtctgtccccgggaaacaaaatagaaactacacaaaatgatcgcaatcacgcattttattctgttcataaaaacctccgtttctttctattccaaaatgaacgtgaacgcttcttccacgacttggctgtatccaggattagtcaatctcacggaaaccacgtacctacccggtcccgctttatgttccaatggatactccaaagctcctccacctccacgaatctgcagttcgtctttaaatttttgcgcttcaacctcccctgcagttgaggtcacggattccacgctaaacatgatttgctctgtaccttgatatccttgcatggcgtatgacacccacggggactggtttttgatgcgaatggcatccttcacgggacccaattcccggggtacgactaatgtgtccggttcgtaactggcattctccgagatcaagtatccaactgttttttcatgacaagcattcaggcaacaaacaaatattactgccccgataaatataattttcctcataaacctttcctttaatttataaatctctattcaacgtaaaattataccccaaggagtgtaccacacaatgattgggttcgatgttactggaagcaatatcaatatccacattcgtccccttcaccacgcaatagatccgaacggctccggcttcctgcacggtaccgtaacttccacgcatcgtgaagaggtagatcccttttcctcctaatgacaggcattccatacccccctcgataatacctccggctttcttgcccctcggaatgtcatcccgataaagttttctgtccaacacgtgacgcagcaacacttcctcgcaccaaagcggatccatgtctgccacccgttctatgttattctccaacatgtaacgacgaatcgaatgattggtcggtcctaaaaaggtgatctccgggtgatccgggtcctgcccctcaaacaaacgtaccattttttcacccgcatgacgtaccattaatgccgttgaatcccagtcataagaatgtcccggcgcttccatgtattctaacaggctcccgtcgaaacgcccattacttaaaccgctcttgataaattggtctttcgtacacccacctgccacaaaaacaaatagggctaacaatccaaataaatatcttgttttcatactctttatttttgtaagaatttattccaatacacattatgacgcattaaatcgttatttgtcatcgctttaagggctatatccatatatagagctccatccttaatatcttgatctgtcagtttcccgaaagcttccggtagctctctccgcacgtagtcaatgccgttacgccgaatatcataaaaacggtgatcttcaaataacaactctttttccctttctctgaagatagccaattgtaaatcgccttccgcagccgtatacttgtgttcatcgttcccatacgcccttttccgaatctcgttcaaatcgattaccgcatccgggttattctgacgagcgcgacactctgcccgaagcaacatgatatctgccaatcgccaaatgactttattcatatccatcccgagataacgctgtgttccccaatacggatcggtctcgatgataccataacggaatttatttatgtacgtttctttacgttcttttattctaaatttccctaccacgtgatcattcgtaccatacgataacacgcatttcaatatcttatcggcagtctgtaccgtgaataaagaatccgcttcaactccccaaaaataagcctctcgacgtcggtcttccggatcgaacatttcccgtacatgacttttgaaaagcatcaagttgtagtattgattgatattggtataataggtaggaatgcccacgtaaacttccgaggcatacgcggaagaataagagtcaatcgcatcatcctccaatgttctgtgaacttcccagatcgattcgcgactgccacgtttcatgacttctgtgcaaacggcttccggtgaagctgccaaggcataattccccgcttgattctcaatgatcatcgtgcagtatctttcggcttcaaccaaatattccggttgttcctcgatcgtggcccgccatgcgtaaagatgagccaacaaggccgcagccgctcctttacttccatattgtttggttgtccggctcttcccctcatcatctaccaactcctcataaacaggcaattccaaggcttttaacgcccatttagtcgcttcttctaatacatcatgcacggaacttctcgcaagtttaccaaaataggtcgtacctttcgtgataggaacctcaccccaacgttgtgctaaaaggaagtaagccacacctttagcaaaacaagcctgtaattcccaaggtttcaactcctcttcggtcaaggggaaacgatgcaggttgtccaaaatcaaatcagccgaattgatcaccctgtaaaatttctcccatgatttattcacgtaatacgtgtaatccaatgtacgaggcccgctaatgtacctactcacggctgaatcgatcatctctcctgcaaataaatgcgggttttgttctcctgtctcgcacatcatgcttcgtatatccaactgcagggaagtcaacaaagcctccgcatctttcgttgtcttaaaataattggtaaaggttgtatcgttctccggttccacgttgatcacatccgcacacccgaataacaaaaccatgcttaatatacaaatatatatgctcctcatcacttagaaatttaaagttaaaccaaccgtcatcttacgaggtaacgggtactcgataccaaagtccactcccttgtacacgtcaatcacttccggattcgcccccgaataattactcaaatagaacaagttttctaccgtaaagaacatacgagctcctttcagactgatttttttagcccatttggcaggcaaatcacatcccaaagtaatctgcttcaaactgatcgcatgcacgttctcgatattactatccatcatcacgtctgttgccgtacccatacgagccaattttgcatgatcacccggcttttcccaataagacaaattggcaatatccacgaacttaggaccggtagatatggtatactcccgggcattgatcatcttacgccccaactcgtagttgaacaacatactcaaatcgaagtttttccaacggatctcgttaacccatcccccatgcgctttcggttgcggtgttccggcatagtacatatcactaccattaatcatgttgtcaccattcaaatctttaatcttgtaggttccaaccttaccactcatcggtgaagcacaagagacgcctccaaaatatttcttattcccccaaatatcataatagaccggcacttcatcttctgagttgtagaatccttcagcatcgtacacgtatatcccgaataaaggacgcccgatgaccataccgccttcatctcttttgctgtatgatttttcaaagcgattccagtttcgtgaagcattgaatttcattcgccagcttatagggccttctcgcaaaatatctgcttctaattctaactctattccctcgttcgatacttccattgcattttccgtacgcttgttcaccaacaaaatagtttccggaagtggaacgctgtaaatcaaggacgaggtcaatttatagtaatagtccaacttgactttcaaacgataattcaacatatccaaatccaacccgatattgtattgctccgatttttcccaagttaaatccggactaatggccgaacctgccgtaattccactttcgccttggaaaggtcccttaacaacacgcatcaaaccatgagccatgtaaggatcgttaaacacttgtcctgaagtcccgtaactggcacgtagttttccccaatccaagaagttagcccatttcataaagctttcttgcgagaatgcccaacctaatccaagcgaagggaagttcgcccacttgttagcctccccgaaagtagacgacccgtcacgacggaaggtgaattccatcaaatagcgttgtttccagttgtaactgaaacgaccgaaatagctgaccatcgccttttccgtgaaagaagaactatacgaacgagtggctcgccagtcctctaccaacataccataatctctcacatccacactcaaatccggattgtagtaatacacgtagtcactggctcctcctttaccccaaccaccaatcgtgtaagtttggtttctttccacgttgaatcccaacaacaactcgaaattgtgttgttcatttaaagtcaatttgtagcgtaacaactcttcatttgacatagcgatagaacgcatgatattgccttctgatttattctcgtggttaatcttatccaaatcgcttggagtaaacgtgttcctatttccctgtgaataatcgacacttcctttagccgaaaaggtcaatcctttgaataatttgtattccaagtaaatgcttcccatcccacgcaagtcatcactcttgtcaacagtcttgttcatatcatccaaccaagcatctactccctctcgcgaggctggataaagtgtactctgtttggttggctgcacggtcatgtgttcgaaacgattgtgatttagcgcatgacgggtattcctactacgatccacgtacgcaccatacaactgcatatccatacgtagcttttcactcggtgtcgcagacaagttagccatcacgttgatacgttgatatgaacttgagttcataatccccgtttccgcaaaccaaccggcacccatcatgtaggtaaaacgttttgaaccaccacttgcctgaagattagcattggtaatctctccttttcgaaaagcgtaatcccaccaattcgtttggttattaaagaaggggttcaagctatcctgcaaataatcaatcacgttgacttttccatgtccgttaccccagaatttatcatactccccgaattttttatacgcctcggaatgtgacatgggataaactaagccgggaatcgtattatcattgcccggagccgaatagtgacgcatattttgaatttcccaccacctctctaagcgccctcctgtttgcaggggagaagccattaatcgagaagcagtataagagacgttcgccgagaatttagtttctcccacacgtccctttttcgtggtaattaagattaccccgttacccgcacgggaaccgtaaatggatgcggcagaggcatctttcagcacttcaaccgattcgatcatcgacgggtctatgtcagccatcgtgttcgttcccgtcaccggggatacaaaagaatgcatgggcacaccatcaaccacgtacaaaggggaaccgtcactcgccccatccgttaacaaggagttgaatccccgaatcgctacaaccgaagcacttcccggcgctcccgactggttaatgatatttaatcccgcaacacgcccttgcaacatgttcatcaagttagctgttggaagttccttcatgtcctcggccttgattgaagatatggcactcacgacttctttccgattttgagtaccataggcccgtacaacgacttcatcgacacccacgacttcctcttgcagggtaacccgaatcgtgtcctttgccgttttctccgtgaattcaacaatttgttttttgtaacccacgaaagaaaattctaattttcctttcaacataggaattttcacggcaaatttaccatgcgcatccgtagccgttccgacagccgttcctgccaattggattgtcacacccggcatgggttgatttttctcatcctgcacgaaccctcgcaacgtgatagattttacttgtaccgaatctctcgcaaataccggtttaatgatcaccataccctcaagaagctcgaattgatattcccgaccaagaagtcgcgacaacacttccattaaatccgttttttgaacttgtatggtcaccttgctgttcatatccaattctcgattgctaaaaaagaaatccaaatcagtttgcctttttaactcgtcaaaaacatgccttaacgtcatatctttcacgtccaagtttacaacttttacttggcctattgcagaagcatgtacttccaacaatcctatgactaaaaagaaaaatgttaatttcataactaaaaataattttgaccggggagctaaaaatagcccacgat

SEQ ID NO: 173 - DNA, 8274 bp, Butyricimonas faecihominis
gtttaaactagtttatccggtagtgatctagaagtaatcatgaaacattcattttatattcacacacaaggtattaacaaggatttattcaaggttaatcccccttgttaaatcacaaaaacacactaaaaaaaagaagagtgcctggcatcacagccaaacactctttatattctcacgtatgatcggtactatttcttctttgccgctttattcgggaaagcggggattgacggaatctccttcttctcggtctttaacttttccagaatcacttgaatcgctctatttaactgttgatcctcaccattatactctaaataaggatcgttttcaatatcaatgtgaggagtaactcccgttccctcgataataaactcgctgccatctgccgcgaacggcgcgtatgacggcgtcacgatggaaccgccatcaaccacccggatcgaaccgctatatccaacaacaccgccccacgtgcgacgacctataatcgttcccaaatgattatacttgaatcgatacgggaaaagatccccgtcagaggcggaatactcgtttaccagcaacaccttcggccccaagaacgtaccaaccggacttaccgacccggaagtttggttcgtgtgcatcgtgtagaaagtcggcgtacgcatcaaacgttcggtaatcatcggggacacgtttcccccgccatttcctcgatcgtcaatgatcaaggccttcttattcaactgcgggtaataatgtttcacgaactcgttcaaaccgtcaacacccatatccgggatatgaatatacccgacctctccgttcgtggcctcgtttaccttacgaatattattctgtacccaattataataatacaatttcgattcgtcagccaacggaacaaccaacacgttacgggcctccttctcggtcggggtcgtgttcacggtcaattcaaccgtcttaccagccatatcgatcaactcggagaacaggttatctacctctttcaacgatttcccgttaatggccagaatatagtcacccgctttcacctccacgcccggcatggtcaaaggcgagcgggtggaggcttcccagttggctccctcgatcacctcggtcactttaaaataaccggatttatctttcacgaatttagcacccagcaaccccatatcaattctctcgggcatcggaacccgcccgttaatcgagtaagcatgtccgacactcaattccgcgatcatctccccgataatataagtcaagtccgtacgatgattcacgtaaggcaccagcactttatatttctcgtacacgtgatcccagtccacgccgtgcatattcttggcatagaagaaatcacgcatctgccgccagctctcgttatagatctgcatccattcttgatggtagtcaatcacccgtttcacccctttcgtgggaacgggagaagtcacgttagcggaaagcaccggaaggtcctccacttggaacgcagaacccgaagaaacgatagcctttttgtaaccgggagaaaactctatgtccccacccgtgtcggtttctttcttcccgttcagatcataaatcagcgtgcggcctccccggttataatatacccggttccccagcatatgcacgttaccatagtaattcgatgccaacacgggcaattcgacaagacgactttccaaattcgtgaaatcatacacgacacctttgtcttcactctctttcttcttatccttttctttcacggttgtctccacccggacaacatcatttttaggggcgaacaataccggggcatctttcgccaaaggcagtatgtacaccttattcatatcattatacacgtgattccattccgtccgtccatacgtcggggagaatgtgcgggcagaaacaaacacaaggtatttcccgtcctcgctgaaattcggtgaactggaaccgaaccacccgtcggtaacttggtgtttctcgccactttcaacatgatacacgatgatgttatccatcgtcgtttccggacgaacgtaagtgacatatttgctatcgggagaccagttataggacgtcatggaacggatacccgatttttccacgatcttccggttcccgctttccacgtcagatatattcaacgtgtttcctttttcgctccagagaattttcttggaatccggggaccatttataattgaagatataacttttcagattcttgatcagtttccgttcctttcccgtcgccacgtcccggagataaatattgaattccccgtccttgtcggaaacgtaactgatgtatttcccgtccggtgaccaccccacctgcatatcgttagcatcggaagaattggttaagttataggtaataccctctttcacgggcaaagagaaaatatccccacgggcagccacaaccaccctctccccaccgggagcaaccgcgatactcgaaatctggccgcttacatcagtcaaggtcggacgagaataaacctgatcgttatcaatgtttatcgtgatcttggattccttaccactctgcaaatcgtacccgtaaatataccctccttgctcgtacacgattagcttgtcacctatcgcgggaaattttatatcgtattctttgtaagaagtcaattgtttatcctctttcgtgttcacgtcgtaggcgtaaagattcatgatgtcaccccggtcagatatataatatatagtattcccgtccggtgaccacatcgggaacacgtcctgccgcacgttgtcggtaatccgctcggatttcttcgtgttgaaatcaaacacccggatgtcatctgccataccaccttgataacgtttccacgcccggaattcccggaaaatataattgtaagctaatttctttccatccggagaataagaggcaaagccgccattctttaaaggtacttcctcggacatccctccctccaccgggaccgtgaacagttgcccggtaaaatcgttaaaagtatatctccgggaacgataaagaatccgtttactatccggggtccaaccgatcaccacgttgttcggccccatgcgatcccctagatcatcccgtttcagcgtggccgtgtaagtcaagcgacgaggttcgcccccctccacggggatgacaaatacttccgtgttaccatcatattgcccggtgaaggcgatatattttccatccggggaaatacgaggaaacatctcgtaccccacgtgcgaggtcaaccgacgggccgttcctcccccggccgaaaccaaataaagatccccggcatacgagaataccaacttgtcccccacgctatgcgggaaccttaataaccttgcctccccggcctgcacccacaaaccggctaacaacacgcctagtaaaagaataaacctcctcataacaaattagttcataaagtttataaagttcacaaggtctataaagtttacaaaaccgtaaagttcacaaagttgattcaggcataaaaacgaaccaatgacattgacgtcgcaaaatcgcaaatccacagaatctattcaccttatgaactttatggactttatgaactttataaacccttttctaataattccttgatcacacgaggaaaatgctcgtattccaaggcatggactttcgttgccagcatctctggtgtgtcgcccgggacgatttcacatttagcctgaaaaatagttgtcccctcgtcataatgattattcacgtaatgaatcgtgataccgctttctctttccccggcagcgatcaccgcctcgtgtactttcatgccgtacatacccttgcccccgtaagagggtaacagggccggatggatgttaattacccgattttcataggcctcaataatggcatccggcaccttccagagaaaacccgccaacacgatcagatcaatatccaatcgtttcaattcattcaaaaccaagtcagaatgagagaactcttcccgcccgaaaacaaatgtcggtacgtttaaacgtttcgcccgttccaaaacataggcatcgggtttgttacaaaacacgattttcacgacattttcggtgtcatttttaaaataattaatgatattttcagcgttagaacctgaaccagaggcaaatattgctatttttttcatcctgtaatctattaaaaatcaaacgcataaagataagaaaactttattcatgccaaaaaattttctaggaaaaataaattctctaactttgcccccgaacttagagagttatgcgcgtctcttgtagacgcaagtgtgaatttaaaaaatgtctaattaaaatttaaagttatgtctgacattcaaaacagagttaaagctatcattgttgataaattaggagttgacgaaagtgaagttaaacctgaagcaacgtttactaacgacttaggagctgactctttggatacggtagagttgatcatggaattggaaaaagaattcaacatcactattccggatgatcaagcagagaaaatcgctaccgtgggcgatgctattgcatacgttgaagctaacgctcaataatttaatattttatctatgaatttcaaacgagtagtaataactggtcttggaactattaatcccttgggtcataacgtggccgaattctgggagaacttgaaaggtggcgtcagtggcgccggtcctattactcgttttgatgcatctaaatttcgcacgcaattcgcttgcgaagttaaaaactacgagcccacggaatacttcgacaagaaggaggtccgtaaaatggatctttacagccagtttgccctaatttgttctagggaggccgtgaaagatgccggactcgatttctcgcaagaggacagaaagagaatcggtgtaatctggggtgcaggtatcggtggtttggatacgttctacgaagaatgcaaaacttttgcattaggagacggaactcccagattcaacccgttctttatacccaagatgattgccaacatgggtggagccatgatcgccatagaagaaggcctaaagggtccgaactacacgacggtttcagcctgtgcatcatccgcacactcgttagtagatgcattaaatctgatccgattaggaaaagcagacgtgatacttgccggtggatccgaagcagccatcacccccccgggtgtaggtggtttcaattccatgaaagctttatccactcgtaatgatgacccgaaaacagcctcgcgtcctttcgacgttgaccgtgacggattcgttatcggcgaaggcggtgcttgcctagtcgtggaagagtacgaacatgcagtaaaaagaggtgctcacatctacgcggaactcgcgggaggcggagccaattgcgatgcttaccacatgacagccccggacccggaaggagaaggtgcagccgatgttatgttactcgcgttggaagacgccggactaaccccgaaagatgttgattatatcaacgttcacggaacgtctaccggactcggagatgtggcagaacctaaggccattcagagagcatttggtgaacacgcttatgatctgaacatcagttccaccaaatcaatgacaggacatttattaggtgccgccggtgccttggaagcgatcgcttgtgttctggctgtgaaaaacaacattgtaccccctaccattaatttcagcaaccttgatccggaactggatcccaagctgaatttcacgttcaataaggctcaagagaaagaaatcaatgtagccatcagtaacactttcggtttcggaggacacaatgcttgcgttgtatttaaaaagtaatcactaactaaaattttggggaagtgattcgtaaaataattcaatccataaaactttaccttcacaggaaggaaaagttttatggattgtctatttcggaatggggatttgttcccggtaataagggtttatataccctagcattgttacataaatcggcgtccagatacacgaaaagcggaaccgtcttgaattacgagcgtctcgaattcttgggcgatgccgtgctgggagctattgtcgctgaaatcctgtacaaatttttccccaacaaggacgagggatttatgacccgcttacgctccaagatcgtgagccgcgaatcattgaatatcattgccatcaaaatggggttgagcgaggaagtaattgccaaatcggatatttccaaaaacaaacatatctacggtgatgtattcgaggctttcactggagccatctacttggatcaaggatacgacaaaaccaaagcgtttatcgagaattacatcttccctcactacgtgaacttggaagacctcgtgtacgttgacaaaaactacaagagtcgcttgattgaatgggcacaaaaacaaaagattgacctgaatatcgaaacgattgaaagtaatgcccgtcgctctaaattcgtctgcacaatctctatcggcgaggacatcatggcccaaggcataggtgcatcaaaaaaagaagcggagcaaaactccgctgaaaaagttattcaaaaactccaagtcaaggcccaaggagaaattgaaatctaatattattccatgattccacgattgccgattccgtgatttctttcagtgaatataatcacagaatcgccaatcataaatcactcaatctttttattctttcacacgttccacgtaagtaccgtcttccgttttgatacgaattttctcaccggtattgataaaaagaggaaccatcactcttgcaccggtttctacttctgccggtttcaacgccgtggaagaagcggtatcacctttcaatcccggctccgtgtaagttacttccaaaacaacggtcggcaacaactcaacatataacggggtttccgtgtcggcatgtacaaccatttcaacagcatcaccttctttcaagaactggggagcattgattaaatcttttgcaataggaatttgctcgaaagtttccgtgtgcatcatgatatagtcctctccttccatatacaggaattgatagggacgtctctcgatacgtactacatcaatcttcactcctgacgtaaaggtattttccaaggtacgaccggttttgatgttctgcatcttcgttctcacgaaagcgggacctttaccgggtttcacgtgttgaaactgtacaattctgtataaatcgtctttgaaaacgatacataatccatttctaaaatcagccgttgttgccatttattttattttttagatttaatatttttcattgagtgtgcaaagataaggaaatcagcacaaatcaccaaatgaggattttattttcttatacgatccgtctattatcacacaagtaagccgatttttaatccagcccaaataataaactaatcatccttctccgaatttccaagttgcaaataatcttttgcatttaatggagaaattatacttttacctgtctgaatttcaatttctttccgagtattacctgcgatttgacctccttgattcgcaatatgtcgattttcttcaaatgttttcggttcacgttctttcgatatttcggttgtcgtcgcttctgcaagcatatttagaatcaactccatattggtcatgttatctctaagattttctttttttaaaccctttaattgtttatattctcgagtagtcagtccagcccaagcttgcgttattatatctgtcaatgcagcaaattgcacaccttccttcactccccgacatttccattcatcagtaagctcctttcgcacttctatactttttagacgttggtttatccaattatccgaataacccaatcgtttatagtctaacaaggcttgctcgatcgacaactcaggatcctccagttgatccagacgttctttagctacttgtgccatccacaatttaaaaggttccgctttaggagaggggatcgactgaataattcgaaaaagggattccgtatctgcagcaagtgttttacgcctcttacccgtttcggtcatcatcattacctggggacaatttgtccccatgaacaatcccaattcagaatcacgttttcttacttttttcaagtaatcagtcggattagcactatctgtcaatacagaaacaatatctacaactgaaaaataccacttttcttggtcttcatcccaaactgtacgaatctttctttcttcaaatagctttattgcatccttttgtgtcatattattgcttttataaatacaaaagtaataatat

SEQ ID NO: 174 - DNA, 8223 bp, Butyricimonas faecihominis
atcttctcatgtattcaaatcattaattaaccgattaccgtaactttcatgttctcgttgttatcctcgtcataaatcgggggattcccggcatcaatatgcttttgtaaataatatttcaattgtaaagcataagccgtaaattcactcggggtacaggcactaaaatccgactcccctgttacttcaatcagcaattgatatttcttatccgagtattttccgagataggactttatcacgaccgaagtccaccaatccggctgagccgctatatcgctgatcaccaacttcgtttttcggaaagaagacacccccgggacaaaatcatcatttccctgaatttccaacaccagcttaaaagctttcgctttcagcacctcggaatttaccacatgcacgtatatcgtatcttttaccatcccggaacgaaacgtgtagctctcgctcaactggtaattcgccgcatcgatatccgtctcgtccttgactgcgaccagagtaaacgtccttgcttccctcaatggaattccggctaaagtaacttccaagggcacgtctaattccgattcacccggatggaagaaaaaagagacgatcgtactatccttcgtgaaatctttagtaaaagccaaataattttccccatcataagttttaaatcccttttcgttacaagagaataaaaacaacgctaaaactatccataataaattcttcatacatctcctttttaattaaaaactaaccagatcactatcaggaatcggcaacacgaatttcgcccccagttctatcgttttatcaccatctatcaccggatgattcaaacgtttgtaaagataaaacaactgcccctcggctatatattccctacgagcatcctgaataactcgttccagatactgggctttcgtaagctccctcggcaaacgggttttacatccccgtccgagacgagcctcgtccaaccagtcaatcgcctgtcctggatctttatcaaaaatagcctcacccgcgatataatacatctcgcttagccggatcaccgggatcaaaggattttgttgattgaacacctcttggttcgaactttctcgccatttgatagatatatccttactgtcgtatgattttataaccatataagctttccggtaatcatcgccatcccccgtgaaaagattagtcatatctttaatttccatgaaaccggcaatcccattataataggactcagcaatcttattttcctgattattgaacaaggaaaacatgatgtcacaatgagctttctgattccgatcatttacttgatccatagataactgactctcgggtgtgaaatcaaaatactcgcactccaatatctctctcgcctcttttagagctaactcctgcatattagcatactggtacacccgggccaaaagagccgttgtcgcgtaatagtccagatgagtacccctcgcgttaaaaaacgcccccggagaagaaggataactactacattccatccggaaccaataagcctgttccccaacaacataaggttctatcgtgtcaaacgttgccagcagatttttcccctttttcaaatcgtctatcaccagatcgagataatccgtaaccggtaatttcttaccaacaagagtcggatattccgtaacataaaccaaataaacctttttatcatcagtaacgggagccggggcaaacagacgtaacaactcgaactggcaaaaagcacgaatagaataagcctcgcccataatcatgttcctttccagttccttcaattcaaaaaggccgggattttccgtctctatccgttgtagcaaattattgcagttcgcaatcgtgttatacaatttccgccagatcccgtctataatcgacgaacacccgcttgttccatactcgtaagctcccgcatctttatatctctgcgatttcaagttatcatacacgtaattctgcgagagaacactcataaatccccaagtcagttcctgaccgtacaacgagttttcggacatctgctgatagagtccgttcaacgcaacccgatacccgtcacccgtcttgaaaagatcatcttcctgcgtcttattctgcggtgtaacagtcaaccagtcattacaggaactgaacaacactaccgccagaataaacaaatatatcttaccatacttcatagcactctattttaaattaaaaacttgcattcaacgatatattaaacgtccgggcatacggataagacaagccgcgttcctgtttcacggacgagaaacgaaccacatcccccatgttaaattgtaaccgcaacatgcttaatcctattggttttacaaaggccaggttaaaatcatatcctatcgataaagaattcaacgccaaaacgttataatcctgtataaaccgggatgtgggattcgtggtaatatcccgatcccgaatatccttcaaaggagatatatccccctctttttgccaacggtcagcagacacccgcttatccacgttataattatagacatcagcattctccacgtcattcaccaacgtataattatagcgttgtccaccgaactcgtacataaacgaacaatacaggaagaaattcttataggccacgttcagcccgaaagatccttgcgcatccggttccgtattgccaatcacgacagtctcggtgggatcccacgtgtaagtcgtcgtcccatcatttttcaggaaaagttcatccccggtcgccgggtctatacccaaagaacgcataccaaaaattgatgtcagggaacctcccggaacgtatttggtcaacgcctttgaataatcccggcctacttctttcgtcttataatactcgttcactttatcattgtaagcggccagcgattcagaaattttcaatatttcatttttattatgtgcgatattcgcgtacacggaaaccagcaagtcaccccgattcaagatcatcgttttcaacgacacctcgaccccctcattcctgacctctcccaaattatccttgtaagagctgaaaccggaagatgacgggattgccacgtccgtaaccagatccacggtcttcttattgtaatacgagaacctcatatccaaggcaccacggtatatttttaaatcgaaaccgagatcccaggtatttgttttttcccacttcagcctattatttcccaaggattgaataattgccccaaatcccgtggaataccaatccttcgtgtaagtcgtgtacatcgtctgtgcctcaaaaggagcgaaattaaccttacccgtctgcccgtaagtcgcccgaattttgaatatgtcaagattaggcagatgttcctttatatacttgtaattatggatgttcacaccgatcccactcgaccagaaaggagcaaattttttatcagtcccgaattctgacgacccgtcaaaacgacaagacaaatccagcagataaatgtcattatacgaatagttcaaaaaagacagggcgccaaacaatcgggatgcgctctcgtcgaacgtcggcttcgtcacaatctcgtaagcgtaagccggtttccacatctcggccgaaggaaatcccttgtataatgcagtctcgttggacgcggacttatccacggcattcaccccaagggtaaaattaatgctgtgtctatcgatcaatttattatacatcaccacggcattcaggttccattccacgctctccgcgttatatcttgaaagttcccctcttttcaagtccgttccctgcaaataatcgtatgtagatgatttcggatccgtgaatttatcactctttgaatcttttttcgttacactaaactctcctttcaactgtaatccatccatgatgtaccaattcacgctgatattatccagtagttcccggtaggacgacctgtcaaacgagcctagtgtcgcttcatacaaaggattctttaaatttgtattactcccgtcatgccaaagttttgtttctttcaaataattccccatttcatccttatactcgtcgtaaggctgtttctccgtataatcccggaaggttccgtaaggcgactctttagacttcgtgacgttataagaaatgtaattttttatctgtaaccttttaaaacggtagtccaacgagaaacccgcccccatccgatcccggaaagagcctttcatcaccccgtcctgattatcatacttcaagtcaaccccaaaacgcaagttatcagaaccaccttccacgtacacgctatgtttatgattgaaaatcgtacgtaggggcttagataaccaatacgtgtcaacgcctctctgcacgttatacattttcaaattatactcctgctgtttcttcaatagttcccccggtccctccgcatcataacaaccggctaaaaattcggcattcaatttctctgccgcattcatcaagttataatccgacaagtccggagctgtcaatgccccgtcaaaattataagaaacacgtaattttcccggttgcggggccagcgtcgtcacgacaaccacgccgttagcaccccgagagccgtacatagctgtcgctgccgcatctttcaatatctccaccgatgccacccgactcatatcaaagtcatatattttctctactgatacctcgaaaccatccatgataaacagggggagattaggattcccctgtaaagacgattttgacaagttatcccgatccaaatcttttaccccgataccagaacgtccccggatataaaactccggtagagcattcggatccgatccccattccgaattctcctgaatccgcaaagaagggtcgaaattctgcaacgccacgatcaggttacgagatgccaccttcttcaattcatcctgcatcacccttaccgtattccccgtgaaactggatttccggatattagcatatcccgttacaaccacgtcctccatctgaacatcctcatcctccagttgtacattatacacggtttcatccggtaaaatcttcacctctttcgttttcatcccgatgaacgacacgagtagaatcatatccttggagtgcggaacgttaagaacataatttccgtcaacatccgctgccactccgatcgtggaacctttcagcgtgatcgttgcaccgatcaatggctctcccttattcgaggtgactttaccggttattttcattaaattggcagtcggagcccctttcaaaagagtaatgacaatcatcccgtcaacatatttaaatccaagttttgtacccctaaaacagtgatccaagacctcctttaaagacacttgttccatcttgaatgtctggggttttacttgtttcacctcatcttgattgtacaaaaactcgacacccgttttctgggtcagatccttcaaaacatccctcatggtcgcattttgataatccacgtttattctcttctgaagatagtcttgcgcctgtcccgagagaggacaaaccagaagtaaaagaattaccggaaaccatccgatcacatacttcgatttctttttcatcattccttatttttattcatttcacaaacgatcggacaaaggcctcctcctaacgccacccgaaggaaagcgccaataaaaaccgatcagattgtttttccaattaattcacgtatatttgaagtgctatacttcatcacctagtgatgaacatttggttgaaccggagttgcctctccggttttttaattactctcgatcttattgttttcctttcataatcagtattgtattttggttaatagtaaaatgcacattcgtggtcatttccagtagttcaaaagcttttgtaatatcatcatatttaagtaactgacctgaaaaacgagttccttccaaagaagggtctgtaaattcataatctaaatcataccaacgagccagtttacggacaatcacattcaacggctcatcatcaaacataaacttattctcaatccacgacgtgtaataacgagcatccacctcccgcacatcaaagcaatccgatcccaattgtacctgctggttcgggtgaataatcacgcaatgctcccctttatttacctgcaacttacccgttgcaagcgtaacccgggcatattgttcatccatgtaattcgtaacattaaacgaggttcctaacacgctcacactaaaatccccactttttacctcgaagggcatcttttcattcggactaacttggaaaaatgcctccccgtgtaactccaccaccctccggtctcctgtaaaacaaaccggataacgcagagatgaaccggcatttaaccacacgacagaaccatcggaaagcgtcaatcgatattcgcctccacgcccgacggccagcgtgtggtgttcaacttctgacatctgccgtaaaacagtatcgtaaatcaacgtgttgttttccgcacggacaccattttcaacgaaacaaacatcctgattcacgttcaacggtatcgaatctttcccgtcatcaacaatcaaggaaatcagcaccgattcatgcacgttaacggacaaataaaccggtggcctaattttcccctctcttccccaaaagaatgtcacgcaaaagataataacagccacggccgcaactgaaccaatccacgtccaacgggttttgcgcacattgcggttcatatccccttccatccgtccccaagcttgttccggatcggctatttctaaataatgtcgatgatcctctttcataaaatcccgagacctcatccgatcataccattcccgacgggttgcatctgttttcaaccaatcttccagttcctcccgatcttccatggtcaattcttcaaaaatctctttttgaagtaaacgagtcatcctctgtattactttttcttcatcgtgcatactatatccgttatcttacatcaaagactaacgaactttgcaaatgagttactctaaaagtcaaaaaaatattatttaacatttacacgaaagaataccaacaggtagaaaagagacatatcttttaaagaggattgtaattgcttgcgggctttcacacgttgcgaccgtactgtttcctctgcaatacccaatcgttctgctacttccgaaatcttcagtccatcaatatagctcaatttaaatatctcccgtctatgttccggcaaacgatctatggcctgcatgatttctacaaatacttccgtctcgattcgattctgaagataattattctcgtccatctcgttcccttcctcgtgatcctccaaacgggtggtaaacttctgacgtcggatataagttatggattgattatagacagcccggtatagataaaccttcagatgacttttatcaataaagctcattttacgttcccaaatggcaagaaacacgttatgaaccatatcttcagcatcttcctcacatgacaaaatcttccgagcaaaaagacataacggtttataaaacgccataaatacctctttgtacacgctctttgttaagacaaactctttttttacatcctctgtcatgataacaccttcacttcatgttgacaaatatacatgaataaaaattagagaacaaagaatgcacgaagtaattaattctcaaaatataggacctcgtttaaatttcgcaaggtagttattcactaacaagtgctttattatacccatggtacgctgttacactattgtttggtataggtttctccgtgctttctccgtgtcacttgcgagtaatgaccggaggaaatacatttgaatgcggcacgaatcgagacggaaacatataggaacaccgaagggacatcgaaggaatattggcatgacctagaggtaatcaagcaacgacaagattttgttcaacaaaatttaaacaggctcataaaaaaacttaacacttttcacatctccccaaaaacaaaatacgctattctccttttacgccacgaaatacaatttattgattctcagaattcccgtctattaccatattttttttagcaaatcaacctgttttttccccttttttattttgcaggattcaacaaaactcctatatttgcatcgcttttgagaaaattccttagtagctcagttggttagagcggcggactgttaatccgtaggtcgtaggttcaagtcctacctgaggagccaagaagctgaaagccagtagaaa

SEQ ID NO: 175 - DNA, 8217 bp, Butyricimonas faecihominis
atttattattaatcttaggaatatatggaaagtatggaaggtagtttgtatttgattgtcgccatcgtggcggtgttgtttgttacgtttgcggcgatattgtcccgttataaacgttgtccgtcagacaagattcttgtcgtgtacgggcggaccggtaagaatgcgaccggaggagtgagttccgcacgttgtattcatggaggggcggcttttatctggccggtgttccagagtttttcatttctggacttgactccgatctctatcgagtgtaatttgacgaatgctttaagtaaacagaatatacgagtagatgtgccttgtcgttttacggtgggtatttctaccgaaccggatagcatgacgaatgcggcagagcgtttgttggggcaacggcaggaaaatattcaggatttggccaaggatattcttttcgggcagttacgtttggtgattgccacgatggatattgaggaaatcaattccgaccgggataaattcttggctaacgtgagtgctaacgtggaggccgagttacggaagatcggtttgaaactgatcaacgtgaacgtgaccgacttgcgggatgagtccgggtatatcgaggctttgggaaaagaagcagcagcgaaagcgatcaatgatgccaagaaaagcgtggccgagcagaatcgattcggagagatcggtaaagccgaggcagatcgggataaagatattcgtatcgcggaaaccgtgcgggacactcgtattcggacggccgaggctaatgcaaccgcggtggagggagaaaacaatgccaagattttaattgccgattcggatgccatccgtcgggagagagaggccgaggctgcccgtaaagctatcgcggcagagaaagtgcaggctgcaaaggctttggaagaggcttatatggcagagcgggaggctgagattgctcgtgccgaaagagagaaagctacacaagcggctaatatcgtggttcccgcacagattgacaaggagaaagcgattattgatgcggaggccgaggcggaacgtttgcgccggttggcgaaaggagaggctgatgccatttttgccaagatggatgccgaagcacgaggtttatacgaggtgctgacaaaacaggcggaaggatatgcccaaatcgtgaaagccgccgccggagatcccgacaaggcggtgatgatgttgattaccgataagttgccggagctggtgagaacgcaagtggaggctgttaagaatatcaagatcgacaaggttaccgtttgggatggcaataatgccgggaacgggaatacctccacggctaacttcatctcggggatgatgaaatcggttcccccgttgaatgatctgtttaacatggctgggctgaatctaccgactttcctgaaaggtgccgccacggaagagaaagctacggatgccggacaacaagatgagatcgttgaagaagttgagaagtaggggagattctaacttttagtttcgttttttcgtttactaataattacctttgtggtatacttcaatcgggtatatgacaaaggtaattaatcaattcataaaatagaggaaagtttatgcgctggataattgacggtgttgatgatttgaatcgggtagcaaaagagtttctggaaagtaccggaggcaacacgatatatgccctgtacgggccgatgggagtgggaaagaccactttcgtgaaagcggtagccgggtgtttggggatagaggatgatgtgaattccccgacgttcgctatcgtaaacgagtatctgacggccacgggagactcggtttttcatttcgatttctatcgggtgaagaatattgaggaggccatggacttcggttacgaggaatatttttatagcgggaatcgttgttttatagagtggccggagatggtggagcctctgttaccgaaaaacacgttgatatgcaagttctctgaactggcagatggtcggagagaattggtgattgaagaaaaactttaaagtgtaggttatggataactcgggtaaattattgggagcccaaattaatcgggagtggtttctataccaggaaaaagaggtattcggggaataccggcagaaacgattgacaatcggtttaccgaacgagaccgagcgacgggaaaaccgggtgtgtttaaccccggaggccgtggccatgatggttgatatggggcatacgataatgatacaacgaggagccggggaggcggcacattaccatgaccgggagtacgccgatgcgggagcccagatgttggatacctgcgaggaagtgtacacggcggatattatactgaaaccgactccggtgatgcaggcagacgtggaaatgatgcatgatcggcaggtcatactgtcaccgatcgagcttttcgagttacgaaaagaggctgtcgtggagatgatgcagaagaaggtgacggctgtcgggttcgatattctgaaagacgagaacggggtttatcccgtggtgcagatgatgagtgagatttctggaagctcggcaatcatgattgccagcgagtacttgagcaattctcgggaagggaaaggtattttgctgggaggggtgacgggaatcactccagccgaggtggttattttgggggccgggactttgggggaatatgcggctcgtacggcgttggctttgggggctgaggtgaaagtgttcgatcattcgctggagcgtctacgccggataaatcattgtctgggacaacgggtatatacttctgtttttcataagccggttttggaacgggcgttgttgtctgccgacgtgctgatcggggctttgcgtttcttcgatgatgatttcgggattaccgtgtccgaagaacaggtaaggttgatgaaacagggagcggtgattgtggatatgtccattgaacatggtggatgtattgaaacatcaggaccaacgactcatgagaacccgacgtatgtatataatggggtaatccactattgtgtcccgaatgtcccgtcgagagtggctcgtacggcatctatcgcttatagtaatttattcactcctttatttgataagatttcccgggcgggtggctttaatactgccataaaaaatgatgcgggattacggcatggcgtgtatgtttataacggtgtgttgacgaaacgggtgattgccgatcgctatggattagtttctagagatattgatttattgatggctgctttctgatcacccgagaaagacaataattcccagtagtattccgtacacgagagcgtatgggaaagcccgttttaagattcccccttcttggccctgtaattgacatgcggaggcggcaatagcaatactctggggtgagataattttcccggcagtagtgcctgtggtgttggcggcggcaagccaagaaggatcaatgtccatgtttgtggcgattcctgcttgcaatttcccgaaaagaatgtttgccgaagtaccgctacccgtgataaatgttcctatttccccgatcaaaggggaccagaaagcgtaatacttcccggagatggaagtgagtgtgtcggccagtaattgcaccatgccggatatttccatgagtgcggatatactgaccaaggcgataaccataataatagtactgcggatttgtacgagagtctggcctagtaatgtgaattgtctgcttgtcgttacaccctgtatctgtcccccgataaaagctccggcaaaaagcaataaactcgttaccttgaaattgaagggaatagccagtaatataaagaaaatgataaggccgtagacactccacgcttggtatatttgccggggcgagtgtttcgtgggaattgtgtcactttttttggtccatttactccatgcgataataataatgatggaacaaatactgcttagaatggctggcatctccggaccgagatatacggccgtggcgtattgtgctaggaaggatacgcccccgacaagcgtgccgagcaagatgttcttgagtaaagcttggcggcgtctgtcggccaatatagccaaagttatcgggatcaaaaatataaaaggatataattgttgaatggtagccttacacaattcaggtaacgggcagccggtctcttccatgagaacggtttctgcgataccgacggccccgaatgtcgtgggttcactgttagcgatgaggcttgcgagtacggcgaacaacggacgaaatcccagcgttacgagtatggctgccgggatggcaaccgaagtcccgtagccgggcattccttccagtagccccccgaatccccacgtgatcagtaatacctgtacactcctgtccgtggaaatcgttgccagttggtcttttaacactttaatcttgccggaatccagcagaatattatagctaaatacagccatccagataacggaaagaatagtgatacaagcacgtgcggtactgtttattaaagtgaaaccgatctcttgcgcgggtataccaaaggcgaaaatggccaacataacggtaataacaagggtaagcaggctactcttatctccgggccacttgcatatccccatggatatgaccagtataaccattggcagtaaggcaaacaagatttcgaacatgacgtatcgttaaccttcttattgcttgagaatggagtctataaccggggttaagtcactgtttttaggtattttaataccccggattccggcagcctccgccgcctcgatgtcccgtgaaccatccccgattaaccacgaggctgatttgtcgatgtcaaactcccggatagcctgttcgatcatgtaaggcgatggtttgcggcatttacagggggcaatgctgctgtgatgagggcagtagtatattttatccacgtgcgccccatgcttttccaattccttgcacatatgagcgtgaaggttgtccacgtcttcgatcgagtactcccctttagcgaccccgccttgattggtaactatgataatcaaataacccgcctcgttcagtcgacgaattccgtcgattacaccgggattgaaaacgaagtcttcaactttatatatgtaataatgaccttcatcagaattaatggttccgtcccgatccagaaatatagccttgttcattttagattttatctttccaacttgtaacttgtcaacctgtaacctgaaattcaccacgggcaaatttcaatgcattatcttaaatattagctccttcaaaagctcaccgtcagaaatgtttgcgttaccgacaccttttgatttgaggtcatactcccgtaaccaagagatgatgttagcacatttcatggcgttatatcgtttcgctccttccgtgtaatctttcagaaaatagggattgatacccagtaaccgggccatttcttgctggtttggggtacttttcttctggtagtggtacgtcagtaggttcagaaagtaccggaacaacatgctgatcgtgagaaccagcgggttgttcttggggttagcctcgaaataattcacgatacggtttgctttcaggtgatccatctgtatgatggctgccgtgagttcgaacgtgttgaattccttgctgatccccgtgtgttcttccaccagattctccttgatttcaccgccaccgggaagtaggagcatgagcttgtccagttcgttggccaccttgctcaaatcgttccccagactttctgcgagaatacccgcggctttcagtgaaatcatgtacttcttgtctttgcagtacgaaataatccagtccgggatcttgttgtcgtaaagtttggccgactcgaaatagatgcaatgcgaagaactgcttaattttttgaaaactcctttacgtttatccggtttcttgtttttatagagaaacacgaggatcgttgtcggttgaagatgatcaatataaggcagtaaattctcgaaatcccggatattctgggcctccttgacaatgacaacttgacgttgtgacatcatgggaaagcggcgggccgtatcggtcacggtggtcatggagacatcgttcccgtacaatatcgtttggttaaacgccttctcgtcctccgtgagggcgtttttctcgatgcgtgtcgctatatcgtccaaaaaataggactcttcccccgatagaaagtaaatcggggcatatttccctgcttttaaatctgcaactatctcttcgtatttcataaggcaaaagtaataaactttaaattccgatcatatcaaagagtggtaattttagtgccaagaacaggatttatcgccgggtgatgtgagaagggcctcccttttcgatcgagcgcacgatctgctcgatttcgcggtcccgcccgttcggttcgtaatcggctttcaggttattcccgaacaacagagccagcgattgccaaaaataggcattcaccgtacccttgtactccttgatgtgattgaaggacgtgttgtttgtttcccggtagatcaagcgaacgagaatcttcccttgcgtgacggtcagtttcatcaacggttgcttgaacgtgtgcatgagttccttgtactctttcttgataatctgttttcgttttgcctcggaatccgtttgcgctagtttattttcaatctcgttgatcttggcggcggctattttcgcgtacgggaacacctttctcacgttataaaccatcctttggttccgttgttgctggcgggcgtatttccgtggattcttcaatcgggcgacgacatctacttcatggagaagaacatggggtacggtatccctgcccataatcacggacgggacaacactctgcgctgttgcaaagctgttaataaataaagataggagtgatatgataaatattttgcacatttttatatctttgcattaacgctttatcaatacaaagttagtagatatatttgacttgtaaaaatattaattagtggaaaaggaatttcaggatctgtttcagatacgtcacaatgatgaccgtgttgaggtgggaaaggtgttgattgcagaaccttttctggaaggtaaatattttaaccgttccgtggtctacatggtggaacatgattcgagcgggagcgtgggttttgtattgaataagccgttaccttacacgacttccgagttggtaaaagaactcgaaggcgtacatttccccgtgtacattggtggtcccgtggagcgtaatcagttgtattacatccatcggagaaatgacataccggactcggaagagatcgcgaaaggtatatattggggaggtgattttaaggctttgacggagatgttgaaagccggaaaggtattggaaggagagattcgtttctttgcagggtatagtggctggacagatagccagttggagaatgaattgaaggagaattcttggatggtggggacaattcctaccgacacgctgtttaccatcccgaacgagggattatgggaacaagccatgagttctctggggggaagatacaagctgtgggcgaatttcccggaagacccgattcttaattaattgagaattgagaattgacaattgaaaatgaagaagatttgatgagtttggagattagaggggactacccctaccggctccccctgtgtaagggggagttagagggagtagttaaagcataggccttgtgcggttggaatctaaaatctaaaatcattaaatctaaaatataaaggcaggccgttctatcgctgtcccgcgagggagagaggaaagtccgggcaacgcagggcatcgtgcttcttaacgggaaggtctccgagagggggcagtagtgtaacagaaaataaccgttccgttcgcggaataagggtgaaaaggtgaggtaagagcccaccggtatcccgggtgatcggggtagccgtacacctcacgagttgcaagaccatgtacactggcgcttaggtttgcccgaccgatgtcagggggtaggtcgctagagctgcggagtgatctgcggagtagataaatgatagaaaccgcaaggtacagaacccggcttacaggcctgcctttttttattgaaaaccgattaattcgcaatttatgaactacgatttatgattcaggaaaacattagtataatcacttgatctaaaatcataaatcagtaaattaataaaatctataacaataactagga

SEQ ID NO: 176 - DNA, 8184 bp, Butyricimonas faecihominis
aagtaattcttcatttttttcataattcattaatttaaagtttatacttcaaaacgttagatatatttgtttataaaaaatctcccgccaacggattaatcttttcgatatccacacccatcgctttcagtgagctagccacatactgcatcttggttttcatcaactcgtacaccattaccatatcatgtatctcctgatccatcttcaccaagttctccacgaaattgattaaatcatccaactccaagggataactatactcctctacatccgtgatcggaaagaatcctaactttaagtaatcctctggcggtaactgctcgtttttctctcgctccacctctgtaccgtagagcgtttcgcacagatcgaagaacaaattctccacgaacaccaagcgacgcacattcaccacgtagcccgccagaaagatataatgcaactcctgcacgtactcctccatccgctccccagacatcgccgccaagttagctcgatccaagccagcaatcgtaaaactattcatattggctaccgcatcatgataaccggtatcgcccccatccggcagggaaattcctaactggctcgccttaatcttgctacatatcaacaactttcgcggcaaataattcaccttcaccgaatccccgtagcacgccatgaatttgtccatcaagaactccaccgccccgtcgacatcctctttttccagataagtcaactcagcgctccgccaacttgccgcctgatcaaactggtaagcgaaatccaacaactggtcaaactgatataaaatataggtaccgtatttctccttgaaatccgtaattgtcttgtttgacttgtcgatcaacccttccaagcgatccgtgtcctccagagaaggggtcgtatcctcatcttcactacaagaacagaaacaacacacccctaatagcgcatataaaaataacttccttattaccatagcatttctctattaataatcttccttaatcggtaatttctccactctctcgttctgttctatcacattgttcacgtccaactcgtcctgagggataggataaacataattcgggtcattaggcgacaacatgtaaagttccgtacccatgattgcaccagaattgttcacctccgtgaacttatgatcaatctgtttagcaaacaatttggtccgtttcaaatcataccagcgttgcccctcgaaacagaactcccgacgccgctcgttaaagataaaacgtttcaactccacaccgctctccgcaatgtcgcccactttcgtgatatcctccacacgattctccaccaccttcttcacgtcggcatacgcctcggcatccatatttttgaacgcatatgcctcagcccgattcaaataagcttctgacacccgataagtgaatgcccccatatccgtgaatgcattcaaccacttcgttggcacacttgtaccatccaccaccttcacgtacttgtcagcacgcaaatctccaaccagaaatgttcccaataaatcagcagaaaccccgtaagtcaccgatccggtcgacgattcgtaaatactcggaatggaggtctctccaccatctccacacaacgatgatttatccccgtaagtatgcagaatttccgggtttgtcgtgttaacgaacgttccttcccgatgctctttcaaatcccacaattttccccccttagcgtcaatcactcgtgttgcataatcaatacaattatcccaatccgacttatacaaatacatacgtgatagtagcaacatagcagtctcggcattcggatgccacaaagatttctctaacccactgttcgtaaaatgacgaatagattctttcaaatccgcctcgatcaaatcatagattaccgccacagaagaacgcgtgtaagtttcctccacaccggtacccaagtgacgaggcactcccggttccgtggttgccgtttccgcatcatagtgtttcgcatacaagttcaccaattcaaaataactacgggctcgcacgaaataagcctctcccctcacaaaatccttttcattctcttcgccaatagaatcgtcaatattctccattacgtaattacagatcaagatcagccgataggccaactcccaagaagcattcacgtcagcattgtctccattcgcatcaaattccagatcccgctgccaagtgtatagatttttgtaaatgttcttatctttagatgaagttctagccctctcctcaatatcatccgtcataaactccgtcagataattcattttattcgtgatgaaagcctcccgatgcataatctgcaaaaaatgatcaacagtacgcggtatcaccttatccttgtcctcctccttcaaaaagtcgctacaagaagtgaccagagcaaaacaaagcaatataaacaaagatacttttttcataattatctaaacattagaaattcacgttcaaactcaaattatacgtaggcaaagtcggcatacctatcgattgtacctgatccggatcttgtccctttagtttcttgtcaaacacaatcaccccgatattttgaaccgagaaatccacacggacacctccgacccccaaattcttcagccaattgccgcccaatgtataccccaaagaaatagaacgaatacggatattatcagctttagctatgcgcaaatccgaataatcgtacatataccatccagtgtaagttgatggtcccacaatgttgcggaaagccacgtcaaccatcgtgtatttatacgcctcactctcgcttgggattacatcaccctccggtacagccaactcctcattggacaatcctggaattgttgtgtaagcctcatcacctggctgacgccaacggtttaccatagcttttgtcatattatcatccggtgcgggcaatgcattcttatcatcctggtaaagtctcaacatccgtactttgtaaccaaacttgtaagaaaactcggcgcgcaaagaaagttttttatacataaactccgtagagaaactaccgtacgctgtcggtgtacgagtccccgaataagtgaagatcgtactcaagaattcctcatttgtcatattcgatgaatttccagtcagattcttgaaatgcggcaatccatgctcgtccaaacgatcgaactggtaagagtaaaaaccatccacagaagcaccttccttgattactgaaccattgacataattcgtataagtattcacggtaccctctactgtcttggcccctctagtcaccttatttttcgtgtgagagaaagaaaatgaagttctccacttgaaatctttcgtttcgatatttttagttgaaatattaaaatcgaaaccactattcgtagctttcccgtcgttcaccttcaaagaagaaataccatttactaacgacacgggacgttccgtgatcaaatccaccgatttactataatagtattccaatgcaccactgatacgtccactaaaaaaagtccaatccaatccaacattcatagtagaggttttctcccatttcaaattcgcattcggaaaagattgcacaagcgccccttgctcgccggaaatcgtttgtttccttgggcgatcaataatcatgtatggactctcgctcggtacgttaccccggtaaccgtaagacattctcaatgccagactctcgatccaaccgctattcataaaagcctcatcactcaagttccagcgcccggaaacagaccacacaggattaaacttctcattcttatactgaccgaaacggttggaaccgtcattacgaatattgaaattcaaggagtaaagattctgataagagtaggtaaacgttccgtaaaacgacagagagttctcccgtctgtctgtcattacaggaaataccccatcactagaactcaagaaccacttcctgattgctaccgggtactcataaacatcacctgggctgatcatcggaaacattgtaaacgtttttccctcctctggcatatatcccgggaaaacactaccttgtgcccccttgtaaatcgtagatttagcctcttgtcccaagtctatgttaaagttatgcttttcgttcagcgtaaaattatagttgatttggttccgtaccgtccaatcatactggttcatcattccattggaataaattcccccatcaagaatacccttcatggaaatatctcccgaaggtttatccccgtaatcccaacctcgtaaatcagcaatatagaaactttgctcgcccatccaactctcggtcaagttcgttgtcgtcgtcaatccgactgtacccatataacgcaagtttggcaacaattcccaattcaaggctgctgttaagttcaaactcttgtttacaatattttgtcctccatttgcaaactcattcatgatgttatatctagcgaacactttcgtttgcgtgatgtgttcatcgttcacctctttgtccacgtaatacaatgatccatcagcattccttgccggaatcgtacggttcgtgtaatacgcttcgtcgaaagccgagtaatattccggattataatcggcatcctgcaaagaaccactcaaacgcacgtcgagcaaaatattttctctcaaacgagaagaaagattcatacgtgccgtcaaacgggacaaattaacacctttttctgctcctttattgttcgtgtaactaaaagaaaaataataacgtgttgtctcgttacctccagaaagactcaagttatgtgattgactgaaagaattacggtacaactccttgaaccaatctgtattttggctctccatccgagacactcccgcttgaaattccgcaaaagaaatcttcttatcccaataatccatcatcaacccctcgtatcccattcgttgaggtgtattctcaaagtacaagcctcgattcataatctcccgcgaaacatcaatacgctctttggaattcatcaactcgaaatcatcatatgttggacgttgagtcacagaggcattaaaataatagttaagtgaagtagatcccaccttacctgtttttgtcgttaccacaattactccattagccgcacgcgtaccgtaaatagccgttgcagaagcgtccttcaacacgtcaatacgctcgatatcctgtggattcaatcccgtgatcgcattaccaattagattcacattatcccaactattaatttcatcggcagtcaacggcaccggattctcgtaaatcaccccgtcaattacccatagaggctcacgtgttccggtaaaggtacttgttccgcgcaaacgcatcttcgcagcagcaccaggtgtagtacttaacgtcatcgctaataaaccgggaactttaccttctaacatctggtccacggtcaacgcccctttgaacgttaaatcctcctcgcccaacgaagatatagaactcgtcaactttctcttatcaatagtttggtaacctgttactacaacttctttaatattcacacaatcatcatctaacaacacatccatcgttttctgcccattccacacgatctcttttgtttccatcccgataaaggaaaacgtcaatatttgtttcttcttctccaataaaatccgaaactttccattcacatcagttgccaccccgattgtcgtacccttgatcaccactgacactccgggaagcggttctccctgacaatctttcactatcccactcacttccaattgcttagacagagaatcttgcacttgtaccagagtttttatcggaagaggcttgatcactaccatatccgaaagcaattcataagaatagggtaatcctcgtagcacctcatccatggtctgcactaacgtgaaatcatgtatatccacgctcacacgatgtgtccggtcaatttcttcctcgttaaaaacgaaaagataacccgtctgctgttttaaagatcgaaatacctctcgcaaaggcgtattctcacatttcagattcacggtttgagaatttactgtcccaaacacattcattgttaaaaaaaatgttaaaaaaaccgttaacctcatcatcaaaaaataattaccatcccgcttttgtctcaaaagacagcggaacatacgttttttttccataattttgcctaatcaattttacgttattccacatcaacttatcgtttatggagagaatacaacggtgggaaatgctggtaccatttcccactttttgttcctccccttgttctatatttcatttttaagggacttcacaaacacctgtcgtcccgaaactttaaaaactacgtttgttgttttctccaaaatatctaatgattgattcaaaggaacatacttctttatacctcccgtaaaacatcgctcggcacaactttcatcttcaaactgaaaagaaacaccataccatcgcgacaattgccgagaaattgccagcaacgacatattctcaaactcaaaaacaccctttacccatgaggtaaaaagtgacacatctacattcttcacctctataaatctcactcctttcgcacaaatagcctgctctcccggtttcaaatacaccttagatattttatcattaacctccacttttccttctgccaatgttgttatcgtacgttccccaggataagcagataaattaaattccgtacccaaaacccgcacatgccccccctctgtatgaactataaaagggtgaaacgaatccttacacacagaaaagaaagcttccccttccacgtccacctctctatttttcccggtaaaacgagtaggataacgcaacttcgttgccgaattaagccacactttcgtgccgtccgtcaataccatatcacattctcctcccacaggcacctccaccgtgtgcaaaacactctttccctccgtattacttgcctcgtagattaatcggttcatcgtgtctttatgaatctttgtcccgtctttctccactaatccaattgttttgcttttattcaatgatacactctttccatctgccatacgcaatattaccgtagcctttcccggtatttctgaaaacacttgttcggaaacattctcccgttccggtaacaacaaaacacctccccctacaattcccgcaagcaaaatagaagctgcaacgacccacctcgtccataccaaacgtttccttctacccaattttctctccaaacttctccacgaactctcctcatccatccaactttgaaaaccgatttcacgtccctctttgtaaaaacgaagtgtttcctcaaacatgacccgattttgaggagatgtttcgatccagactttcaattgctcaaaatcctctcgtcctatcacccctaaactataatccgctatccatctatatataatttcatccataatcaatattgttttaccatatattgcagttttaatcgatatgggtgaaaaaagaaaagaaaaaaattactttttgatgataaaaaatagtaacgcaatgatatccaaatgctcccgtaactgtttcaaagcacgtgaatagtgcgtttttactgtattaacagatacattcaacttctccgccacctctttataagacaaatttttcaatactatcgcaataaaaacctctcgacatttttccgacaacccctctatttcccggaataatttctctttacgtaatgctatattctcttcactctccggtatctcttccattaattgattaagatgcgtctcaagtccctcaaagaccattcgatcagaacttcgcaaatgataaagagccgctttgctcaccgctccaaaaagaaacgatctcaatgaaccagagaactcacatcctttctttttttcccaaaaatccacaaaaacctcttgcacaacatcctcagcatcttcgaacgaattcaaaaaacgtaaagcatatacacataatgcccgataatagtcatcaaacagcattttaacgcacactacgttctctttcttcaagaggtcaattatatctttttcttcatatttcatttgccgttccttgaaataatacccgcaaatataaaaaaaacggtattacaaaaaaaactaaatttttctatgaagtgatttaaacttataatgaatttatttaatttttaaccttgtccatttttagtggacagtagtgacc

SEQ ID NO: 177 - DNA, 8170 bp, Butyricimonas faecihominis
atataatattataaaagtaagcgaatgaaaaatagaatggttctaatgttaacactggcggcgatcgtttttgtcggttgtgtgaatgagaaggaagataagtcgccggtagatggcggagtggctgacgtggcttacatttctcttcaagttaaaacagaaaaaaacgaggctcgctcctcgggtgaaaacgcgggtatgaatgaaagtgatttgaagactctctacttgataactttcgacgaaacggaaaaagtggtcggtatacccaagacgacagagtattataccaagatcgagaatgccgcttcgaaaccggatgccatcaaaatctcggcggcctctgaaaagctactggtgatagccaatccgggagataaactgttggatgtgattgaaaatatcaatgatcgaaccaccttctccacgataaatgcggcagtgaaagaggttaccatggcggagattacagataaggtggacgctatcgccaaggggttcacgatgatcaacagcgggaatgagagtgggaaacaagctggggataaaattaccgatccgttgattagtcttgtcggtaaaattcaagtggtgtcgaaggacctgaaagaagagaatgctattgaagaggccgagaaagagggtaaccgggtcgacgtgaaaattgaacgtctggcctctaaagtggagttgaaacttaaaggggataataatgataacgtcgttgttgaacctaccggggcgaccttcacgtttaaaaactggacacttgacgtggtgaacagtacgttctatccttttgccgagaaaaccctacttaccgtgattcattcgtccgggggaagttacgtcagtaatttttataccaaggacccgaatttcacggatgccacggggatcgtgaatgcctcggtcaaccagacgacgtatgaaccggaactggttgccccttactcttggatggcggctgcaaacggaatttattgcatcgagaacacgatgaatgacaatgcccagatattcgagaatgccacccgtgtcgtgatcaaagggatatattatcctgaaaatcatgtcgggacaggagattggtttagttttgctggtaaaacgtatgctaattttgatgacctgaaagcggcgtacaatgccagtgacgcggggcctaacctgaaggccgcctgcgaggccatgtactctagcatacgatcttatgcggataagcatagtgatgtgaatcttagcgggacatcgtttaaaaccttggaaacatccgatttggcgcaggttaagaatggaggggaagtccttaaaaatgggaaaaccccggttatccagtggtatcaagaaggcctctgttactattattacgagattcgtcatgataatgatactgatgaacacatggctttcgggaaatatggtgtcgtgcgaaataactggtataagttgaccttgggtttagtgaaaggtcccggtacaccttggttcccggatattgataatcccggtcccggcgatcccgatccggatgatcctatcgatacttctaccgggtatttgggaatcaccgtggaggtcgcaccgtggattatctgggaaaacgagatcgatatttagtgattgagaaactggattataaaatttcaacgtatgaacacgggaaggttatatcgggattggagccaaaggataggaagcgtgctggcgtgcttgtttctgtggtcatgcgacgtgatgaaggaagatacggacaactgtggcgtgtacttggaatttatctataattataatatggaatatgtcgactcgttcgatccgtgggtcaacacggttgacatattcgtgtttgatactgatgagcgttttctttttacgaaacatgcccggcgggaagaactcgtcgggggaaagcaaatgttgctggctgataatctacccgtgggacactacaagatcttgaccgtgggaggtttgaccaatcatttccgggtatcggatgtgcgggggaatgcgctttccccgggcgaaacgatgttagaggacgtgcggatcgctttagaacggatctctcagaccgtgtctcatgaattttcccctttgtggatcgggaaaacgatagagattgattataaagcggatcggggcgtgtacccggtgtctttggttaaaaatacgaatcattttcacgtgttactagctgaagtgggtggtagtagtgcgggacgtgcggaccgtcccgcttttatttttgaaatcctgacacccgagggagcggtctacggacatgataacgttccccgggtgcaggaacccgtgacttacatgccctattccctgatggcgggcgaggggccggaagtcttgtcaggaggccacgtgaatacggttaggctactttacgatgaggattacgattataaactgatcgtctatgatacacggaccggattgcgggcatgggattatgatttgatgaaactcttggagtcgagaaaaccgatgctgcgtccggacgggagtacgctccccgtgcaggaatttctcgaccggcaaagcgagtggcgtttggtgatcctgtacaaagagggggaaaacccgtccggtttcgtggctttgagtattgaggtcaacgggtggatcgtttggcgtaatgacatagaggtttgatgtatgaaaagcaaaatgttacatatcgtttggattctgttcttcttggtggcctgcatcggggagcgttcggaggatggagggggagaatctctcggttcgcggggaaagatcgacgtggaaatactcgtgcggggggccgatgaacatgattttgttcgaacggttcgttttgtcgtgttcgatgatgcctctgtatccccgacgttggacataaacgagttagtagccttgggtgacgaggaacgtgatgcaacccgatttaaaaccactctggaagtgaagacgaatccggataaaatgcttgtcgtggtagtgaacgaacctcaggtcatgacgagtgtactgaatgcggtcattgccccggaacaactggaagagatgcttttccggatggatgatacctttagttttgatcacgtgcaacccttgatgtccgggattccgatgtccggggtgaaacggaaaatcgtggtggaggaaaacgtcacgaccaacgagaagatcacgattgaacgggccgtggcccgtgtcgaactctggttgaagaaagccgacgaaatcgctttcgcccggctttccacgtccatgaattctagggtactcttggagaatacttacgggaagggctatctggtgacggggacagaagccgataaaacccgtttccagaccgggttagagatcgagaataatttcggttatatacaaactcctacttccggtttcgaacacgtcatttggaattaccgggatgcaaacgtgttggaactatcggatgccccgcaacggatatgtatgttctacacgccggaacgaacttacgaggttgccgatgaccggaataaattgtttttggatatacgaggactaagttctccggaaggggagagaggcatccgcaccgcactcacggagtttatcccggaagggggaagtagcccgcgggtgattacagaaattcggcggaataatatttaccggatcatcgggacggtgaaagaaaagacggtacaatttgaacaggccgtactcccgtggaccgaggtggaacaagggacaattatcgatccccagtactacttgcgggtaagtcgggacgttcttcatgtggggcgtgtgggtgatgttgtttcgatttcggtggagacaaactataacaggagcgaccgggggttccccaagggcgtgcggttgggtgagattagctactatgataaagatgatcggcccttggaaacgactgccgggggacgggattggttggtggttaatatgtccggaacggacggggatttatcccggaatgcggagttcatcgcaaaagcgagcttgggcagtgttcccgcgggatattacgctttggttgaaattaaagcgggaaacctgattaagatcattcgggttactcgctcatgataaataacgagtaagatatgatgaaacgattcagagggtgttcgaaacggtttagcctgataatggccttgctcttgtcgggactggcgggatgtgtacatgataagctggacgggccggacccgtcggggaaagtcatggatatagaactggttattccgggattcgagattcccttgacccgctcgatagaaggggacaaaggggaagccgcggtacgggcgatagaccttttatttttcgatcggtcaaccccgtccgctaaactactccaacatctgagcgtgatcgattttaagcaagaacccgcgggttcggactataaagtgaaatttagcttgaatcttgccaaggacgatcaggtcagcctgattgcggttgtcgtgaatgcctcggatgcggtggaacgggccttggcgggaagtccggcggatgccgaaaaacaagagctattaaaggccttgaccttcagtacttccaaggataaggatgacacgtataaatggaacgtgaacccgccgggatatacgccggttcccatgtacggcgagatggccatggaaggagtcgtgccgggctatcttgtctccgtctccttgacccggatgctggctcgtgtggacgtggaaaacaaggttagcggggaagtcttccaactggaggagatatttctggtgaattacaacacgtccgggtacatcgccccgaaatgggacgagacgaccggtgtgcttgtcccggacccttatacagcaaacaagaacccgatgattcccgtcccttcgggaaaacagccgggtacggaagaggtggcgatgaagtacgggtacaaacaggccgccaatgccccgggagccttgatggcggggaaaatttacacctacgaagctgttaagaacgtggcggctgacccgaaaaacggggtttgtttggttgtcaagggcaaatacaggggcgaggactattattaccgggtggacttcacgcggactgcgggagaggcggctgatgtggtgtgtatgccgttgtatcgtaatcacaagtatgttgttaccataaccgatgccgagggtatcggttacaaaacctttaaggaggctcttcacgcatccggggtattgtcgaacttgaagacatccattttgatcgtgaacttggagggaataaatcacatcgtttatgacggccaattcttcatgggcgtggaacgtcgtacgctggacctgccttacggtataagtcggcaacttacttaccgggtgagttccgattaccacggggcatgggaggcgcgagtgattgattcggatgcaaacacttggctccggctggccgggggacaaccggtcacgaacgggacggatataaacgggagcggtttggaactggtgatttcgtccgtgttctccccgggtggcgggcgtgattacgtgacggggcagatcgagttcacggcgggtcgtctgcgggataccctaaccgtgagaagggtcccgatcgcggagatgtttgcccggagcaatgtcgtgctaaattccggggtactgacttttgccgtgaccgcggagaataaccgggagattcccgcttggtcgcaaggggtgtttttcaaatggggatcgttggtggcgttagctccagccgggaatccttatgacccggaggtgcaagccgtttattacccgtcccacctgaacccctcggattggaaaggaggtctggccgggtgggataaaatcccgtatgctcattcgaatttcaacttctccatgccttccgctactggggaggacgtggatgctttcgaggaatattccggtaataccgggttcagtgaaagcgcgggcgtgggggatatttgtcgctatatttccagtgggccgggtgggaaaggatgggtcgagggcaaatggcgtttaccaacaaatgccgagttggaactcttgtatgaagaaactgggataaaaacggtgtcgatgggtggtttcgtcaacctgactgccgaactgaaccgggatgccggaaactacctgcacgggaactttgattctgaaagcggttggttcctaggggcaaacgtggcgggaacaacggcaacgtctgaccatagagcggtacccccgtcggggacggtcttcctgcctgcatccgggcaacgttacccggatggtaacggggatgtggtacatgtcggtgcgtacggttattactgggcttctacgccctatccggtgaatggcggatacatcaccgattatcttttcatatataaaagtggggttgattttaatgcagccgatcgctcgtacgcttttcccgttcgctgtatcaaagattattaataatcactaacacgacgagatatgataaagagactattcttttgtttgtttgcatgggtaatgtgttccggtctatcagtgcgggctcaggaggggccgctccctttcttccggtcatttctggatggaaatttgaataaaataaccttccccggtccgaatgaacccggggcttccgggcgagcggctgatgggaattataagcgaataaaccgggcggttttgaaccagtgggggttgcagttgacaagagggaaggaagagatcggggcgttttacttgccggaatatattttttccacgcaagacgggttgttgattgaattcgagtatatcatgatgtacacgaatgcggaagaaattggcataactgatggaatttgtatgttccttgtcgatgcaaccacgaacgagtatatcggttcgaacttgaaatatggagcagagggtgcggggtttggttacacgcaccgccgctccggacacacggatattagatatggcgtgacctcgatcaccgggatgaagggaggttatcttgccgtggctttggatcaggggcattttaaaaattggcgtttcgaaaattatgagatgcggaacgggattccttacggggatgctggaattgcgaacgtacaatcggcaacatataatacccggagtaacgtgacaattcggggggccgcgggaagaggcgaaaaggtgataaccacttcgctcaaaactcaccggatagcggaaggtcgctggggttatcctgttctcattactcgtcacacgggatgggatgagaagaccggactggaagatcccaattccgacgggttgagaaacaaggccggatttatgttgaacacccagactggaatgtatgaacaatatgttgtcccaagaatcgataaccccttctgtattgcagggggaaagctgttttatcattcagatgaaagtgcttatcggaaagcgatcatcgctttggaaccgaacactatcgggggtggattccggatcacggtgaccatccaacacggaacggaaaagacggtcgtgatcgagaactatacctatccttcttccttgttatatacggagaatggtattcctgcccaatttattcccggggaataccccacgattacctattactcgaatccgccacaaaccgaactggccctcaagactccggaaaaactggctataggttttatggcatcgacagggcaacttacttcctacacgaacatcatccggaacctgcggataactcccttgtacggtgccaatgcggaggatgatatttacaaccatcgtcgcggtcccgtcatcgtgcgtccgctggataacgatgtcgcctatcggcttgtcggcaaccaaccgggtgccagcaaagacaaccttgatttaacgagtttcaggatatggacggacgagaaacattgtctgggagacggccaattcgagcatgaagaaaagggtgtcgggaaatggaaatataacccggaatcgggtgaaatgacattttttccggcaaaagacgtgggcggggaagccgttatttggtatgacattaagagtatacacagcccgtacgttgcggagaaataccgctcgtctctggcgaaaatcgtgataaattttacggatgatgagggttaagttcaccccttctcccggaaacgtttgtaaaaaagaattgcaacgagctttattttgttaaatgtttatatatataattg

SEQ ID NO: 178 - DNA, 8160 bp, Butyricimonas faecihominis
caaaaggaattaattaaaaagaagcgtgtaaaagaatgaaacttgactcaaattttatagcattctgcaagcagagcatcgcattggaacaacgaatggcgaaacaggcgggaaaacggttgaatgaagcgatgcgcaacaatatccaagatattaatgtattggatcggattgcagaccagctacttgacactatgtcagggctatcaggtgcgggagaacgaacttatatgaaatatatcaaatacttgggaacgtttaaccctcaagctgcaaaagaaacaaaagatacctatgaagatatcatgggatataagatacatgtagcatacgcagcggcacgattggccaaagaattgcacaaaggacaggtagatcaagcaggtaaaaattactttgaagaacatttatcgactgtcggacgaaacggtttcgactggaaagaaaaaaccgtgggatttctgtttaatgtagctgaagatacaggtcataccgtaaaagagatcattagaaaactgaaagcgatactggatgactgggagaagaacaaggaaaaacatgactggatttatgaatttgaagatatcgtaggatcctttccgaacgaaaaataccacaaattaacaaagcaagaatgggacgagattgaagaagctctcgatctaatggacttccgcacaactaccaatcgtgaaacatatatcgagcgtttccgcggacatcgtttggccatcaaagtcaaattgaatgaccttcagtacaatatggatattacccgcattctacaccatacagacaaagacttagcgaggatggaaagacataagaaagaatattatctgttattaaagatgctggcagattgaagttttaagacaatcaaaatttaactcaacttagtggcatgaacctacaagaacaaaagatgtaaggtttaaccgagatgatggaaatcatatatctatcatgccacatatggtaaatcaaagaaaaatgagaaaagattacttctaaacgactcagaagacttgtaaaaacgcaagtttgacatattatgtacatctattttggaagtaactaagcttttgaatggtaagctgtaatagtcaagacttgttcagaaagatggcctttcacttcaacgtttcgcttactgcaatcaatctcgccaagggcacttgcaaaagaatgaaaatcaaatattcggtttcttcatgcaagtcggtaacacacaatgccaatatgcttgaacggcgtgttcgccattcaagcagacacgacattaattgacaaaattttcaaagaactacttttatttaccgcagaaccacttagacttggctaatttttaacgaactattgaatatattttcaatacatttttgcggaattttctcttgctctagacgtaggttgtgagacttgatatgattatacagtgtggcttccgcaggggtaagatggagaggctttgatacattgcttggagtgcctttgtcgccttcaaaataggtgtcaaaggtagcgcgatccatcagaaggctttgcgtctggggaaaataactgcggaactgcgagagaatttcgaagccctgtacatcaatgtcgccccaatagtatagggaagcgtgccgcatgaatggaacagacttgaggatgccaacggtgaatccatgcccccaaatcagcagacttcctgccaacttgggaaaagtcaggaagttgactttattctccaccacaaacaccttctgcacaggcaacgataacgcacagaactgactctgaggcatcgtcagatcgtctacaccagaaaagtattcactcgcaatcgatgcttccaacacacgaatgcgcacccatggctcatcgtatcgcaatccaaagcgcttttcgaactccttctcatccgaacagacatgctctacaatgacaatatccagcaactcacgaagcactcccttattgcgctcaatgaacttggtgtgcacctcaataggcaattcacgaatgtacaactctggacaaggattcgccacaaaatagcgcaaaactttcaacaaatcaggccaagaggaagcattctcaatcaccttaagtggatagcgttccacccatggacgaagctgcggaaactcattaaacaacatcgccacatccttgcgaaactgtgacacttcaccacccttcagcaagaagcgctcaacgtccgatgcactcctgaacaacacacgctcaggcagatcctgttcgcccaatgctttcgttttcactgttttccactcaatcgtgtaaccaaagcccttcacctctttcgattgcgaacggatgtccgtcagttcgtgctgatactcatccatcgatgcgctcgctttcttatcgcaaggaatcacaattggttcaaactcagagccagcgaccactgaacgcaaataatccacatacttgcgttccgtcttcttacgtatttctgctgccgttatcatacctccatactcctttcacgttctgccttaaactcactgataggcatattatagagtacagaacggtcgcccttgcgctccacataatgcacatacgaaatatcgttctccacgatgtggatgttgtcactcggagtcaccacgagcaactgcaggtggagctgtttgcagagcgaaatcagatagcgagccttgtcctcgtcctgtgcgcgaaaagcctcatctatggcaatgaagcggaacgaagagtcgagtccgttcttagtcaagccaaactgataagcgatagctgaccccaggatggtatatgtcaattgcgccttctcgccacctgacagctgtcccatagcctcgtaggtgttacgcttctgatcatcgtcttgataaaactcctccgccttatatgtgtaccatccacgcacatccatcaccaactttcgccatgattcgtcttgtaaacgagacatcagcggttcgatatgctgttcaaaatgaatcctgctgccatcgattgtcgaattcatctcatggatgttcgggattgcactactcagaaggtcttggaactccttcaaatccacgttcaatcgtttggctgcgaccaactggatatacgtctttggagcatccttgaaatcgatgcccacaagatacgaattcaattggtcgatggtcttggtgatagactggcgccagttctggaagaacatattgaatgcactgaccttgttgatgatattctcctgtaaatacttgttgaagcgcgattcaaacccaggcagatcttcgtccagcaatcgttggtaataggtctgatattcgcccacaaactccacggcttcgggcaaacggttcacgtccgaacgccaatcgcgatacttcgcggtaatttcctcaatgggattcttgaagcgataaatcaggttcttcaaatcgccactcttgctacccttcgtctcacgttgtttccgcaaagcggaattgatgtcactctgtaacgtgtcacgcattttgtccaaacccaccaatgccacattcagtaaatctgtgtgttgcgactcaaaagcatcggtatcaacaacgcctatttgagccaaagccaaagcacaatcattgctctgtttcttgagtatattctcacgattttccaataatgctttgttaccgatagcttcattaaacttctcctcaagtgcaccaagttcctttctcaccctctccaattgcccctgcaacatcttcaccttatcattggtctcctccagttgtcgcttctgttcttccttttgctgaatgacgagtgcacacgaccaccagtcgatatcatcaaatttatcgtatttatcaaacagcttcgagtaggtttctcgcttctcctgagcattctttgtatctgcctctatacgacggactttggttgccacctccttttcatcctgctgcaactggcgtacttccgcctgtagcatggcaatcttctccttattgtcccagcccaacacatagtgttccttgcctcgtgtctctggtcggtcgtctttctcatgcttaccacctctcgcttttatcagtccctctttcgttactgctttctcttgcagatagttgaagtccgcaagcgaatcaacacaactatagttgaactcagcaaataacctatcctcaagccaatccaaatacaagcactttgacttgtattcaaccttacggagcaacgaatccaccttcaatgtcctatcctcaaactcacgaagaggctctgtgccctcgtatcgctgatacacgatgcgtcctcgcagattatgaccattcacatactcattcacctgcttgtaatacttctctggcaccaccaatctcaaggcaaaattgtgcagaatacgctcgatggcatactcccaatcgcactcaatatccttcacacgtatcagttcaccgatgaatggaatctcttcggcggttgcaccaacagcctccagtatctcatcacgaatctcagccacacgaccagagatattgttcttatgctgctgcagatagcgtatagtatccactcgctctgatatcgtgcagttgatttcatcctgacggttttgtgcctgacgcttctcttccatgagttgcctgtcaatctttacctgcagagcatctttctcgtgtttggcggtcgcacgattggcatcgaatacctctgcatcaggactttgtgtcagctccaccgtctttgccagcttatcgtattcttcggctttggccttgcggttatcacgcatcttcaccttctgattgatttccttctcaatctcacgtatctgctgacccacctcgtccttctcaatagccaccgacaagcacgtctgctcttgttccagctcactcttcttcacctttaacgccttcaactcatcttccagttttctcaagttgctcttgcagcgcaccaactcctcgttgcacaaatccaccgttcgcgcagcaaaccaataggccaccacactcttctcttgctccaattcagctatgcgcgtgtctatcgccatcagttcctttgccaatgtattgataggttccagttgggcaatctgctccttcaccttatcgatattggttttcgcctccatcagattttggaagttgtcctttagttcctggtacttttcctcagccggcacttcctcgagcatattcgtacggatgaaactgtctagatcgtccaacactttcacgcccactatctgattgaagagtgtaagcgccttgtccgaacgcattccgaagagggctatcatcttctcgccatacgcaaccgggccgtcaaaaaactctatcttgcgtcttgtgtcattcgtattgtatttcttcgtcagtcgcttgcgccagtcgccatgcaggtcaaactccgaaaagtcgcgctttatagtcagcggttcgcgagctataccaaacaacaccttcagttcctcgccagtgtagtagcgcacctgaaacagcgtcaccacacgtttgtccacattgcagaacgatgcaagaagtaccgaacgtgcccctttgtctcgcaatctaagcgtggtagtgctcgctgcaccctcctgctgctgattgccatagttgccaaagaagtacgactcctctgtacggttgcccttcttctccacacccgatgattggttgtagaatcgttggcgcttcagtggcactagcagcgtgagcagagcatctaccagcgtactcttgcccgatgcgttggcaccggtcagcagcgagttattgccctgcgtattcatgcagtacaccttttggtcgaatgtaccccagttccacacttccaaatagtcaagcttgaagcctgccacttctggactggtattaaagagattcatctgctgcatcatagtcgttcagtttgtttttgaattccaatagatcgtccagtgtcaccttctccttgatgatgcgatgtattttatagcgtttctcgccctcagcatgctttgcttccacaaggaaaccaaagctgacgatgctgtcgatatagcggtcaaggtctttctcaaacttggcacgattgaaggtggtgggcaggaacagttccgcctcttcctttatttcagtggcggttacatacttatacgaagcctgcgactctgttggattgctgtcgaagtcttcgagtatctgcctcaacacgatgagtatcaccgacacctcaaaaccatacaaccttctcgacgtcatgttcaacgttttgtcatcgtccaatttcagttgcttgacaaaggcaaaaccctcatcctttttcacgatgagttccagccccatcacgctgatatagtccagtatctcgctctggtagtcgagtacatcattccacactacatcgtctttctctacgatgcctttcagaagtttcaccacagccctgctgtatggttgtatatttgttgcgttcatcgtgttattatgatttcgggaattgatatcgttttgttttctgcaaaaacaatatattgctggcgctcttcgtttaccacagtcttatattccttcagcacgccaatgtatccaaacacttccgacagacctttctccacaccctcgttccgttctatcacctctgctagtgtcgtctgctgtctgtcgtacagcaccttgttaatgcggtctctcagcaccagacgatcgatgtgatacggattgtagagtttgcctatgcgctccaagtcgtccagactcagttcagccatatcaggcttatccttatacacagtctcttttataggagccagagtcagagggcgctcgactggcagattgatatcgatagtttcatattcaagcgaagcttctggtttctctttctgtttggtggcttcgatgagcagtttctttatatcattaatcacctgctttgtcacctctgcattcatctgtccgttctggcgaatgatgcgactcagtttctcgctcatgcgatcgttggttttcgccaccttctcgcctgcgtcaaacagatgctttttcatttccctgagaaacatgtcatgcgcatcaatgcctctattctccagtgtttcatagagtgcaccagtcaactcgtcccattctttctgcagatcggccgagagcaggaattcccagaatgcatagaaactcttgccttgttgcgattgtttcagttcgccatacgcatcaaagatgtagttcagcaatactttcttctccgcattgtctgtctggcgctcatatatctctttgataatccccttgaagttgtcatccacctccttgaaatcgctaagcagctccttagccagtttattcaagctattgtatcgtggttctatctggtagtcctcatacacctcgacctcttcgcccatctccagtcgctgaatctgatgctctatctccatttttttggctcggagcagttccagtcgcttctcgcggtcctcgttcgagtattccaccaattccttcagttgggcaaacagcgtcttgaacttcgattccgtaccgatgtaatcctcttttttcaagctcaccacccaatccatcagtttgcttgtgtgcgacgaaatctcgtatatcacctctccctcttcgttctgatagttggtcaagaatcccttgtctgtccagtctttgatgagtcgttttgctttctgttcgttcgactcccctagtcttgtcatttcaagattatcctccaccaacgcattttcctgctcatccagtcggttctccagtagcatgtgcaagcgttcctgcattatagccgactgtccctcaaacgcctcaatgacaaaagacaagaagaaatccacacttcttgattttatgagtcgtacgcttggtgactctcgtaatatttgtgttatttcttctacttgcatatccatcagtatatttcttatatgttattgtcacatctttgaaggataaacgagcacctcttcttcccctacttctagcacctttgctatctgaaatagagtctcgaggctggattatgctgcattcgtgcaccattttaatactgtagcaggatctaaggtaattgttctacaagccacttgtttgtgcgcttcttctctgccaacattcctttgatgcgatttatgtccttatccatgactatgcattacatattatttagggcaaaatattaggt

SEQ ID NO: 179 - DNA, 8160 bp, Butyricimonas faecihominis
ctatattacatatatatttgatttctttcaaaaatcaagatgctttaaagccgggcaaggtaacatgctcagaaattttagatttgcagctgaaaagcaatttactcgtaatcaattgggtatattgtatttcctggtaaataccctcattgataatggctatctctacttaaaagatagagattttatagctcttacggagaatggtgccgatgttataaatgggggagagtgtgttattcctaaaatttcccttgagcggacaatttatgaaaaagagaccagtagatcagatatatatgaacagctttggaatattatcggatcgaacaaagaaaatgattatgcgccgctgtatgtagatggaccattgttttataatacaatcaggccatatttaacaacattgtcgttacctcatacatatggggaatatatggcagaattgcgggaaaaggaagaatttacatcaagaattaaatggtataggactttatttttagctcttgatgagaatgatgtacaaaaattcctcaaagatttgtctatcaaaataaacaggctgctgctaatgaatactccaaaagatgcgatacaagaagctttgaatccttgggcagatgtagacattcctacaatcgataatacgcctctgcctgaaattctcaataaagtggcggaagaaccaattgtgaataaaaacaagccgtttgtgttgatttcgtatgcgtgggaggtagaagacaatgtctttatgaattggattcaaactttcgccaaagatttgcgaagacgagggattgatgctcaaatagaccagtatcaacctcatggaactgacttgcctaaatttatgcttgaaagcatccgtaaggcaactaaagttctgtgcattctgactccaaagtataaagagaaagctgaatccggtaaaggaggtgccgcttatgaagggggtataatatcacatgaaatatataacaatcagggaaccactaaatttataccggttgtacgcaaagggtcttttgaaacttcgacaccggatttcattagtggaagaaaaggttttgattgctctactgacgataaatacaatagcgaacttccgaatattatcaaggtaataaacgaagaaccattgatagaaattcctcctgttgaataacggtaaatcttatttcctaattttatacggaatactcagttgttgcctgtatccacccaccccgaaagtagtcgttacctcttccacgaggtatacgccgttcttggaaggattacggtagtcgatcagttccacctgtacggcaggagacagtccgaaatccccgaatactgtcacattgccggtgattccgttcagattgtaattccgaaagtattccgtcgtctcttctacaagccggtcggaattgattccgacatgaggtgacatatatggtacgatggtatatgtggataaatccaccttggtcctggtcttcgctcctgatgccgtcgtgttgcccgttactttgtgcgtcttttttgaaatctgcgtggcattgaccgtctgaaactccttgctgcccggcgtcgccgggtcgtattcaggattcatgcgtactgtcacctcaaagaatttttcatccgtcccgagtgccttgcccgtcaccgccaaaaacttcggatcggtcttgaccactttcaggttgctctgcgccacatgctcgttgaagtatatcctgtacggtcctgtcgattcatcctccgggaataccggctgagccttgctggacgaataaggacgcccgacggcaatggacggtatggccccgtcatcatcggcatcgtattttaaaaaacagtagaccttgtacttcgaccattcggaaaggatatccgctaccgtgaagttgtccgtgacctttaccttgccgatatgtatctcaaaccgcttcgtatccgagtgtatcctgaagccggtatctttcaggatattatacttgccttccagcacctcgttcaccgtcgtccctttcgccggggtctcgaaatgaggtgcctgtttcagtttgagtttgtaggccatattctcacactggatttccagcgtgctgtccgaattgtatccggtaatgtatccgtcgaacatatttttcagcacgccgttgtagcccagcttgatattgatgcgctgtccgaccttgaatgtcgtctcgtcaaccagacgctgcgcgctgcgtttctcgatgatgacaccgtcctgcatcacctccgtcgttatcctcgacacgtccttgccctccaatgtcacgttcccgataatcgtggagcggcataccgaccctttcgggaatatcactttggccgttccgatcagcttcttgtaactctcgttgatttcgagcgactggacttccgtaatctccacgccgttctgtatcctcatcggattggatgggtcggcatccccgatggtgatgcgacagcagaggatatccattgcagctatacccataaacgtgtcagtttaagcaacgaggcggggtcgatgacctccgtaccgaatttaacatacttgatccacttgttcgtgtgcttgatggccgtgtccaccttttcctgttccgccagtttcagttccacggcttccgatggctccacggcgacacagttcagcgaatacggctgcacgttccggcaatccgtaggctgtaaggtatagccctgtataatcaaccgtgaaatgttgaactggcgcaataccgtgttgtcgcaatcgatgacacccttgtattgtaccagcctgataaacttggacacttccgcctcgggatacacgtccgggtatttggaggtgatcttgccgttgatggtaatctcgaggtcacccccggatatatattccttgcgggtatagtcccgcccctgtacccgggtcagcaggatattgttccggctgctgacctgtacctgcggtcccaggtccacgaatgtcaccagtccataccggctgttcggcaaaaccttgcactcgctgttgtcataatacttcccctcctctgatatggacagttccagaaaatccgccactgtccggccgacgatggaatcgatatggtttttcttctgcgccaccgcctgctgttccctgatgagctggtagtactgtccggtcttgttcgcaaggctggactgcgactgtgtctgaagatatttgtcccgcacctgctgttcccagtatttgaggtatcggggataggaacgtagcaacccgtaagccgtctgcgaggcaacctgtatggctgcccgtttgagcaggtcatggtgcctggagaagtaatgtacctgcccgtcctgcaattcggcaagccccatgcccaacgccagacgcgtggcgttgctgatgtatccgccaagcgaaccgtggttgagtatgcctccgctcaacaaagtcgaggccgcgatttgtatcagtcttcccataatcctttcattttatgcgttccaggaggcatcgaagtcatgcacgacatcgatgagcgcctgtgccagttgttctttcaggttctgtatctcttccgtctgcccctccttcgacttcatcaggtcgatggtcctgacactgagcaggctctctatgttcacgatgacctgtttaggtgccgccgaggacaaccgccccgtgccggaatagttgccgccggcccctccgtcatccagatgcgtgttggtaatcgggttggcagcaaacggacgtgtatcgttggaatccggttcgttgccgtactggtcgggagtgaagcccgccacgcggaggatgttctcggctgcctccgccgaacctccgaaagtctgccggagcgatgaaaagaacttcacgagtgtcgtatgtgccagcttgcgatgcgcgatgttgtctatacgctgcgcatcggtggcgttctgccccagtgcccgctgtttccatagcccgttttcgtcctgctcgaatccccaggccctgaactggtcaaagtcgaaccctcccttacgcatcagctcatgcgcattggcggcactcgatatggcattccgataagcggtggcggcacgcacaatctccggaacggtctgcgtgttcatgtaccgggcatagtcgtatgtgcgggcggcaaccgcttccgacctgtccccgatatcattcacatagacggccttgccatcctgcatacgccacaaagacttgtcgagatccttctcctgttgcccgaaacgctcctttaccgtcttgaggaaagcgtccacttccaataccgtacccatcttcccgaactcggcgtacgcggcatcgatacgtgtctggctgtcgcgtttggcaagggtgacaagcgcatcccttatgtcatcctgacgggctttgtccatgttatacacatggtctcgcgataccatcccctcagatgaagcgatggcaaattcccccaagaacccggcccaccagttggatgtgaaggctccgattttatgtcccgaagcctcttcgatacttttgccggcaacgacctcgtccacggcacgctttgtcttgacagccatgttataggtctcgctcagggaggagtaaagtgcctctatggacggataacggtacttgcggttcgattcgatctcttccagtacggcatccttcgcctcctttatcttccaggtcttgtaagccacccatcccaaagtcccgaccaatgcggctatacctgccgtggcggcaaccgcgcctgtactgatggcactcaacgaggcggcagcaccggtcagtccgctgccggtagccacctgtgtggcaaacagcgactgcaggactcctttggctccgatgacaccgcccccggccatcaaggcgcggttcatcgctccccgtcccgccacgcctgcggactgcatggccgacacgatggcccgcttctgggcaaacgaaaccttaccgataccacccgcccccagcagcccctgcacggcactgattgatgtcgtggccgcagactgtttgccgataaaccccatggcgatgccgatattcgtcagggctcccgccaccttgaacagccgggtcgcgacaacgcctgtaaagacaagcggttctatccaatggaaattgcgggtcacccatgcgccgatattgccgatcacggtgaagatgtccaacaaggcattcccgatggacaccaggccacgggtaaattccggagccttgaactttgccagaaaagtgcggagcacagtgcggatagagggttccaacacctcgtatgcctgcatgaacccttcggtcagctgggaggtcacctgcgcccacaatcccttggtcgtattctgctttaccaatgccagttctgaggaaacgccctgggacccccggttatatgaagtcagttctcgtagtttgtcgtagttcttcaggaacatcatcgccgcgttaccgccaattttcccgaagattgcctggacatccgccatcgacgcgcccttcttgttcaattcctcgaaaatgtccgctataggacggagtttctcgacctgcaccccctcgatgtcgcgcatttccgtgaaccggatgcccaggcggtccagaacttcctgtgcctccttggtaggtttggcaaaacgtgtggaaagagcacgcaacgaggttcccgccagcgttcccttcagacccatattgcccaaaagaccgatggcggcactgctttccgtgaagtccacgcccgccatacgcaggtaaccggcagccatcttgtatgactccgccatctccacgatattcacattcgagcgggaaatggtggaggagataatgtccgccacgctgtccatgctgtcgttatggatatcataaccggccatgatgttcgtggccaggtcggcgatatacgacacgtcgttgtcaccgataagtgccaggttcgtgatcgggcggatggacttgttgattgtctcgatattcatgcccgccatcgacaggtatttgacggcaccggcaatctccacggctgtgtatttcgtgtcgatgccgattttacggacatgacgggccatactgtcaaaacgggtctcgaatgtcttgaggtcgctgtccgccacacggaggatggaatgtgccgattccatgatgttggaatagtcgatggccttcgtcagttccgaacggatcaggctgtaacccatataggcattgagcatcgaagcgaacgggaggttcctgagtgacggcgctttcgaatactggatacggttgatggcggcacggcgtttactgcggtagagcgtaccggctgcagtatgttcccgctgcatgagcctgacggactgcatcgcattgcgctgttcctgccgtcttgcagcctgctcggcctttatacgttccgtttctgccttacggcgtgcctgttctgcctgccggcgtattttctccgcagcacgggcggcattcttgcactcccgttctttagcccgcgcttcatcggcacgccgcttttccgccgcggcggtttctgccagagccgccttacggcgctggtctgcggtaaagagctcctccgcgtggaccagtttctggcgatgcagctgctgtcctgcataaagccgttccatcagtttttgccgggccttttcgggcattacgaaggcctgcggagcatatggcaccggaacggaaggtgtgagtccttcggatggtatgcctccctgcatgttgaaagaaatgacagaagcacttttgatacgacccaatagggaaagtatctgctgcaacctgttttccgccgtcccggtcttgatttgcagttcccggtcacgttccatggaaaccagggcggagttgattttcccgatggctttggtaatgcgtttctgcgcgtctgccatcgtgccaacggacgaggcggcattcttttcgatctccgctttgcgcatctcggcagcctttttctcgtaaaggcttttggcgttggccttgattttcttgctgtccaaagcctgaccggcattgatggtcaggctgatgcctttggaaagcgtggaaatatccgtgagtaaccccttgatacgttccagcttctcttcgctttttttcgtatcgatggtcaggcggtaatcgaaattacgtttcttgccgttcttggtgcggaacacgcggtctatctcgtccatcatattcttgatgttcgtgacggccggagtcagggacgctttcgcctgtaccagcttgcctaccgcctcaccgaaggcgataacctgcttggtgccctgagaggcatccacgttgatggagtagttgacctgatagttctgttcctgagccatggtaatgggtactgcgttaaaagaatagtctttccgcaagggcggagattatgaaacgaaggccgccgcaaaccggaagcttacggcggcaggtcaaggagtcctctccggcaatgacatcggaacgggcatacggctgatgagcatctgctcgtgcagccacaacgcctcttcggaaagcatcgcgaactcctcgtcggaaatcgtgtcgaggttgacgccgggaaagtagtggcggacatagatcatccgctggcggatgcgctgctcgtcggtcactacccaccggcttataagtttaccaggacactctggcgggtggtgatcagctcggaaagctgtcccatcagaccgaacaggaagagcgactcgtcgtccacgagttccttatctccgtccacgaagcagtcgcgggccaacgtgcgcatggcgattacctcgtcctttttggaagcggccatgaatttgctgaactgcggaaagctcggttcggacatgtaggccacataaatctctttctcgccgtttgcggtgtctccgaaaacgaccatcggacaaatcttgcggagtttcttctcctctttcagtttgagggctttttccttgatcttgatctcctgttccaatgaaagcattttttcgtccatatcgaatttgttttgattcaccgaaagagtaggacaaagaatcgtggaaaggttgaagacacggttcttattcacttgtaatccatatgttatacaaaaaacttctttgctcctgatattcccagatcagtctttaaaggaaatttcgctgaatatatttcatatatttctttgatatatagtatat

SEQ ID NO: 180 - DNA, 8107 bp, Butyricimonas faecihominis
aagtaaagaaaaaacctcaattcacgccatcatacaatataaaggcgaaactaatggggccgtctcaaaaagtcaattttaaacaactacccccactaaggggctgtccaaaaagtcattttatcatcaaaaaactcctccgtcacttcgtgccacctcctctataaacagaggaggagctggtgacttctcccgaagacagggagtatttcaactctccccctgtttatagagggagtatggcgaagccgggagggagtttaaaaaatgacttttcggacagccccaaaccgcttggtaatcagcactccccctgtgtaagggggagctggagggggtagttgacaaatacaagcaggactttttagacaaccccgtcaaaaaggatttatttaacgaccttgcaggaagagaatttctcgaatttgcatgtatttttcagattaaccatctctctataagatcgttatcctccgacaagtgttttattactcctataatacgctgttactctattgtttggctaggttttctccgtgtcttctccgtgctttctccgtgtcacttgcgagtgatcgccggaggaaacacatttaaacgcggcacaaatcaagacgaagacatataggaacattgaaggaacattggcatgacctagaggtaatcaaacaacgacaaaagtttgttcaacaaaatttaaacaggctttaaagaaaacgatatccaaaatcgtaatcattccaacagggattctctttaacacaaatacccttcaaaatcaatcgattaagaagggtatttgtgcccaagacaagactcgaacttgcacagccgaacggccactaccacctcaaagtagcgtgtataccaatttcaccacttgggcattttttaacggcgcaaatatatagtattttctcgttatcgcaaaacaaataagcggtattttaacccgaatttcacgaaataaacagtaaaagatacacccaattcttaccgttttttccagtaactaacagcaaaacaatgcgttttatccaaactttcatttctcacttggtgatatactttcacacgattttcttcctcctcaacatgacatccggcacacacaacactatccggcaacacttcatgttcgtaaataatttccaactccgtgatctcgtggtccttcaagaactcgtaagacaaagaattagtaacccagcgcacatacgtggcttgagtgacgtgcttgttgaaatcgatattatcgtatgttgccgtgaaacgacgggtgctttcgaagtctatcggcatttttttcgtatccaactcgaaaggaatttcccgaataccatccacgcagaaagcggcggtctccgtcacgcaagccggcaaacgcacgggacggcgacgatttacatctatcaccatccactctgaagtagcccgcaataaaacctcttctcctgccaccattctaaaatcacgaatcgcgaataaacgatcaatacccgacggccatgtttccaacgtcacgttctccccctgttccggcatccggttaatcaaaatatgtaatttgtgcagcatccatgtcaatccttgctcgttcaacgtgggcacgtctattttcaatgcgtaagtctgtacgttcgccacgtcattaaacagatcgcacaaggacttcatgatcaaccgtccttccaaatccgtataatgcccccgaatatctatctcttccgaatattttaccatcccgttctaattttagatcctatcgattgagtgatttaatgatttgcgattacgtgatttccacccacaacctcacccctcctttttaatctcctaatcattgaatcgtcaatcacagaatttttaatatcacttttatatcacgtttacttccggttccaaccatactccaaactgaaggaacacggatttctttatctcgttagccaaatgtgcaatttctatgccagttgccccgcccgtgttcactaacaccagcgcttgtttgtcgtgtaccccagcatggccgacaacttttcccttccatccggcagtttcgattaaccacccggcagccaatttcacatgcccttcatccacggtataaatcggcagcgcaggatacttttccagcaaggcatccgcaacggcacgttcaaccatcgggtttttaaaaaaactcccggcattaggtaataccttcacgtccggcaatttagcctcccgtatacgaataatggcctgccgtatcgtttttaatgaaagttcacccaaacggtttacttcatctttcacgctcccataatgtaatctgaattcgggatgttttgccaaacggaaagtgacatacgttactagaaaacggttcttccactcatgtttaaaaatagagtcccggtaactgaaacgacatgtttcggcatcaatcgtcaccctttcacccttcacgatatccacggcttccacccggtcaatacattccccgacttccatcccgtaagccccgatattctgcaccggggttgctcccacatggccgggaaccagtgaaagattctccacccctccgtacccgtgttcaacggcccacgccacgaaatcatcccacacgacaccacttcctacccggacaaacacgtacttatcatcttccctcacgatctcgcacccttgcatcacgggataaaagacaaccccgtcaaagttctccgtgaacaagaagttacttccccctcccaaaagtagaatttcctccggatctaactcgtatgatcccacgaattccaataattcgctctcttgatcacacttcacaaaatatttacaagtcacgtctatgccaaacgtgttatattcttttaaactaaaattttcgttaatctcaatcattctatttctgtctattaatcaactccacgatctcttttctctcgcaaaggtaaaatatatcaggaaataaatcactaaatttgccccattaatccaaagtgtctatgatctcattaccgccagcatttacagaaaggatgcagcagctccttgggaacgaatcggaaacctttttccaagcgttagtttcggagtcccccacttccatccggttaaacccggagaaaacggcaaacaccgatctccccttctcggaattactttcccgacaagtaccatggtgcagtaatggatactacttgaaggagcgtccctcgttcacctccgacccgttactacacgggggagcttattacgtgcaagaggcctcctccatgtttctgcaagtcgttcttcagcagataaccggggatacccctctccgggttcttgacctatgcgcagctccgggtggcaaatccacgttactggcaaacaatctgcccaaagattcattgctggtttccaacgaagtaattaaatcaagagcctccattctcaaagaaaatattattaaatggggacatgatcatattgttgtcaccaatagcgaccccaatcgtttcacgggaatgaagggggcgttcgacatgattctcgtggatgcaccctgttccggggaaggtatgttccgaaaagacgagaaagccatcacggaatggagcgagaataatctgcgtctttgcgaagagcgtcaaaaaagaatactttctgacgtgtgggatgctctcgcccccgggggctatctcgtgtatagcacgtgtacctacaaccccggagaaaatgaagatatattaaactggattttaaccacgttcgatgcgtcatccgttgaaatccggcataattttacagccatcaccccgtccccctctcctctccacgggtatcatttctacccgcacaaaactagcggagaaggtttattcatgggagtcattcaaaaaaatgacgggacaccctttaccataaaaaaagaaaagcgagctaccccgtcccccgcggtcaaactcccggcagacattctccccctcctgccggacatgacaaaatacacgccttacatcgcgggagaaacattaggcatcctccccaaacaacacgccgaatttatccaatacctttcctccaaagccggggtcatttataaaggatgtgaaatcggagaatgtattaaagggaagacgaaacccgcccactctctggccctgtaccacaaactgcaacaaaagcacgttacccatcaagaagtagacctcaccacggccctccaattcctacgcaaagaagacatccgtttcgaggcccctcaaggggaatggattctcatcacctacaaaggcatcgggctaggctgggtaaaagaagtcggcaaccgggtaaataactactaccccaaagaatggagaattaaaaatttgattaagtgatttaatgatttccgattaagagattcgattcatcggtgactctatcatctttgatttagtgatcccttttttaatcactaaatcatcaaatcaatctgcaatcaccgaatcatccttttatttactcttcctccaccgaacaatagcgcttgatgatactgtaagaatccgttaatccaagctccccggccttactcaaatccacgttagcagcactccgatttccttggtatatatagagtaagcctcggttaaaataagcctcggctatatccttatccacttccagcactttcgtgtacatatcaattgctttctgaatctcaccgctcttggcgtacacgttagcaatattaaacatggcaaaaacgaactccggatcaatctccaaacatttgttattcccctccagcactaaagaataatccacgtttcgctccacttttttctcctcacccacgacacgggaagtcttctcttctatcgactcaatgtaatcgtacatccgggaacgggcgcttgccaagttcatcaaagcgaacagatgattcgggtcacgctccaacactgcgcggaaatcctcgatcgctttcgtgtaatctccccggttcagatacaacgaaccgcgcagcaacaaagcatccgtgacattcttgtttttccgaatatccgaagacaagctctcgatataattatcctcgaattccctcgggtaattaaatttcttatttgaaactgtcaaggccgggttataattatgctcctgattaaacttcatgatccgcttgtcgaaatattgcactttccctttccgtaaggtatccaacgacaggtattgtacgataaacatatcctgcaattcgataatcacgttccggtcttgcaaacgtccgttaatcacgtctttcatccggtcatcccgggagtttatatctatcaatcgcttgaaattctccgtagtatccaccaaagcattctgatccccatccttcattcgccggtatcggtccatgatctcctcagccttgtaacggtccttttcggccgcatcgtaatcccgcatatccatactcgtcgcggcccttgccagatacgccttcacgaaatccgggtatattgatatactttgagaaaagtcgttataagccccctcgtaatccttgatctccatctttaacaacccgcggttgaaataaatcagtatgttatccgggttcatttccaacacttggtcaaaatcttgaatggcattattcacgtccccgatttccgacctcaacaaagcccggttataataagcatacgcgtaagtgctatccaccttcaagactgccgtgtaatcctccaatgcctcgggatatttcttcatctcgtaccacgtaatcgcccggctcataagaatccgcttgttttccgggttaatcttcaaagccttgttgtaatcctctatcgcatcgtgatactcttttgcttgaaaccttaaatatcccctcaaaccataagcatcatccgagaacatattcaatttgatggccatgttacaatccgcaatggctccttcttgatctcccagtttctcccgcatgattgcccggttcaaatatgccggtaataaatttttatcgataatcaacgccttcgaataatccttctccgccgccttgtaatctcccatatcagcctcggtaattgcccggttcgcgtacacgtaagcctctcccggattgatcgcaatcgccgtgttataatcatgcatggcctcctcgtactgcttcatattatgataggcaatcccccggtacatataagcatggaaatagttcgggttcagctcaatcgcctgcgtgtaatcccggatagctccctcgaaatcatccaagttcaactttgccagtccccggaaaaaataaggttcggataaaaagggctttatccgtatgatattattgaaattctcgatcgcgctcacgtagtcgtcaaacatgatcgcactcttccccactcgcaacatatttgccgtattccattgtgccgacacccccaatgtcgccaaacagaagaatataataacgccaaatttcttcattcgataaacatatattttcggggataaagataataaaaaagttcgcatcttcatcatatcccccttttaccctcccaaaaatctctctcccgcatgatattatcaactccatcactctttttccttcataccaaagcttacctacttgttctatgtccccgttacctcctcattaattgtccgttcctataaagccctacttcaacgatagaataacgagcacataacggaaatatgcaagagaatatattgatttaatgaaaattacacgaatataaactaatatacctaataacaatcacgaacaccaatattcatcttataatcataaaaaaaggctaccaaaactgatagccttataaatattcagaataactaaattaatagtcgtttctacgagtttcttttacatccgggataaatctccaagtatccgggtttaaactggtataaacatctgcactaccaccaccagtagtataatatccataacctttgtaagtaaatcctacacccataaccaaagcagttgccatgctagacaaatcttccatctgatgccattgatcttttttgtggttatacttccaaaccgttctagaatttcttccctgacccgttgcgatataaccgtatggctcaccgtcatttcccgcatttgaaacaaaagaaacagcgtacacacgcggaatccggtcataatccttatcctgttttacacccggtttatcagttaaggaattatccatctttgtccatactcccgtagcaaagtcaaactttataacatccgtagcataattagaagtagcaccaacgctcttggctcccaaacatacatatgcagcattatttacaacaaaagcagttccgccataacgagattctcccgggaaaggaatctcttcccatgttccggattcacctgcattcggatcaaagcgataaaaatctttaaatacccgattatcctcaccgtaaccagttcccacgtaaccgtatttcccgtcagagaaggctatagcatcccgacgaccttcaacctctgttgtaccattgccattattaacaacgattttagaagaccaagttttatcccacgccttcgtctttacgttgaaccgatagaaatcattaaaatatttacgatcacggatattctctttgtcaccagtattgccaaatgaaaaagcaggcacataacccgttcctacataagcccattctccaatcacgaaagccacggcagaatgacgaccattaccaaggttttctccttttcctgtattcattggtgccggaaattcagaattatctcctgttacctttttccaatttaatctaccctcatcctcgtcattaaaataatacgtatctgtaaattctgcacctttagcacctaatcctaaactaacaaaaacagttccggttgctggatccgtaaaacatacggctgcctctcggggtgcgccaccaaactctaccgatttttcccaatcccccagatgatcgtcgtcatcacaagaagcaaagattaagcctaatactgccagaaccaaaaaatttaatgttctcatacttatctatttacctagttatttaaattatttatttcgttctaattctcttcatgctacaaaaacagtaggcaaaactacac

SEQ ID NO: 181 - DNA, 8089 bp, Butyricimonas faecihominis
attatttccttgtccttggagttctttttatttcaacaacttttgcaacaagctcttcagctccgggcttgagggacggggcgaattaatcgtaacgacctttccttttttgtcaaataccataaaccgaggtatccctttaattttataatcattcattattttatcccgaccttgcttgttctcaccattagcaaacaactggataccttccaatccttcctgttccaatgcctccaaccatttcttatagtctttctgttcgtcgacagatacaccgataaagaccacgtcttttcccctcatctccttttctagtttaagcaaatgtggaatttctgcccgacaaggcccacaccatgtagcccaaacatccacgacaactacttttcctcgaaaatccgacaaggaaaccagtttcccattccgatccgggtaggtaaaatcagatgctaattttccggcagcacccttgtataatttagccgaaacagcatctaatcgttgttgatgattaactgttgtcaaatagttcccgtatatatccaaaagcttgatataatcttcatacttcctacacttttccatctcccaaagaatcatttcagctttcaacggatcacttgacaaccattccaaacgatcctccaaagcaatccgttctttttcaccaccacaagcaaaagttgtataacgttgtaaataatcgtagccataaggttgtcttaatatagaagcatccgataactttcctttttccacgattgttttataatattccggataatctgctggagtcggacgacttggtatatgtgtcggtctaccatcacgcatataaacttctttcgtcgcttttaaagcattcaatattctaaacgcagcataatccaaatcgtaatcaacagtttgcttaactaaagccgcaaaagtcgcatcccgaagagtgatttcgtccttaaacttttccgcctgtggtaaaaaagcctcaaaataagggtaaaaatccctgtaatcgaataaaacatatttcatatcatccaatcttttcctcacaggtatcatcattgattcccaacgagccagtaaaagattttctggagtattacggtcagttatcatcagcgtatcttctaagatgtttacctcggcccgatcacccggctccagatacaaacgtacacgatctaaaattttctctcctcccacggtataaaatccctgatatgcaggttgaaaagaaaaaccataatgcccatcttcactaatatgagttgttgccaccaaacgttccttaccatccaccacctcatacagatttacattctccattttatccttcgtcacctttcctttcaattcgacataagtagtacgatctgtcaactcatcttgtaatttatcgaaagctctttttataagctctttcaattgtggagttccagccttattctcagcctctcgccctaactgaatataatgttcaacttgactgttatcgccaagatccacgataaaatttaagcctccgagcatatcaaactcaacataagtcggcaaattctccttatttttctccaaacattgcaacacgttctcgacatcccgggccttcaaagcaacaatatactccaacaggcaactaatcttatcttttccatcaaactcgatcttttccgattgtctttttatcaatccacacatttcaacccacgtattccctttatcactatgtaaacgattcaacgcatccgaatacacggaacaaatccgttcatctacaattgtacctccaatatttttatcaaaatccgacttattttctaccaaataaataaaccgttcatcattcggcaacatctcttgttcaaaaagataccagttctccctgcgacatttcaccttatcattcaatttaccaaacgcttcctgacaaaaagtttcaatttctttatcgcgtgaagcatctctcaatgcatttacataggcggcatattcttttgtggacaatttgcccgcttgattacgcccctccaagtagagcaatgaagtcttttcatttaagcctctctccacacgcatccggaatcgctcccattggctgccacccactaatttatgttgtaccgtaccatccggtcgtaatatgaagaaagttggaaaagcacgcacttcaaaacgttttccgagttctattccttcacccttttccatatcgtatttcacacacacaaattcttcattcataaactccccagcctcagctaatgtaaacacattgttcaacatatttttacaaggtccacaccaactggtataacaatccatgaacactaactttccctctttttgggcttgttccaaagcctgccggaaagtcagatcacgaaattccactccttgagcatttgcacgaaagatggtaccgcacaaaagtgcggcccataatatcaatctaattttcatcttttcaatcgttattttttatattcgaaatcgactactttcccacaaacatttttataacgggcaacttcttttaacgaaccatccgtactcatctccagcaccacgatagaacccgagttctttgcacctgaaccatcactgacaccaacccacatctggttggtatttccaacctgatcacattcgatatagtcaacatttcctcctccaacttcatactccattaacaaattccccgtatcaaaactaacacaagctatctttccggcataaccataatataggaaatttgctttctgggaagtcgtaaaagtatgagcctccttacctcccggatgagacaactgcctcttctttttcggagaaaactgaggattaccgtccttatctttacccacctcaaaagaaagcatgtaatgttcgcccgaatcatcaaccatgacagctcgtccgctactcatagaatactcgttaccaaacaatcctccccacaccatctgcatccccacgctattaggattaaactctcccgtcagatcatccggtaaagtgataatttcatcccattgcaaaggacatttcatggaaataaagcgctctttcccctgatcataaaaataagccctgtaattaaccatagaaaaaaagaaatcaaacggggctattttctcgtagtctcctttcacggcaaccccgtacttcggataaccgtttgcccgattctctctccggtaaagaagtccattattgttcacatattcatataaagtaacactatgcgtaccaaaagactgtggtttaacaatctccggttggaaataaaacatatctttaaaatccattacatacgacatatccaaaggtttaaccactactccacctcgctcatcatccgtcataatcaccaccatcttttccgctccagcaatcatacttgttatataacgaaccccggtcggttttttgccggctacttccccgtttaccttctggtaggcatcctctaccaccgaaccgacaacattcacgaaagtcacgttagcctccccgttcacgttactcaacgccatcatcccttttgaataggaattgactaccgtaacctgtgtcaaccgatcaggaacatactgtattcccgtttttttatccgtcatctcgaaaacgagcgtgtattcctccggtatacttgtaacttccacatctaagtccttctcaaaagatagagtatccgacttcgtgggattgccagaaccgtaagtaatatacatatgccacaagtaagtataattttccgggttgaaatttccatcacttacagcaatctccggtgtaatctgcaaatgtgtaaattgttccaccgtcgtatctttcatcctttcgatagtaacatcgtttaattccctgtatatatcattccccttatcctccaaacaggcataaaaggcacagacaataaaccctaacaaacaatatatttttttcatttatgcttttcatttactaagttacacaataaatcaccaaggttctataatagcgttgttctcatccctgatcgggtagttttcctcgaaataatcactcatataggctccatacacttgccacatcgtgcgctcattggaatactcgctcgcttctaccgggaaatcccgtttcaattcaatcatacacaactcgtgtttccgccgggaataatcgccgaaatcatacttgattgtctgctcccagtaaatcggcttgcccaacatattagaaacaagtaacctgcaactcaaccgctcggtaattcccaattccagtgtttccgaaggtttcaaggcaagcgcaatgacaacttgtttgttttccaaagcctcatccttattataaataaccacgggaatattcacgtataccgaatcacggggcaactcgtactctgcttgcaaggcctcataatgtaaacccacttccgctgtcgtcttttcctcatccaccacgacaatcaccggacgcccttcaggtgcggcctccccggccaaatttacccgaacccacaacgtatcctgatcaacacccttacccgcaaaagaataaacgatactgtccaatgtcttcgtccaataataactttccgtctgcaactggaaataaacagcatcctttcctgtaaaaggatagtcagcattatccttacaacttccaaaagctatcaacaacaagaaaatataatataattttttcataattccgctttatttaatatcaccaaactccatttcatcatccggcatcgggaacacgtaattaccggtcatcacaacacccatatcgggcaaagtattataatcaagccgcttataataataaaacaattgtccttctgccataaactctttccgatactcggcctcgatttccgcggctagatcacaattctcctccaacggataattcacatatcctcgatgatcacgcaaggtttgtaaataacctttatcacctgaagcctccgcggcaatcaagtacatctccgacaatttcaataaaggaatcctgttcacgccccggtatttaccaatatatgttttagcttccccggttttcaaaaaaaacgtgttctggttccgccaatctatatccacgccgggagttccaaacacactggcccggcgagtatcagaaatatgacattgtacggtactctcttctccaaaatacacatccgaacgcccctcttccatatcatacacatacaaagaagatatgtattcattttcactacacaaacttccccatgtattaccatcccccaactgagattcctccaacaaagtaaacttttccccatcaataacttcctttgcacattccaaagctttcgttttgtcgcctttgtataaatatacacgtgctagcaaggccgtcattccgtaataattcaaatgggatttccgatacagccaaaaaccatctccctgaatataatcctctgtctcgtaacctttctctgtatacgaatcaaatgatggcccgatcggatctacctccttgatcaattttcgtgcagcctccacatcatcaatcaccttatcgatcacctctgctacagtcaattgggctattggtttattggtcacctcttctacataaggaattgcagccacattagcccccctcaaatacgatggagcaaaccctcgtaacacatcaaaatgcaagaatccccgtaatgccatagcctccgccttcacggtctcatacacaccgctactaaaaacacctctcttttcatcgacattagcaagaatatgattacaattcgctatcgcattataatttccccgccagatagcatcaatacattcttcaaccttagttgactcataatcatacttgagagcatcctcataattaattgacacatccgtatacacctgccctaccatatctaaaaaacccatcgtctcattcccaccatacatttccgttctcgccataaccgtatatataccggtcaatgcatcccgaaagcccgcttctgactcaaacaaagcttcctgttttatttgtgatttcgggtccacatccaaccaatcactgcaaccacccaacaaaaggactcctgccaacccaatgtattttacaattctatatttcataattctgacctatttatttcataaataattaaaaccgggcttgtaaaccaatactaaaattacgggcaaacggataatcaatacctctttcctgtttcactgtcgaaacccggaacacatcgttcatatagaataaggctttcaatcgctttaatccgattttcttcatccaaggcattttaaattcatacgacaaattcaaggtggacaactccaaccaattattatcctcgataaaacgggatgtcggtttggtcacacttgtcgcatttgcggtagcaccaccgataagtttcgtaaacatcacccggtcacccggtttctgccaacgttcctcaaatacacgtcgatcaacattctcccgcaaatccgcatcctgcactttatccactaacgtctgattgtaaatttgtcctccataactgtaacggaaaatgacattcaactgaagtcctttccacgccaaatttgtcccgaacgtaccttccaaatctgaatccgtacatcccccaattacataattatccgtactccaagttgtcacgatatctccattcacagcctgaaacaactcgtttcctgttgccgggtccactcccaatgactgatttacccaaatagaattcatggatttcccttcaacataacgaactttaggacgatttgactctttacttttagatccggacatcgtgtcttcatcctgattgtcattatacgcacgtaaagcattcgaaatcttcagtagcttattcttgttatgtaaggctgttgcgttcacactccaatataattgcttggaaagatttttcaccaacgccacgcgcagattcaactcgtacccgtaattcttcacctcgcccaagttatccatatacgaattgaaacccaaagaaggcggtaaagtcacagtagtcaacacatctttggataattttatgtaatagttacccgtgaaattaatccgttcatcccacaaatcaatatccactccataattttgttgcaacgtgcgctgccaccctaatttttcgtttcccaaagccatcacttcggctcccaccgtatggtgataacgctctcccgtcaaatacttataagtcgtcatcgcctgataaggattgtaattctggctacctgtcaaaccgtatgaaccgcgaatcttcaaccgattgataaaagtcacgtttttcagaaatccctcgttatgcaaattccaacctaaacccacagaccaaaatggagcccatcgcttgtcagaaccaaaacgagaagatgcatcttcacgaaaagaaagatccaacaaataacgttcatcataactgtaattcaaattacccaaaaaacctactaaacgagaagtatattcgtctccagccggagaaccgtctttctcgtattgtgttgcaaaactgatataatccaaattttcattcggaaatccttccgtctttaccgtaaattcccttgtcacactctcctgaagattccaacctaaattagcattaatcacatgcttttccaattgataaaaataggtcattaccaaactggcatcgtaactgtaattctccccgcgacttccaacataagatccccgacgatcaaaatcatcgtcctcataatccgcaaaatccgtatgcttggctggcttaaaattatccttatatgtattttgatgtgtaaacgaaaaactcccttttaaccgcaatccatccataatactccaatccaccccgaaattattcgtcacgtcattgtatttctcctcatctgtcgtattcaatgtcgtattatacaacggattatagtaatctttccctaatccgccaccaccgatcggaacatattcatcaactttataaatatagttaccatcatcatccttataccgtacgtaaggattacgtttcgtgtaaacactaaacgagccataaggagaatttatcgcctttacattcgaataagtcaaatta

SEQ ID NO: 182 - DNA, 8087 bp, Butyricimonas faecihominis
tctataaggtttatgatggtattcgtcaggtagtgatcaacttgtaataaaggatttaggtattaattgggattaaaaagtgggtgtctccaaaagtcatttttaaacaactacccccactaactcctccttacacgggggaagaaaccgcttggtaatcaactctctccctgtgtaagggggagctggagggggtagttggcaaatacaagtagaactttttgggacagccctctttttagttgttccggaaaatgtgttattccggtagcaatatttcagttgaaaaaccgtgtggctgtaaattgtgaaaacagattttccctttatgtagtttcacgatctggcaaacaatgcttaatcccaagccgtgttcctgcccgggaaggaggtccgggatttccccttgagccaaagtttgtaatttttgcaggaaggcaggagaaactcctttgccgttatcggaaacggaaaagcggtagaaacccgattgataggtcaggctcaacgttaatgtcgttcctgccggggtgtgctggatactgttgtaaagcaaattgttgatggtccgggagagtaggccggggtctccatgcagggtgcttttttcgatgttcgggtctatacgggtttcaatttgataatattgggtgcgagggtcgctgtttagaaaagcggcgatggtttgtcggaagaaaacggaggggtgaaaggtttcttcccgtaagggttgagtccctttttcgagttgagaaaagaggttcaggtcgttgatgagttcccgtaatttaagcgcttgattcttgatataaagagcctgtttacgagtctcttccgaggaatagtctccgtcttccagttgtccggcacgtccgagaatgacggacaaaggggtgcgtacgtcatgtgacacgcctgcgatccagttttcccgataagcggtttgtttatgcaaaaggtctgatgtttggttcagacaagaggcgacatccgaaaagacacctttttcattcacccggacggtttccccgcgggatagtctttgtatcccgccaagaatacttttcagggaatgcagcatacggcgatcaatgaacaaatagcctaaaatcaacacggaaatgttacccaagatcaagaggaggttgagaaccgggaaaaacttcatttccgtgatttgttgcatattgtcgaaatttggagagctatcatttaggtcgctggcagcgaacatctcttcatcccttttgtagcctgtcggcgaatcgtctttcaaatgggatttcgcgagtgtggagatgtctcccagcgtggtggtgtccggtaacaatccggggagattgacggcccaacggatatttctttgtttgtcatcgagtagcatgacccacatttgctgttccttgacctgcacgagtaacagggagtcgaccttgaaattattattctcgatgtgcaagcgatcagccagcttgcggataaattgtgctggcggctgggaaaccccggctttcaggtaatagtggacgacgagcgagtagatgagaatgttcacggagattagcaagatggccccgatgagaactcgtttcccgatacgctttatggaatgttgcaggtctttcatggctttataggataagtttgtaaccaagccccttgatcgtgatgagagattccggggaggaaggggtcatttctatcttttcccggatacgccggatgtgggccataagggaattttcatacccgtagagattatcgccccacgcttccgcgcaaagggcatccatggtaacgatgcggttggccgatttgtagagtacgttcaaaatggcgtgttctctggcggtgagcgggaaggtctcgccttggcggtttatttctgccttgtcgaaatcgatggtgcaatgggccagctcgatcactgttttctcatttttgtatgatcggcgaagaatggcgctcagccggagaaggagttctttgggaagaaacggtttggtcatgtaatcgtcgcccccggcatctagtcccgtgaacatgtcttccggcttgtcccgggcggttagaaacaggataggaatgtccttgatctgccgaatgtctttcatcagggaaaatccatccctgtccgggagattcacgtccaagatggcgagatcggggaaggaggtgtggcaggcgacaatggcttcttgcgcggaaccggcggtggtgatggaagaaaaaccgtcttctcgaagaatactttcgatgaggtccagtaattgtcgttcgtcatcgacaatcaggatgtgttttcttttgatgaaattgaattctttatccatagtgacgccgttttccatgattctctatacaaatctagggaaaaaaaacgtgaaatctagcgggtgggatgaaatgtaaggtaaatgtaaggaaggcgtaagctactcgcaaggattcgggagtatatttgttaaaaaatcgaacgaatggagatcaataaatatttaggcttgattttattgttttgcgtgacgtcggtggcgtatgcgcggcaagatgagaaaggatgtatcgtgaaaggatgggtgaaggacacggtgtcgttgaaagcgatcgcatatgccacggtgcaggtggcggaggcggaacatcgaacaattcccgtgaagctgacggtgaccgatacgaatggcttttttaaggtgggacctttggcggtagggaagtatgtacttactttttctcacgtgggttatcggggggtagtgtgggaattccgggttgaggcaggacgggacgagatgagtgtgggaacattgtacatggtggcgtccgcggagagattgcaggaggtggatgtggttgctaggaagttgccgatccggtttgaggtggataaaattacttatgacatgggggatgatcctgacgcgaagaatgaaagcgtgctggaggtgttacgtaaggttccattggtgaccgttgacgggatggatggcattgaactgaacgggagaaaatgcagtatttatataaacggacgcccgtcggggctggtgaaacagcaaccgggaaagggattgaaagggattcccgccgtagcggtgaaaaagatcgaggtgatcacggacccgggtgcgaaatatgatgcatcggaggtgggtggtattataaatattgaaatggcgaggatggggctggagggatattccttgtatgtcgtgggaggcggggatgattacgggacttggaatgtggccgcgaacgggatgttgaagtatggtaaattgtcgttgtcgtctttcttgtcttattatgacgtgggggcgaggaggtcggagtatcataacgtgttggagaacctgaacgatcaggagcaacgttatctcgtgtgggatatgaatagcgaggtgatccagccgatgacttggggaaatgtcgaggtgagttacgaggtggattcgttgaatttgttgacgttttctttttcttcccggcagacggattcgaggtggaaacagacgggatggaatgaggcgcgacgagaggatcatgcttctttgtatgaatacggggtgtcagagagaatcgggatggacgatgggactcgggaggttgcatttaattatcaacgaacgttcgagaatccggatcacgtgtttacgctttcttatatgtataatcgaacaccctcggaaggatatacaaaccgagacgtgtttgatttccaaaagatggatgagggggtgaagttttctccttatgaaactcggaaccggaataaggcttacacgggagaacacacggtgcaggcagattacgtgaatcggtttagtgcggtacacgctttggagagcggggtaaagtatattcggaggaacacgtcgagcaagagtttttatcgggagcgaacggatgcgggagcggattggggaatgcaggctgaacggatggagaaacttttgcacgtgcaggatatttatgctgcctatgccgcttattcgttcaactacaagaagttcgggatgaagttgggggctcgttttgaacaggcaactttggatgtttctttgtacccggatacgcaaccggattttgatgcccgtttttctaatttggtaccctccgtggcgttatcgtttcaggcggcccggacacgggtgtggaagttggggtataatatgcggattatgcgaccgggagttggtttgctgaacccgtaccagtcggaaacgaatgccagcgtggtgtcttacgggaatagccgtttgaaggcggaacgctttcatcatgtcagtttcgggtttagttccttcgcctcgaaatggatggtgaacgccagtctcgattatcgttatgccgggaacgcgattcaagggtatggctttgtgagcgaggagggacgggtggagaatacctacggaaatatcgggaaggagaatagcgtggcgttgaatctgttcgtgaattgtaatttgaagagtaagaccagcgtgcgtttgaacggaaacgtggcatatattgatttggagagtaaggaagtaccgtcaagcgcgtgtggatggcaatattcggtgacagggatggtacaacagacgttgggatggggtatccggacgatggtgcagggtggttatatcggttcccgggtcagcctgcaaacggattatccggggagttattattacgtgttgcaggtaaataagagtttcttgaaagatcgttttaccttgtctttggtggctagtaatatttttgataatgaacggaagtcgaaagggaagaaaataggagcggggtatgtccagcattttgggaatgtcatggaatattcgagtgtgcagttttggttgtcttaccggatcgggaacttacgggccgcggtgaagaaggtaaaaagaggaattgtgaatgacgatgtgctgaaagagtgagcgggggctttagaatgcaatttgtgtagaaaaagtataaatattggatcatttttgtcagatggttgataattgtgttatctttgattgacttgctgtaggaatcaagtttaaaatgcgtgtgaaatttatactttttagatgaaattattagttaatctatgttcgtatttgggatatggaatgttgtggggagttagttttttacctttacccgtgatgtatctggtgacagatgtgttgttcgttattttgttttatggtgttcattatcgtcggaaagtggtcgatatgaatttgcggaattctttcccggagaagagcgaggaagagcgaaagcgaatcgcccggaagtactatcgccatttgtgtgatacttttgccgagttttataaattgtggcatatctcggaggacgaaatcaagaggcgttgtgtgatggtgaatatggatgtaccgcaccgttatttcgaacaaggacgtagcgtgattgctttttccgggcattacgggaattgggagatgatgtattcttataagttgtgggagaaggatgtcgaattgatcccgatttataagccgatacataataaggtgtttgatcggatgacttgtaagatcaggagccgcttcggggccacgcctttggcaaaagcggatacgctacgggtgatgttgaggaatcaacaggagggaaagattacgatgaccgggtttattggtgaccagacacctaataaacgctctcttcatttctggactcgtttcttgaatcaagacacggccgtactggagggaacggaaaggatcgcccggaagttaaaccagccggtggttttcgtgaatatgcgtaaggtgaaacggggctattatcatgccgagttttacgatctttgttccgacccgcaaagtctggaaccgggggagttgactcgtatgcacatccagatgctggaacgttttatccgggaggaaccggcgtattggttatggtcacatcggaggtggaaacataaaagggcggttgtagcgtaaaaaagagggtgtgtcaaaagtcatttttcaaactccctccccccttcggggtactccctctataaacagagggagagttgaaatacttcctgtcttcgggaagagtcaccagctcctcctctgtttatagaggaggtggcacgaagtgacggaggagtttttttccgataaaatgacttttgacacactctctttttatgcagtgatgttttaacactatttcattgcttcctcgatagaaacagcaacagcaacggtggctccaaccatcggattgttacccattccaaggaatcccatcatttccacgtgggcgggaacggaggatgaacccgcaaattgggcgtctccgtgcatccggccaagcgtgtcggtgaaaccatagctagccggtccggcagccatgttgtctgggtgaagggtacgtccggtaccaccaccagaggcaacagagaagtattttcttccggtttccatacactcttttttgtaggttccggcaaccgggtgttggaaacgagtcgggttggttgagtttccggtgatggaaacgtctacaccctcgtgacgcatgatagctacgccttcccgaacatcgtcagccccgtaacatcttacttgggcacgttcgcctttagaatatgctttttctttcacgattttcagttctccggtgtagtagtcgaattcggtttgcacgtaagtgaagccgttgatgcgggagataatcatggcagcgtctttacccaaaccgttcaagattactttcaacggttgttgacgtactttgtttgctgattttgcgataccgatggcaccttctgccgcggcgaaagattcgtgtccagcaaggaatgcaaagcatttggtttcttcacggagtaacatggcagccaagtttccatggcctaaacccactttacgatcggcagcaacagatccgggaatacagaatgactgtaaaccttctccgattgcttctgcggcttcagcagcttttttgcatccttttttgattgcgatagctgcaccgactacataagcccaagctgcattttcgaatgcgatgggttgaatatctttacacattttgtaggggtcgatccctttggcatcacagatggcttttgcctcttcgatgtcttttattccgtaattatttagaaccgtgttaatttgattaatccgacggtcgtaactttcaaataaagccataattaattttagatttaatgattacaaagtcgcgggcgacttttgtgatttcagattttttgattaggtgataatcacttaatcataaatcgtaaatcactaaattgttttattcttgacgcggatcgatgtattttactgcatccgcaaaacgaccgtatgatcctgttgctttttcgacagcttctttgggatcaataccttttttcaacatatcggtaaatttacccaagtggatgaattcgtaaccgatgacttctccgtcttcatcaagccccatacgggttacataaccttcggccatttcaaggtaacgggtacctttggctttggttccgaacatggttcctacttgacttctcatgcctttacccaagtcttcgaggctggccccgatgggaagtccgccttccgagaaagcactttggctacggccgtaaacgatttgcaggaagagttcgcgcatagctgtgttgatggcatcacaaacgaggtccgtgttcaaggcttccagtaaagttttgcccggtaaaatctcggaggccatagccgcggagtgggtcattccggagcaaccgatcgtctcgatcaatgcttcttcgataatcccgtccttgatgttcaaggtcaatttacaagctccctgttgtggggcacaccagccgataccgtgagtcaatcctgaaatgtccttgatctctttggaacgaacccatttcccttcttccgggataggtgccggaccgtgattcggtccttttttcacaacacacatgtgttgtacttcatgtgagtaaatcattgtttttgtttttttgttgatatattgttaaataccttgtctttgttttaaagtcgggcaaaattaacacatttgttttggataaaaaacatcttataaaacataaa

SEQ ID NO: 183 - DNA, 8034 bp, Butyricimonas faecihominis
taataatgtataagcctgacagcatgaaacaacgggattacggttgattggcaacctgaaaaccaaacagacaaacgggactatccccgaccactaaaatttcaaattattcaccagccgggaaaggcggactatccacccgccgcccggcattaaaaacaaatcacaatgagaaagaaaatcttcttgtcggcggctatacttgccgccgtggtaagtgcctacgcacaaggaaacgggcaggcgggcatcaccgaagccacgaacctaatcaccgggtattttgaccccggaacaaaactggtgtacgcaatcggggcggtttgcggcttgattggcggggtaaaagtatataacaagttttcaagcggcgaccccgacacctcaaagaccgccgccagttggttcggggcgtgcatcttcctgattgtcgccgccactatcctgcgttcgttcttcctctaaaaaggcggctatgtctgacgagttgttgagggctaagcccgaaaaatatccggtaaacaggggtatcgggaagccggtggagttcaaggggctgaaaagccagtacctctttatcttttgcggcggcttgctcgctgtcttcgtggtgttcatcgtcctgttcatggcaggcgtgaaccagtggatatgtatcggtttcatcgtgtcggcttcgctgctgctcgtgtggcagacgttccggctcaacgccaagtacggcacgcacgggctgatgaaagccgccgcacgcaaaagacacccacgcttcattatcagccgaaaggcgataccccgattattcacctacaaaaaaagaaaggaagaaagactatgaggaatatgttaaaggctaccacgctggaaaggaaatttccccttttggcggtggagaacggctgcatcatatcaaaggatgcagacatcacggtggctttcagggtggaactgcccgaactgttcaccgtcaccagtgccgagtacgaagccatacattcggcgtggtacaaggcggtcaaggtgctacccgactactccatagtacacaagcaggacttcttcatcaaggagaactaccagcccgacaccgaaagggacgagcttagttttttaagccgatcctttgaacggcacttcaatgaacgcccgttcctgaaccattactgctacctgttcctgacaaagacgacaagggagagaagccgccgacagagcgacttctccaccctctgccggggcaggattgtaccgcaggagatagccgacaaggaagcggcggcaaagttcatcgaagcggtcgggcagtttgaaaggattatgaacgacagcgggtttgtcacccttacccggctggcggcatcggaaatcaccgggcaggacggaaaggcgggcatcatcgagaaatacttctcgctctcgcaaacagataccacctgcctgaaagacatcgggctgtacccggaagaaatgcgggtcggggacgacatactgtgcctgcacacgctctcggacgtggaagatttgcccggaaaggtcgggacggactgccgatttgagaagctatccactgaccggagcgactgccgactgtcattcgccgccccggtgggcgtgctgttgtcgtgtaaccacgtctataaccagttcatcttcatagacgaccacgccgaaaacctgaagaacttcgagcagaccacccggaatatgcaatcgctctcccgttattcccgtgccaaccaagtgaacaaggagtggatagacgagtacctgaacgaagcccacagtaaggggcttatttcggtacgctgccactgcaacgtcatggcatggagtgacgacagggacgaactcaaacgcatacgcaacgatgtgggaagccagcttgcgctaatggagtgcaagccacgccacaacacggtcgatacgcccacgctcttttgggcgggcatacccggcaacgaagccgacttccccacagaggaaagtttctacacgttcttggggcaggctctctgtctgttcgtggaagaaacgaactacaagagttcgctttcgccgttcggtatcaaaatggtggacagggtaagcggtcgtccgctgcacatcgacatatcggatttgcccatgaagaaaggcatcacgaccaacagaaacaagttcatacttgggccgagcgggtcgggtaagtccttctttaccaaccacatggtgcgccagtattacgagcagggtgcgcacgtgctgctggtagatacgggtaacagttacttggggctgtcccagcttatccacaaccgcacgcacggcgaggacgggatttatttcacctacaccaacgagaacccgatagcgttcaacccgttctatgtcgaagacggggtatttgacatcgagaagaaagagagtatcaagaccctgatactcaccctgtggaagcgggacgatgaagcccccaaacggtcggaagaagtggcgttgtccaatgcggtaagtgcctatatcgacctgataggcaaaaacagttcggtaacgccctgcttcaacacgttctacgagtttgtccgggatgattaccgccgacagcttgaacagaagaacgtcagggaaaaggattttgacattgacaatttcctgaacgtgcttgaaccgtactatcgtgacggtgagtacgactacctgctgaactccgacaaagagctggatttgctgcataaacgcttcattgtctttgaattggataacatcaaagaccacaagattttattcccggtaacgactatcatcatcatggaagcttttataaacaagatgcgcaagttaaaggggataaggaagttaatactaatcgaggaagcgtggaaagcgattgcatcggcgaacatggcggactacataaaatatttgtacaagaccgtccgaaagtatttcggggaagcgattgtagtcacgcaagaggtagaggatattatttcttcccctatcgtgaaagagagtatcatcaataactcggactgcaaaatattgttagaccaaaggaaataccttaacaagttcgacagcatacagaacctcttgggactgaccgacaaggagcgttcgcagatattgtctatcaacatggcgaaccaccccggacggaagtacaaggaagttttcttctcgctgggcggcacacaatcggcggtgtacgccacggaagtttcattggaagaatattacacgtacacgaccgaggaaagcgaaaaaatggaactgttcgctcttgccgagaagctggacggcaaccttgaactggctatcaagcggcttgcagaaagcaaaagaaatccccaatcatcaacaacttaaaaattaggaacatgaaatggattgacaatctgatatacacgctattgtccgcctgcctgctggcgggctgcgaggacagcggaagcaaggagctggaaaggatgcagggctattgggtacacgtcaggggacacccggctttcacactctcggaaacgggcggcagatacaccgtcacccggaaagcgaatgtcaggggcagaatactggaaacggcttacccggtaacagaacggaacggctgcctgttcatcgaaacgggcttccgcatacagttcacctatgacaaaaagaccgaccggataacgctcatgcccggcggcgaatacaaacgagttacaaaccctgaaaacaaaagataatgaaaagaacaattctccttatggcggtgtgcctttgcttcatcggcaaggcatccgcacagtgggtggtgtcagaccccggcaacttggcgcagggcatcatcaacaccaccaagcagatagtgcagacttccaccactgccaagaacacgctggacggcttcatggaagcgcagaagattttccagcagggtaaaaaatattacgatgcgctcaaagcggtacacgatgttgtcaagggcggcatcaaggtgaagaagtccattgagctggtggcggaaatatccgaaatctacgtgcgaaactatcagaacatgctggcagacccgaactacacgccggatgaactcaccgccatttcagccgggtacgccaagctgctctccgaaagtgcggacgtgttgcaggacttgaagaatgtagtgaacgtgacgggcatgtcgctgacggatgccgaaaggctggcggtaatcaacaacgcctataaaagcctgctcaactaccgcaacctcgtgaactactacacccgaaagaacatatccgtgtcctacctgcgggcgaagaagaagaacgacaccgaccgggtgctggctctctacggctcggcggatgaacgctactggtaacatataaatcggtatgcctatgttattagcagcggtggattttgacaacctgcaccaagtgttgcgagttttgtacgatgaaatgatgcccttgtgcagcaacatgacgggggtagcgaaagggatagccgggctgggtgcgctgttctatgtagccgccaaagtgtggcagtcgctcgcacgtgccgaacccatagacgtgtacccgctcctgcgcccctttgcgctggggctgtgcatcatgttctttcccacgttcgtgctggggactatcaacacggtgctgtcgccagtggtgaaagggtgcaaccagcttatggaaacgcagactttcgacatgaacgagtaccgggcgcagaaagaccgactggaatatgaagccctgatgcgaagccccgaaacggcttacctcgcatcggacgaggaatttgacaggcaactggaagaactgggctggtcgccctccgacatggtgactatgacgggtatgtacatggacagggcggcgtacaatatcaagaagtccgtccgggactggttcagggaactgttggaaatgctctttcaggcggcggggctgattatagacacgctgcgcacgttcttcctgattgtgctttcgatactgggtccgctggcgtttgcgatttccgtctatgacggtttccaaagcacgctgacccagtggatttcacgctatatctccatttacctgtggttgcccgtgtccgacctgttcagcagcgtgctggcacgcatacaaacgctgatgctccaaaaggacattcaggaactttcagacccgaatttcattcctgacggaagcagcaccgtgtatgtaatctttatgattataggtatcgtgggctacttcaccattcctacggtggcaagctggattgtgtcggctggcggcacgtctgcctataaccgcaacgtggcacgggcggggtcaatcgccggggctgcggtcggtgctgcaagcgggaaagtaaccgggaaactactcaaataagacggtttccactcggtagctaccttgaccgtcacttggtagctactttgacaacctcttggtagctgccttgacaaaggggctgcaatagaaagattttagaaacattattagaacatacaagaaaatggaatttaaatcattaacgaacatcgaaacgagtttccggcaaatccggctctttgcgctggtattcatctgcctgtgcgcactggtgacgggctttgccgtgtggaactcgtacagcttcgccgaaaagcaacggcagaagatttacgtcctcgacaacgggaaaagcctgatgctggcactctcgcaggacatggcacagaacagacccgtggaagccaaatcgcacgtgcggcgtttccacgagcttttcttcacgctctcgcccgacaagggggctatcgaaagcaacatcaaacgctcgctgttcctcgccgacaagaccgctttcaactattacaaggacttggcggaaaagggctactacaaccgggtgatttccggaaacgtcacgcagacggtggagattgacagcgtgaagtgcgacttcgaccagtacccctacaaggtgaacacgtatgcccgccagttgattgtccgggaaagcagcctgacggtgcgcagccttgtgacctcgtgccggttgctcaacgccacacggagcgacaacaacccgcacggcttcatcatcgaagcgttcaccattaccgagaacaaggatttgcaaaccgtcaagagatagccttatggagagaaaacgaaattacatcgaaaaggtacaggactgggcggacgaccgcctgcgccggatgtgcggacggattacgccgggcaaaaggctggcggttatcctcgtgatgttcctatttttcggcggcttgtctatctacatcaccgtttcatcaatctacaatatcgggaaacaggacggcaggcggctgcaaatagaacatatcaaacaactgccattgcagggcaatgacacaatcaacagtatcaaccccttaaacagaccggaatatggaagaagtacagaagaatgagaacggcacgaccgtaccgcagacggacgggaagcctgaaaaggaaaagaagcccaaacgggaacttaccccgcagcaggtacagcagcgcaggaaaatgatagtcttcccgctgatgttccttgcctttgccgggtgtatgtacctgatattcgccccctccggcaaagaggacgtgaatgtggagagcgtgggcggcttcaacgccgacatacccctgcccgcagaggacgggattatagccgacaagcaaaaggcttacgagcaggcgatgataagtcgcaaacagcaggacaagatacaatccttgcaggacttcggtttcacgggggacgatgaaacggaagaaccgcaagcggaaatcgacctgatgccggaagaagaaccgaagtcccaaaggggcggcggtgcttcttattcggcaaacgcttaccgggacatcaaccgccagttaagcacgttctacgaaaccccggcggtggacgaggaaaaagaggacttgaagcggcaggtggcggaactgaccgacagactgcaacaacagcagaacgccacgcctacggctgacgaccaaatggcactcttggaaaaatcctacgaactggcggcaaaatacatgaatgacggcgggcagaacagagaaagggggcagattgcccaaataccgacagccgggcagaacggcggcggtatcggcactccggctatcccggtacaggcaatccgggaaacgactgtatcggggttgcagcagcccatgagcaatgccgacttcatccgggcttacagccagccacgaaactacggcttcaacacggcggtaggcacgggttacgctatgggcaggaacacgatagccgcctgcatccaccaagaccaaaccctgacggacggacaggcggtgaaactccggctgcttgaacccatgcaggcgggaaacatagtcgtgccgaagaatacccttgtggcggggacggcaaaagtgcagggcgaacggctcgacatactggtgtcctcgattgagtacgctggcaacatcatcccggtggaactcgcagtgttcgacacggacgggcaaaaggggctttccgtcccgtcctctatggagcaggaagcgttcaacgaagcaatggcgaatatcggaagcgggctgggaacaagcatttcctttgcccaaagtgccgggcagcaggtggctatggacgtgacaaggggattgctgcaaggaacgtccggctacctcgccaagaagttccgaaccgtgaaagtgaagctgaaagcaggctataaagtcatgctgtatgccaaacaacaataaccattttatcaaccactaaatttcaattaacgatgaaacagatttttgtaatgttcgccctcttgctgggcgtgtgtgcggcaaacgcacaggaaaccgacaccgtgaagtatgcggctggcaacgacttgtaccgggggattacccggaaactcccgtaccgccaaatggttacgccctatggcatggaagtgacctttgccaagacggtgtgcgcccataagggtgagtaataaatatctcctttgcaagagattaggttagagttcaaatgagacctaccaccatccgacttatccggaggggaaaccca

SEQ ID NO: 184 - DNA, 7947 bp, Butyricimonas faecihominis
gcctctattcatttattgtaattgaaaattaataggaaccgtgaaagatactctcaccggtttctgtctttgctttccgggagtccattttggcatggattgaatgacacgaatggcttccttgtctagggaaggatccacggatctagtgacttgcacgtttgaaacgctaccatctttctcgatgacaaattgtacaaaaactttaccttggatgttattttcctgagcgatcatcgggtatttgatgtgcttggaaatccatttctgtacattgcctcccgggaatttgggcatttcttcaacgactgcgaatacttcggattccccggaatattcatccccatacccgtagtctccttcgtacccgttacccgtgccgctaaagtcgtaaactccgtggttggcaacgttggcttccacgtccatgatgtccaagttgtcgtccaagtttatttcttcatctacgatctctatcaggtcggttagccggggtgcgggaggtggtggcggaagagcgtgttgtattcgttgggtgacgggtatgatctcttcatccaattgttcttccgtgtttattactatgaagccttcttccatcttcacgtcgactttccactcgaaagcaaggaatatgcaggctaatgctacgattagtccgatctcgaagaagattccttttttgttttcgaggtttgcctttgatgatttctttacttccataatgtttatttatgatggttaagcttatacctctaatatacaaaaaaatagccagaaatcaaaataaacgaatggttttgtcagaaaataggtgaaagatgtataattatatatattactgattcccagtataaaaaaggagcggcatccaaatgtcgctcctgaaggggaaagggtctgatttccctatttttttttcttgatagcaccttattttgtctcttcgtctatctcgaaatcccggtacaagaaatcgttgaatgggaaacgtgccgagtgaatgtctttggcaatatcgtatatcttttctttcaattcctcgatattttctttggatttagctgaaatgtacacggtttctccttcctgtttggacatccacatttgtttcaagtcctctaggctatagtttttccgttcgataggagtgagatcgtcttcctcctttttcgtgtacgtgaaggcatctattttattgaatacggtaatcgtgggtttagaattatccattagctctcccagcgtttcatttacaacccggatttgatcctcgaattggggatgtgagatgtcgactacatgcaaaatgacatctgcttctctcacctcgtccagcgtggatttgaatgattccacgaggtggtggggaagtttacggataaaaccgaccgtgtccgccagtagtagcgggacattttttatggctatcttgcgtaccgtggtatccagggttgcgaaaagcttgttctcggcgaatacttccgatttgctcaggagattcatgagcgtggatttacccacgttggtataacccactaaggctactcgtacgagttttccgcggtttttccgttgtgtgaccatctgtttgtcaatcttggctaactgctctttcaggcgggtgattttgtcccggatgatgcgtctgtcggtctcgatttcactttcacccggaccgcgaagtccgatacctcctttttgtctttccaagtgagtccacatacccgtcagacgaggaagtaggtattgatattgtgccagttcaacttgagcttttgcttctgccgtacgggctcttttggcaaaaatatccaagatgagattggtgcggtcaaggacttttcttccttttaattctcgttccaaatttctgatttgtgtcgggcttagttcatcatcaaaaatgatcaagtcaatatcgttatcttcgacgtatgttttgatctcttccaattttcctttaccgacaaaggtagccgttaccggtttatccaagttttgcgtgaatatttttacggtttccgctcctgccgtttctgctaggaaagcgagttcgtctaagtattcacacatcatgtcgtagctgatgttttctgattgtagcgctacacctacaagaatggctttttctgcttcttttttcgtgtaaaaatattcgctcataaataggaaaagaaggggctgacgatgatcgacagccccttgttataatttaacatgtcttatttactgtaactggaagttgataggtacagtgtaagatactcgaaccggtttacctctctgtttcccaggtttccatttcggcatggcttttaccacgcggatagcctccttgtccaaagatgggtcaacggatctggcaactttcacgtcgctaacactaccgtctttctcgatcacgaattgtacgaaaactttaccctgaatgttattttcttgtgcgatcatcgggtattttacgttcttcgcgatccatttttgtacactacctccggggaactgcggcatatcttctactacttggaaaatatcagcttctccatcactctcttcttctccccagctgtctccgtcgtaatcgaagttataattactcttgttttcaacatctgcttcaacgtcgtcgatttcaagttcctcgtcaatacttaattcatcttccacgatctcgatcaagtccgtcaatttcggggctggaggaggaggtgggggcggtttcatcatttgttgagtaataggaatgatttcctcctcaacctgctcttcttgggtaataacaaacccttcttctactttcgtgttggtcttccagttgaaagcactcagtagaatccctagagctataacaaaaccgatctcaaggaaaatggtctttttcccttcaagatctgctttaggtgatttttttacttccatgttattagtttaatattatagttctgtttttctcacaatttgcgtgggtaaaaatagtcaaattcataataaaccgcaatatttctctccttttttttgaagaaaatgttaaaatgatcgctaaacttcattaaaatcttcttaaaagtttgggttgttgttcatatcaggttgatttcatgtcgatgatagcttgggagagggaaagtaaaaaaggacaaccttgatcggttgtcctttttcgggatgttcgtattgtatgtaaatcactgtatgtttctcttattttaactggaatgtgatcgggatggtaaaccgaactcttacggctttgtcccgttgcattcccggaacccatttcggcatggccttaaccacgcggatggcttcttgtgacagatccggatcagcggagcgtaccacgttaatggaactgatgctaccgtctttctctaccacgaattcaacaaatacttttcctccgatgcccatttctgcacatcttgccgggtatcttaaatttttcctaagccatttgttcaagtctccgttaaaacgaggcattttttcaactgtaataaacggaagatctctctccccgggatcatcaccctcgtcatcatacccgctctgccagtcggtagccttacccgttaaagagcctttcgtgttttcgttatcatcaacaacgtccatctcattttcaagatccatctcgttttccacgacctcgatgaaatccaaaggtttcacggaaatcttgggaagtggttgtgaagctctttgtggtacaaaaacgggaagaacttcctctatatcactcgtctctactggaaacgtgatctctttggcctcttcctggtagtattttgtctcaaaggcaaaaaacaccgtagccaaggctacaataaaaccgatctcgcggaaaataaaccgcttgttctcaagatcggaacgggatgttttctttgcttccatgacgtttatctttaaatgttatttaaacgttaatttgatgtttcaaaaatagaagataaaaatgatataaacaagttttttgccgagaaatgtgaatattttcttaaaatttttatcttttaattttaaaataacgttaagatgcccgtgtttattaggttttttggattatttgttttagaaaagaaaatagttgtctctaacttttttacctttgtgttatgattgaagtattatttattcaaattccggcaggagctaatcgggataaaatgtttgtcgggttacgatctgttgtgtctaaagaatgttgtgccgaagtcctcgggtatggaaacaaggaagttgcccttcgcaggttgttaggagaggcattggttcgttttgctctgaaaaaatattggaatctgacctcggaagattatcggattgaccggggagagaagggaaaaccttttattgtgggtgtagaaaatgtattttttaatatttcacattcaggggattacgttgtttgtgccgtgtctgatcgggagatcggtattgatattgaaaaacgggcaaaagctcgtatggaggttgcgggacgtttttttcacggggaagaggtggcacaattgaaaatgttggaagaggataagcaggatcaattattttttaattattggtctgtgaaggaaagctttttgaaatatataggtaccggattggcccgcccgttaaatagttttattgtttcgttttccgggggaggtgtgtctttatttgaaaggggaaataagttaccgctatacgtgcatgcctgtccggtggatgatggatatgcctgtcatgtctgttgcgagtacgaagaattaacggggatacatgaaatctttttagaagagatcaccgggtgttagatgatctcttcgtggggttattacttgatgcgtgtaattattctttcgacttgttttgtttgagtcggttggagttttttgcagatctcctccaaataagaacaagctttctctttctgttgttgatttgctatttgttggaatccttggagttcttgcaacacgttcatttgttctttggtatctgtaatccgttcgggtagatcccgtaataccgtgagaatttcaggaatcctgtctttttgcttgttgtcgattatttggcggaataacatacaatatcttagtgaaagaactcctttgtaatggtctttttcaaaaagtttaaggtcagcgatacgtttctcgaagtctattcccattgatttaaagatgcggaattcttctaaataggccgacatgattttctcttcgacttcttgctgtccgatttgtttgctaaaagcttttcgattgtcaaccagatagcggaatagaggggtgtcgacatttgttatttctgttttaatgagggaccagttttctgcttcgcatagttttttgactcccagttggggcatcgtttctcccagaacgatttgtagtttttgtttatcctgtttttgcaaaatagttatatatttttttagaaatgcctgctctcggtttcccgcggcgtactccttgtttaattctgtcagttcgattgcgtttttgactttttgcacgaaattatcttcgggctttgacacgcctcccccgtccatgcggcaatagagacttccgtcatggttgataaacaagtatgtcggatagatttgtacgttgtatttttgcgcaatatcaatcccttctccttcttgcatatctttcatgatgcagatatagttcttgttgaaatattccccgcattcttttaacgggaaaataaatttgaccatgtatttgcatggtccacaggttttcgtgtaacagtcgatgaataatttcttcccggttgtttttgcttttgctagggcttcctgaaaggttagatcctcgaagttcgtaccttcttgagcaatgctgttgctggctagaagaagtaataagctaatgatagaaataaatttcatggttatgattttaagatgttttgaattaagtctttcatttctttgtcgggactaggggcaaatacggtgatgatttttccttctttgtctatgatgaaataacgaggtactcctactatttgataatctgtttcaaaatgagaatctcctgtgggagagataatgagatttattaatccggtcatgttgttttccttgatagcttttaaccacttatcccgggttctttcttgatcaatagaaactgttaggaaaataatgtttccattttcttgaaattcattctttaattgaatgaacttcggcattttttcaatgcaactgcaacaccacgtggcccatacgtctacaacgatgactttgcctttaaaattaccgaatgtgtagatgttcccatccgaatcttgtaatgaagataatggtgccggtttgccttggcccaagagttcatattgcgtgtatagttttaatatttcaagttttaagggagaggattctacatgtgattctatgattgggcgtagttgggcaatttcttttgtacagccattgttttgaagaaggaattttattttttccagataaatctcatgtaataatttattgttaccggaaaagatttcatttagtttcgtgtagtcattatgattgagggctcttgtgggaaattgtgtcgagatggtgataccgtctcttgctgcatcaaaagactctccttcttttaaggcgagaatcatgtaataataattcgtgaattcttctggagaattttgttgcatgaatgtgatgacagaggagtcatttaacactatgggtgaaatttcctgaagtaaaagttgaatatcttctttttctcctttactgcaaatgatgtattctccgctttttaaggtcataaagcaattattgatggtagtaaatgctgccgtgtttgttcgtttggtattattgtgataagtcttgataatatctttggcggaggaaaaattctttgaccattcttgctttagatgctgatatgcattgaggttttgtgcaaaaagaggaaaatataatagttgcaggaaaattaaaatttttatcttcatatcttgtgagagattatgtttttttcgagttactccaactcccctcccgtgtaaggagaggggagttgtggtgtgggattcgtaattaacgaaaggacttttgacgcaccttatttctgaggtcctttggctattccttcgagatcaatgttgtaattgttttttatatggtttactacgatctcatatcttgagttgacaagaggatatgtttccggagaatatttttcttgaaattcttctttcgtgtaaaatatggctgctcttatgtaggatagatagtctctatacgggtaggcttttgtgtcccaacttgcatttgtatattcggatatactatacggcgagctttctttactaaaatctctggcaagaatgttaataaaacctcgagttaaataataatctggcttgtctttttgactgtttgtaattgcagtggtgtagtcaattccttgtttaaaactatccggttcatttattactttgttttgtaaagccgcttcaaacattagataaagtaatgttgctcttttgatttttaaatcttgtgaattaggatgagcaatttgatcggcagtgaagctaattgcccaataatcaaaaccgtctgtttttaatcctacaaaattgcggtcccccgttcctgttccggtccctgttcctgttccggttcccgttcctgttccggttcctgttcctgttcctgttcccgttccggtcccattgggatcctctcccgggtacaatcctcttaaattatccagcatatatattttggctggtaacactagtttagcaatttccggagttacataattgagaacatgatttttgagaaagtcgacgtaatacggtgtttgttcgtctgttaaatcattcccgtaatataatttgcctgtacccaaggaagtccatttgcgattaagatcttggggggtaatacctttatatagtaagtat

SEQ ID NO: 185 - DNA, 7930 bp, Butyricimonas faecihominis
ctttcataacttatttatttttgtagcaactccaaaattttctctcgtaaactgtttctacggatatttttggcaacaatattaccatctttatccagtaacacgataaatggtatcgcctgaataccaaataacttacgaatttcggatttagaccaaccgttatcatcccgaacactgatccatgggatttgctcctcttcacaagcctttttccatttttctacagaatcatccaatgagatactcataaagcgaactccctgatctttaaattcagcatattgctcccgcaaatttttcatctcttgccgacaaggaccacaccaagaagcccaaaaatcaagaaccatgattccacctttctgagaagccattgaaactttattaccagactcatccgttgccgtgaaatccggacaaggaacacctaatgcagaaacagccaacgcctctgtctgttgtttcaacaaacgcccatagaatgaagcttgaattttgggagtaagcaagtcatacaactcctttcccttctcgtaactttcttctttcacaattcccgaaatataggcagaatacatgttatccggatgttgtttaacaaaattacgggtcaattcaaaacgtttatcatccatttttagtgcttgagtcattttttcatctgctgctttttgatcacccacatccagcaactctttatactcattcatcaattgattaaattctttgtaatatccctcttgggcaagtttgtcatattctgcagctaaattatttgccggggacccttttatatgcttatcacttaacgccgaataagggcaataaatttccatattcgtaccatccataaagaaataagtctgacgtcggttcactttcaatataacttgtctaggttcatccaattctcccttcaactcaaattttcccccctccaaatcagtcttatataaaactattgaactatctcccggagtcatcaagaaaacggtaccatatttcactccctcgatgtttcctttcagactaaattgataacgtgatgattgagaacaacccacgcaacaaattactaaaaaagcaataaataatctcataactcattcattttaattttacccaatcctcaacacttattcttcacccatctctatcatcatctttttcccctcaaaattatccttccatttggcaatcatgtcaacaaagatactattatcattcttctcaacaaccagattcatgatatcaagaattttggtacattgctctaaattactctcttccaagatataattcaccatacttccaagaattaccccatcaaacatcgtttccaaatcaagcacgccattaccagccttttcttttggggaagcttccgattcaacaaacatattttcaaaagcaccaatcatacccgttatatccttaacctgccagtattgccacatttcaatggtttgccgtcttacattagaaaccggaataccagacttccttaaagctgtttgtagggaactacaatccataatgggacctttctcatcttcacgttccttcataatcacttgaaacaaatccatcttacagacattatctattttctccacaattttatcagcctgttcttccgtgaaagaaattttgtcccaattttcaataatatcgacaatggttttcgtattcatgtgagttatatattccacgaaatccgataaatttccaccggagtaacgctcatttaatggtaacaccattaaatactcatccaccacatcattcaatatttcggtctgcccgtcagcctttaacgcctcgatatattcttttaggaacttttggtctcgattacctttatcatactcgactttttgctgttcggttaccctattctgagcccaaacgggttgccctaccatgatacaacacaaaaacacaaaccatacaatttttttcatactagttactatttttgttcgttattatttttgcaaggtcatatcaatcaacgcctcaaaatccttaccgggagtcggagcatagacggaaacaatttttccttctttatcaatcaagaaataacgaggtatccctgtaatattatagtctttctgaaaggtacactctcctttggaagccaacaaatttgtcatacccatcagtttcaaacgaggcaatgcatatttccagctattataagcccctttatcatctattgaaatggtaataaagacaatatcatcacgatccttatattttccagccatttccatatacttgggtagtttagcaatacatcctccacaccaggttgcccacacatcaatcactaaaactttacccttgtaatctgataaagaatgttctttacccctaaaatctttcaatgtaaatgccggagctacatttccttgcttcaagtgttcgtaactcttgtacaatccattaatctcatcctttaatgctccttccggcatatttttatcaaataacggacgaatctcatccaaacctttcgtgtatccgttataacggaaaactgatctcaggcatgacaaataagctaacgacaactccggattattcaattcaagaatctgacggtatctctgataatcatatttattaccaatcgtttccactgtagtattaaaccacatacttccccaagcttgattcacgggagcaccttcggcaacagccttcagtccgaaatagtcctcaatcacatattccaaactagtacaattcacaaactctttcgtcgataaatccactcctttcaatagttttttaatctcggaagattttaattgagcatcttttccttcatcatacagatctgcagcccggcgaattgcctgcgcaccattctcctgttcagcctctacagctgcattatttacttttaggtaacgtgtaatctgatcccgccgagctaagattgctttgatcgctcctttttccggaagttggaactcattccacgcttttatcacgtactcttttgatgattcggcctgttgtgccattccactcaaagacacgaacaacaaaaatataattcctgctattttcataatctattgttgttaattatttctttagcaactgcttctctatgatctccacgtatttctccggagtagcccccatctccacaatcggtttcccattcacgggtataaagaacacagtcggtaaagcaacaatattaaacattccgcacaactctttctctttatcagcatttactttcagaaatatcacttgatctttatacttttcagccattttttccaattccgggatcaaacgcatacaaggaccacaccaagttgcccaaaaatcaatcacaaccggtttgtctcctttaaacacgaattccgaacttttccgataatcatacacatattctaaaaagtattccctagtaatcggattcaatttaccggattccacttttacctcgtcagcacctatcacttcatccttcacctcggctaaatcaaatggctgaaaatacacttttcttttcccgtaatcaatagaaagtaaaccttgtttcaaaatttcattcccgataacagaacgaggtaatgatccattttcagcaacagtaatgtccgaaaaatcacctttcacaaagtggcatgctcctacaactttactttttgctgctatttccgcagacgcatatccttcactaacctttacatttcccccatccttaccatttaacttggcaaaatctgccgcattcaaagtaatcatcccgttattccatgtatccaataacaaagaataagttactccatctagcacaacaggacaaacaatacctgaagccgggatcaaatccatattagaacgatgatccaatttcatataagaggggcgataaggattactcatcgttattttcttccgcttggaatcgattgtcaacacaacattattaaacagagaactaccaaccaccccagcaacacccagcttccgcaaataaggttcatctttcaacacaaatgcagccacctcattcccaaatacactatttccaaaagagatacttccaatcttcacagacttttctaccgaaacttttttatactgaaatgtatcataacgaaaatctccgggaacattgggatctattttcaatttttccacatactccggtaatattgcattatgcccggccaaatctaacacaaaatcagcgattaccccatttacaaccatttctaatacaatctttccatccacctctcggtaatccttcacctccacggaggtgttctttgcttgagcccatgttcccatggtcagtaaacataaactcaataccattattgtttttttcctaatcataatcgtaaatcataaattgtaaatgtccttactctcttctaatctctatcttctttttttgcccatccttcaatacaacaatataccccacattctcttttatggcattcataacactgtcaactgccggttgactcatcggaaattttgttatatccgttccattaatatcaacgacttgatctccaaaattcacaacatctttcatactatcccatacggtagtgatctcaaaacgttcgttagccggtaagatacttacattccaagttttaggagctccacccatatctgcaatttccgaatcaaaggggaaaaaatagaatcgattcctcatatagtcaataacaacttttccgtattgcagtaaatcaaccccaacaagagtcgtcgatttgtcggaaataacgctcccagcattggtgaactttttacctaaaacagtcatctctttcacgttaaccttgttcatatccaccggatgactcaggccttccaatcctacaccattaatcccaaacccatgagccgtcttttctcctttacccgcagcttctatatctttaaaatcattcgccgtcaacaaaagaaatccatcggctcccgtgtcaaacaatacttgtttttcaaccccgcctaaatttacattaatgatagaatgatgtgtatctccaggaaacatctctaccccctccgttatcttcagacgatccgggcgataaggataatttataaccatgatctgttttctcgcatcaaaagtaaccacagactgggcaaaagcatccccacctaagatcccaacagtacctattcccctaaaacttccaataatagggagaaccattgttttcattttactcaacgtgtaattcggactcaattgcacattttctacttctgcaatctgataaagttccttcatatcattgtgatccgatattgatctggatgcacccgtggcaacaccccccatggcttttacatgctcccagtccgttccagtctgtcctccggtatccacaatatacttcaccttcaccccattcacaactaccggtataacaatctttccttggataaactcataatgaatagtatcacaaatccgttttgtcggttgttgctgagcaaatccatgtatgaaagagaacatgaaaataccgcacaaaaaagttttgaattgtattctcaacatatcttattctttttggtaaacgattactttctcaccatctttcgtgagaattgtcaattttgtcttcttcttcgctttcaattctgggatacccgaaataatactctcacaaaaatcatatttaccagtgggctttccattaatctttactactttatccccaacttcaacgacacccttcatagcagaccacacggttgccacaactaaatctccatccttcacttgtagattcacgttgtaatgtttgctagtcatatcaaattcctgctcgtaagcctcaaaataccagcgtctacgagggtaatcgatcgtaactttaccgtattccaataatttcactcctagtaaagtataaggtggagttgctgtttcagctattacctgtttgaatttcgtcggacctactgacaaaagcgggaattctatccgatacgaggtttcagcttccgtcataccccctacgccgatcgatcctccacctacaccttcactcatcacctgaaaagccccgctagaacgcaaattttcgtaatctgtattctttaaagataaaaaactaggacaccctgtatcaaataacacaaccaaactgtttcctgctcctgcctgcaaggttataatcggcataaaaccttttcccgaaaacggcagcatcttacgcaaagaaaccgctgaactcttttcagccgaagttacagttattgtcttcgctttaccgtctatctctacgatcaaatccttaaacaaatcacttccgatcaacccatctgcatgaaagcattcaaaaggagaaggtgttgataatttcatcgccgggactcctgaaaagttaattcgttcatccggagtcatcaagctggaaacaaccactctaggtaacccaacttccttaccattcacatccgttactttcaccgaatccactaccgaaatattcagttcttcacaaagttctccggttaaagccatctgacctcccgtatcaaatataaatgaacgaatctgtccatttatagtcatatccacgatcattttcccccctaccatacgataagggatcacacttttgacttgttgtgccgaaagcggcacaacaatcaaaaataataatagtccaaaaatcaatctcatcctcatattcctttccttatttagcaatcttatctgcagcaactacagcttgataagcattaataataccaccagaaagacataaatctccaaataagaataaatcttgagtcggtttcccatctacaataatacccttttcaacctctgcatcctttctggaagtaactgtctccagtaaaatattccggatttgcgttcctgtcaaatgaggataataagccttaattaaagcagcaacccctactgtcgttgcagccgccaatcctaggccagttccgctctggtaggtatctcccgtgtaagtagaataaatttccatccccggggcatacaaatctacttctttagctccataattagaattcatagagggatttccatttttatcagaagaacaaactaccattaaatttgttaattcttttttacctgtcatccaacggttcgggtaataagtttctactgctaaatcctgtgcaccctcccaggctggagtgacgcaaaacacacctttactctcagcatattccaatgcctcactaatccattttttctgatcttcaggataaagtgtattttggacaggtaacatgataatatctgcttggtgatctaccgcataacggatagccaaagcgatgtctttcaaataaggttctccattagccgcaactctcaacgtcatgatctctgcttgatccatgataccattactacctaagccgttctctcttttagcaacaatgataccggcttccatcgtaccaatagtagcgtcagccgttaacaatacattgtttccatatttattatcattaatatccaagtaattatctccaataatatctttacgaccgtcagatccaaattgtcctacttttctctcatattcggccttagcttgttctatttgtcctccactccttatacctgcataaacagtttcccatttatccgttttataaacaccaaaacccattgcacacatcataaatgctacttctgacaatgaatcacgtggagctttcggatcataacaaataccaaattctgcctccgtcaattcttttcctggaaagcgttctttcatcatttgatcaaacttatctgcataagctttcaacacataggtaagttgccaaccacaataacttcctgccaccggagattccggtaatacctttttaaaaaaataattatactcgtctatat

SEQ ID NO: 186 - DNA, 7885 bp, Butyricimonas faecihominis
acctcggacactcttcgtccgaggttatatctccgcttaaacacgaatttgtaaatcttaaaccaataacttttccgattctttcgatttcaagaatttttccaacaattccacctgtttcaccgagtgtatatccccggaaaaataatcaatcaaccttgccaccaataactccctcgcccctgccattgcctctttcccgtaaaaacccacaaacgacagcaagttcacttgtatccggcatccccgtcgtttcaactcccacacccgttccgtcagatgttttgcgtaaaacgggtaacgctccgggtgtgccaacacgggcgtgtagcccttgtcctgcaggcgaaaaatcacctcctcgaaagccggagacggggccacgaaactatgttccaccagcacctttcctccgtgaaacgaggcgatattcccttgacggatcaaatctatcatgtattcaccgatcttgtactccgccccggcatccgcctcaatttcaattttctccttcaataaacgttctttcagctcgttcagtttttcaagaattatctccggcgtgttcatcggtgatggaaaagaaatatgaggagtaaaagaaaactgtttcacccccagttccagcatctttttcacgatcaccacggaatcctctacccgtttcaccccgtcatccaatcccggtaaaatatgagaatggatgtcatgatcataagaaaaatattgcttgttctttcttttaaaccagtccatgatcgttattttttcttctttttatccttgccatcctgtccgtaaccatagccatacccgtagccataaccatacccgtaaccaccggaacgactgaccttgatcccgttcaccacgatacccaggttcgccaaacgaccacccttctccaggtcggcaacaaccctcagaccttttttatcaagcacgttcgcacgaaccacgtaaacacaagcatccgcgtactcgctcaacgagaatccgtcagccaggatacccagcggcggcgtgtcaaggataatacacgagaactcgctcttcaaacacgccagcaactctcccatccggggactagctatcaactgtgtcgggttcggggggaccgttcctccaaatatcacgtgcaagttatcgtttaccttctcaaccagcatccccggggcatcaaccatcccggccaggtaagccgataatcccttccggccttccctcttgaagtactcgtttaacctcgggttacgcaagtcacaaccgatcacgatcactttctttcccgcccgggcgtaagcactcgctaaatgcgctgcaaccaaagatttcccttcactcggtatcgtcgatgacaccatgatcacgggcgtgtcctttcgcttgatcaggtaattcaaattctcccggatcaactgcatcgactccgacatcatccagtcctcactctctatcgacgttttctcttccggcaattgcggtaaagttcccagtaacggggcgttcaccaccttttcaacttcctccgctcctcgtaccttggtatccagcatatccatgatcaaaattcctcccgttggcaacgcaaaccccagcatcaagccgatcaacatgatcaatgccttacgcggggcgataggcccctctcccgcgtcgggattctcgatgatcttcgccatcggcacgtacattaacttggcgatctccgattcttcccgtttttgcatcaagaaaagaaaaaggttctctttcaactcctgctgccgggcaatcgaacgatattgtttttcttgcgtcggcacggatgtcaacttggcatccacggcctctctttcccgttgtaaactcttgatcttgatatccaaccctttctccacgttggcaatcgccaaccggatattatttttcatgtcccgcaactgcatctccagcccggtaacgatcgggttactttcccgtgccgagagtaataattttcccctccggagaaccatctcgttatacttgctgatcccgctgttcaacgactcgtccgtcagccccagttgctccggcaataaccggaactcctcgccctcccggctatccaggtaatcccggacactcttcaccacgtccaactccgttgccagtttcaacaattccatccccgccgctttcttccgttccatcacgaaagccgcgtccgacgtgatatccgttaactggttctgtttcttgaacatctctgcgtcactctcgatatcccctagttcacgattaatcactttcaaacggtcgttgataaactccaccgtcttggacgacaccagttgcttgtccgtgatcccgttattgttataccctcgtatcagggcgtccagtatgtccttaccccgtgccgggatggcgtctttcacgctcaaccgaacggcactcgtgtttttttccaggatactaacggccagttgcttgtaaaccctatttgttacggtcttgtaagataacaagtccacccggatctcgtctccctccctagccagtgaatcctgtttctcgatcgacacgttgtacgtcccgaaagaaatcacgtccgagaaccctccctcgaaaatcacttcccgatcctcgttacataccttcactccctccccgacaaggctcacgtacaaaaccgtgtccttcacgtgctccggcatgtccaccaaaaccttgatgggcgagtccttgtacaacttcctgtcacgaggaaacctttctcgtgtataatcgacattcaactccagttcccgtacaacttcttgcaccagatttttggatttcaactccacgatctcgttctccaccgccatgtttccctgaaacaatcccagctccttcatcatcgggtttaccccgatctccccttttttggtatcactgatcatgaccttcgtttccacctggtacacgggagttgaacttaaacaaatataaaaagcgatcattacacagagagacacgctgataacaaaccaccaccagtgagccagtaatttgaggaagaaagcccgtaaatcaaaatactctccttcacccgatggtgaaaactctctattcatgttattctcgttattcatcgttctttcctcgtttaattatcttgtaattaatgatatcacggcgatcaaggtcgacaagcttgacaacacgtaaggaaggaatgtcccggcatttcccccggcaatccgtcccttgttcggctccacgtaaaccacgtcattttgctgcaagtaaaagaaaggagtgtttatgtaatcactcgaagtcaagtccacccgggcaaataccttctcgttcccttgctctcgcatgatcaacacgttcttccgcttcccgttgatttgcaagtctcccgccatgcctaacgcgtcaagaagtgacacgcgttcgctggacacttgataacaccccgggttcttcacttcccccagtactgtcaccttgaaattttgaaactgaatcgtcacgatcgggttcttcaagtaaagcgataatttttccttcaacatctcggatagttcgttacgggatatcccttccactttcaactttccaagcacgggaaaatcgatctcccccgctttgtcaacgaggtaaccccgtgggatctgttgagatgacgaggtaacttgatttccaagcccgatcatcggggtgttgaacgggagggcggattccaagtcatcacatgacaccacgatcgacaacaggtcatccgggtggatcaccgtcttgtactctatctctgttttcacccgcctgttcacgtccgcatcttgcaggtaaactacctttttactagaaccacaagaagacaatataatcaatccctctaaaaacaaaataactttatcccaatatcgcatttttctcaaaataaaaattaattacttgattcatataacgtatcattttcaatattttcttcccatccgaataataacctgtcctactctttctatatcttcgttcgtcaacgtcggtcctgacggtaaacacaacccaatctcgaacagccgttcactcgtcccgttcccgtaaaacggggcatccttgaacaccggttgcaagtgcatcggtttccacaaaggccgactctctatattatccgcatccaaagccaacctcacgttctctctcgtgaaacctgccactcccggctccaccgtgatacacgtcaaccagtaattcgaatcaaaatcacccccttccggctggcacatcaccttcacacccttcaccccatccagcaacttcacatacaaatcgtgaatttcccgccgccgggcaacgtgatcttccaacacgaacatttgcccccgaccgatcccggcacaaatattactcatccggtaattatacccgatcttctcgtgctggtaatgtggagcctgctccctcgcctgcgtggcataaaacaaagctcgtttagcccgttcttcgctcgggcaaaccaacgccccgccaccggaagtcgtgataatcttgttcccgttgaatgataacgccccgaactctccgaacgtcccgcacttctgccccttgtactccgaacctaacgcctctgccgaatcctccaacacgggaatatcataacgcttggcaacttctaaaatctcatccaactttccgggcataccatacaaatgtaccggaataataaccttcggtaatcgtccggtcttctccaaacgatccttgatcgcctcttccagcaacaccggatccatgttccaagtatccttttcactatccacgaatactggcgttgccctctgataagcaatcgggtttgccgatgcagaaaacgtgaaactctggcaaatcacctcgtccccctcaccaacacctaaaagtatcaaccccaaatgtaatgcagctgtccccgcacttaacgccaccacctgtttctccccattttcaattaaaaagtctcgtagggctttttcaaaagcattcacatttggccctaatggtactacccagttggtgtcaaatgcttcctgtataaattcttgttcccgcccacccatgtgagcgagagacaaccaaattcgatctttcataatgcacaattttacgtaatttccgttccaattcttttgttgaaacactactctatatctaccgccatcccatgtgatataaattcaaataagaataggcataaacattcagatcaattcatcattatatctcattctcttccccaacaccgtacatataatcatctgaagatctttcagaaaagaaggatgacgataataataaagatttatcctcaccttatctggaaatatcacctcatcattatacttttccggatcagaaaccccagcaagaattgtttcctcgttacgatatttcaatgatgcgggccccgtgattcctggccgagatttcaatatcagcatatcatcacctttcaaattatcagcatatccaggcacatctggacgaggtccaacaaaactcatatccccaacgaatacattccacaattcaggcaactcatcaaacttgtatttccgaagaaatgcacctaagggtgttatccgactttctccagccacagacacagacgatccaccatgccccactttcatacttcgaaacttgtacatcgtaaacactagtccatttagtcccacacgcttctgcttgaacaacgctgggccatcaggcattttcactcgaatcatcccccacaccacaagcaacacaggccaaagacataacaaaccaataagggccattatgcggtcaaaaataaatttaaccattctagatactattttaaaaaaggtaacttgaaaataccaataagagatccccatccataagacagatgtaacgtaataaaacaagctaaaaggtaaatgaaattcaacttttcacgaaaagctatcaaaaaactaacccagccaaatatcatcaagtataagcttgcagatagaacgctaagccataccaatgaactccaccacaaactacctacgagaggcaaaagtaacgacaacaaaaaaaataatggtacaaaatggcgaacagacagtgagtcgaattgccttgtataaaaaactgtcaaaatattccatttaccattcccataattatttttagcaagagcttcaaatgtttcccttgccaaatacgtacaatatgtatctggaactatataaatttttcctcctccccgaataatccgtttattcagttctatatcttgattccgaaccaatcttgtatcataatacccatatttatcaaacacctcccgtcgccaacaaccaaaaggcactgtatccacctccattatcctgtcaattcccgttcgaaatacagaattaccgaccccaaacttattactcaagacttctcgtatagcaagagtttttacattcttgttcaacacattagttctacaaaccgcgccaacattatctgcttgtaattgcccaagttgcttaacaagtactgaaaaataattttttgcatataacgtatgcgcatcaatcctaacaataacctcacctctagattccacaattcctttattcatagcacaaggaactattttttcaggattatcaagcactcgcaaaaaagaatacttcagcaagtaagtttcaataatttctcgagtccgatccgtactcatcccgtccacaaacaaaacttccatgtcatttcgtggataatcttgttgtaaaatagactcaatacatgaaacaatatacttttcctcgttgtatacaggacaaataacagaaagcataattaataaataatttgacacatcagaactctgacaataacaaaaacgaccttacaaaaaggctacaaaagcctttattcgctattacccttcaatcagataatacgctaaaatatcggaattcatgaagcctaaaatttcattatatcacatactataatttaaatcaaccatcccacccattttcaatagaaactccggtgtataaaagtccatcatacctccaagagacgtaaaagttatttctccaaaataaattttcccattcacattatataaatccaatcgaacttcaggaaatggttttgcaagacattccgccactgtcagcatttcgtttaaattttgaggtttaaccattactttaccctcacgataacgagagtcaaacacacagacttccggcattggcttccagtctaaatcatatgtcataacttctgtcccattgttatctctatcactacacgtccaaatacaatatggtttaccgttgaaacaccatatcttataatctacaagagatttaccacctttttccaacggtaataattcctctgcaataacacatggtgtcatttttttatattgaggttctgctgctaatgctccgatattttttttaccaagccaagtcttaatgatatgtctcaattcatcttctttccaatcaaacttatttttcacgaccaaattagaacctttcccatctccattattagctttaagtataaatgaatccggtaaatcttttagatgaaaatcatcaacacaaaaccaaacaccatataatttgaccaaatagttttctaatccacatttctcgacatatcctcttactctatacttatcggcacaaacagaccatcgagatgtatcagtaaacaattttagatataatatcttctcatttaaatcccttggatttttcaaattaacacacttatgaaaacgaaaaaaataacgaattttaataagcgtaacaggaaaatgaacacccatccactccgtaagtttaattaatggagcaaaaagaattcttgtactccttttagtagtaatatgcattttgttattttaatc

SEQ ID NO: 187 - DNA, 7875 bp, Butyricimonas faecihominis
ataaagaacagataaattccaaataatacccgttactttatgctcattcgaaactcaaacgttgttcatccataacgggatgtttaagctctgaatgatccacgagaaaaaggtagtttttccactatatctccacctttcttcttcgagttctcactagaaacgatcagtaatgtaataattattgtaactgattaacaaatagattcaactttctcgtgaatattagaaattcattcactttattcattcataacgtattaacattcattttatacacactggatactcatttccattataatctctcccaagttgagtctatatatccaaatgtcgcaaaaagggatcatcgagttacagtggagccacaccgtacctcccggtcgctaaaagatctgtattcgagtatccacggtaatcgtgatattaacaattgagcggaaggaacgaaattccttccgctctcaaaaatcgccacaaactaatacatctaatttgtacttcccacaagtataattaaacttatttaacgtctttccctgtaccggacgtcttttatccgagcgaaaccggaatattccactcgttttgttatcgaattattagctccatccactttataaaaccctaactttccaccatccacaccgctaacacgattatcataagtacccaccatcaactcatactgacgagccataaattcttcagtgggttcaggccaccaatagttattatgatacaaattaaacttcaacatggtcacttcctcattggcactcaatccgatatttgtcatttcataagttatattagtacccaaattatgcaagtacaccttgttttccacaccatagaacatataagggaactgtgaatggaatgcaaacactgtcgctttatcaaaatcgggagcgttcaaattttcgtatatactctcttgcacgaaacccgctccgctcatgttaatcccatatataacccgtttcccggaagcgttttgcaatatggcatataccaaaccattcgagtagctagtcccctccatataaactaaatccattccggttttaaaatcaaacaattttccgacttccggattaggaacaggtgtcaatatctggtttatgtcattggttgtaggactcttgaaactccaacccacaaaacgtttattatctatatcatagaacagggccgcagtactgttccccgggtagcgaaccatacttataccaacgtacggggctacacgatattccggggactttccacgaacagaagtattaattggcatctcaaaagccgcccccgcagccgttaccaaagcatagacattccctttatttgaaacggcaaaaatagcacgtgccgtaggagggcccatgtttgccaagggcatgtattctataatattttcatccggatcacttggtgccacgataaaatctgtcgtgtaaatgttatacatatcacttgtctcgaaagtattttggtcaagtttgtaagtgccttcttccgacattagataaataacatctcccgtttgaacaggggccggatagaatccaatctttgtggctttcttcaaatcgggaagtcccaacaaagacaacaaatcataagcgggctcaatccgatctgccgaaatcacggaaatcatatccatccgcacacgcttttcttcaccctcgttacacaatactaaccaaccttcatacgtagaggaagtcactttcacatcaaaagttgtagaatactcgatagaagaacgcttatcttttaccgcaaaccacacgacataatttcccgacgggattgaaattaacgtatccaatttcaacgatttagatggattcaaatctacccatgcctcatcatacaattgacttcccccctttttctccaacttataagaaaactcaaaattaggatttccatccttaatctctccttccaatgaagaagtcaccttcggttgggcaacaatatgctctataccaccaagaatttcaagtgtctcaggcaaattctcaattttaatctctgccatctcgcgataatcataattccccttgtcgtcataacatgacatcaaaaagaaaatgaacgagagtaatattatatttttcattttcatattgacaattttttaaacaattattgataatcagaataatccacctcataattcggagccaattgcatatacttttcatccgaatcttttacaggatttcccgcatcagcctgctcctgcaaataaattcgcacggttcgagcgaagaagggaagtcgtgctgactgtactttatacccgtacatgttagcattttgccaatcccttggggttaatccacacacttgattcaccacctgatactttttgggtgtccattctccaaaataatcttgttccgcataatttttccaaaaattgggctgcgtgtacatttcattaaacgtgaaaacataacgaataccactgatttgttctccctttgccgtgtaaagattcgtgtttttataggttttcagataacatttaaaatgttcattctcttgcaaacgaagcactattttcaacgatttctccagtagagtctccgtgcgtaggagacgaaccgggactaccgcattactggttccagccttgataaccagcgagtctaattctatctcgaaatctatcccttcaatagctgtcgattcttccatatcaacgacaaccttaaacggccgatcataatctaccactttccccatggtcaaaacaggagcatttagtacatggctcgtgtaataagcatacatcccggcaaaagaaaaatcggttgaatcactataatattccgtcgtactgccataaacggtactcgtcaatctctgaaaataaattcccgcatcattactcgcaaatactggaatctcttctttatcacaactccacaaaaagggaaatgacattaccgcaaataataaaattttcaatttcataactctttctcttttaacgattttcaatctctcccgttggtaacggaattgtatattcaagatagtttgctccattataattatatcccgcctcatcaatccacaaataatccgtgtttaacctcttgtgcaaaaagaaggtttgtccttctccccagaattcacgagcatactcgttattcaatttcattctcaaatctctttcactattcacagtcaaagaaggtaaaccgcgtttagctcgtatttggcttaaccattcatatccatctgccaattccggctcacattccgccgcaatgtagtacacctcactcaaacgaatcaatggcatcaacacggcgtgaaaatattctaaattctcgtccggtttatcaggatttttctcatccttaggcttatcaatctttttatactttataaagatatctccttgtacacccacactagtcgctgccctccaatgtgtttgataacgataatcctgactctcgtttccaaaaagactactcaatacgaaattggctttaggttgcaagaaattgtttccggcagtttcgtcatcaaaataatacgtgtaaatatcagctctagctttatcatagaatcccatcaacacttcagtagagaaaacccgatccggagttctctggttagccaacaatttattcggatctaccgcaggaaaatgtttcgccacattctcatctgtcaacaactggtgcgcagcctttaatgcattcactttatccccagcgtataaatacgccctagcttttaacgccaaaacagcataataattaaaacgcaattgacgataacgcaaatatacctcttgatcatcttctaaagaagccatagctccttgttctatcacgggatcatttccttcaagtaattgttccgcagcatgaatatcccgcaacacacgtcccatgaccgtatcggctgataatattggcaacgccgaaactttatccgattcattatatggaattgcttctgcagatggttctttcacatacacaggtccaaacaaacgtaacatatccaaatgcaagaaagcacgcaaggccaaagcctctcctgttagtactttcttctcctgctcgtttaacacaccggtgctaacctccaagtttttaagcaacacattacaatttaagattgtggaataagctgacgaccaaatattcgataaattagcctcaacagtctcatccgtgtactccggcttcactaaggctgtataatatttattcacggataacggcgtataacgaaaagcgagaatatctatcatctcgtaagtaagattcttgccatacagtgatgaagaggctaatttattataaatcccgttcacggcagtgtagaaaccgccacgtgtggcaaaaagttgctcctctgattgtttatccttaggctgcacgtccaaaaagtcagaacacccgctccccagaaacaacaatagactcaaatatatgataacatgtaatttcataccacttgttttttaaaaattaaacgataatccggcttctaaactccgagcaaaaggataggaaatacctctctccgacttaatagaagatgctctaaatacatcacgcatagaaacctgcactttcagattactcaaacctaacttctgaatccaaccatcataaaactcgtaaccaagatagacagactccaacgtcaacacgttctcctcttgcacaaatcgagaagacatgggagtggatgccgcattagcaatatccttaaaacgtacaagatcacccggttctttccaacgctcgtaaagcgctcgtttatcttgatttttagtcaaccctccggtagagatattctctactttattgaataaagcttcattaaacacatccgcacccaattgataacgaaaattcaaactaaatgacaatcctttccaattcaaagaagtcccaaaaaccccttctattttcggacgagtattaccacaaatcacttcattatcatacgaaaaatcatacgtgtaattcccatttttatcgtagtataactctttaccgttagccggatctattccctcggattttacagcccaaatatcatccggatctgccccgtcataatatcgaaccgtgttagctcccttgccactcgcgttcaacaacgacaatttgtccccaatcttgtcaattcgatttttctgcgtacgtaagttagcacgtaccatccatgaaaaacgtttatcgaaattctgaatgatataataagaagctgtagccgtcacaccttgagaggtctgttctccggcattcgtcatataggttggtgttcctgaagatagtggcatccctattcgtatcagaagcgggtccgtcactttatgaaaataatcaaccgtaatatttaaacgcttattcaacaaagtaatgtcaatacccatatttttatctaacgtcgtttgccatttcaaatcagaattaccaacttgatccaaaacagctcctaaaccgaaataattcattgaaccatattgaaaagcataagtcaacaacgtttgagctgaatcgtaattttgatttccaggattaccaatagaaactctcaatttcaacaaattaatccaactaaagttattctggataaatttctctttgtgcaaattccatcctaaaccgacagaccaagttgtgttgtattttttagatgacccaaacacggaagatccactactacgcaaactaaaatccatcaaataacgatcattaaatgaataccccatgttaaaataaccattcaaagagcgagagacactctcgtaaaacgtgggaattccgttttccggatacccgttcgaaaaagaaggataagtaaaatctccattaggaaaaccttgtgccgaatatccttgcaccaaggacttactcatattgaaatttcccccggcaaccaaattgatccgatgtactcctaacattttagcccatgttacactaagttccccttctgtttggttcaaccgggtattagttgaagtatattcacccttcttcaatgcttccgtatcttcgaaacgcgtatcctctggggaataaaatacctccgcatcattattcccgtaggttatacccaaacgggcacgtatacgccattctaccgaggggaaatattctgccacgaaataattgcttaatgaaacgttcttcccttcattgcgactattcagattagcattccataacggattaaatgcttcgaaataatcatttttctccaaccatttttcgacaatcccgtctttattccgtttcttgaaataaggatttgcttccgcataaacttgaaaaggtacaacaggattctctatatctgtcacgttaatcgaaaacttgttagaaaattgaaacttttccatccgatagattaaatcgatattgccactgatgatttcacgcaaagactctttcatcacccctgagattccgttataccccacacccaagccaaaaagaaaacgcccttcaccaccttgcacgtataaagagtgtttttgatttactcccgtacgtaatggttctgccaaccaataagtgtttaccccactctccacagcttctaatttcccgttatacaattcattcaattcaatctctttttctgcactccaattcgccggagaatatcctcccgccaatctctcgaattccaatttttctctcgcattcatcaaattataactactcaaatccggcattgaaagattgagattcccgttataactcacctgaagttctcccgatttaggtttcacggtttctaccaccacaaccccgttagcagctttcgatccatagatagcggttgaagccgcatcctttaatatcgtaatagactctatacgattaatatccaaatcattaattacagctaatgacgattcgaacccgtctaaaataaacaagggttgattagggtcggcatccaactcgtcacgcagtcctaacacgcttgacttccctcgaatctccatgttcggcaagcgattaggatccgaaccgaattgattatcttccaagatcgcaaaagccggatcaagcgttttcaaactctgtaaaatattttgggaacccatcgttttcaactctgcagcagtataagtagaagccgatcccgtaaaactttcctttttacgagtaaagataccagtgaccacaacatcttctaacgccactttctcttcttgcatcgtaatttttaactcttgatgatattcaccaactttaaacttaggaattgctacatgttgagtttccattccgataaaagaaaatactaaaaccaccgaatccttgggaagtactaacgaaaactcaccattagcatccgtggccactcctatcgtcgttcccttaatcaagatagcaacccccggtaaaacttccccactttggtctatcactttccccgtaattttaaattcctgctttttatccggagatttactttgcacttttatcaaaatgattcctccttcaagcaaatcccatgaaaatcctctatccaaaagcaacttatccaacaccttatctacaggttcatccttcacgttcacgctcatttttcccagatccctacattgttcttcattatacacgaaatcatatttcgtttgacgtttgatctcccgaaacacttgttctgcagatacatccttcaggttcaaggataccttttcctgtgccgctaccccaatggcagccacttgtaacacactgacaagaatcaatacgatattccatctcataaccctcaaaatttttctattccgatatttcggaaaaagaagtaaataccacttttttttcataactttgaatt

SEQ ID NO: 188 - DNA, 7854 bp, Butyricimonas faecihominis
atactttttgggttaacgtgaaaaattaggggctaacgtgagccaataccatctaacaaataaaactcctatggtatttagtattaggtcaaaaatctttttaaaagctgctcctcttttatatgatattctttagttctctctaataatggatcatactcaatcgaaaataaccaatattttccaaataactgccccctttttctcatcttcaattttaagtcctcgatttttcatcaggacaacatgaccttcaaggcataatatacttcagagataaaaaacgacctgccaatttaggcattgttttacaacaactaggcccggcaggttctacattacaagtgtactacaattttacttacaatcaaaatgcttagtaaaaaaaataattcaaccacgaaattcaagctcacctaaaaaattagatcaaccttctattcttcaatatgccaatttttatccccttctcaagcataaataatggtatcaagagcatcatacaattagaaaaatcattctgtccattcacaaattcaaagttatttcacctaatttcttgtttttatccagaaataatcctaccttgtgaatacgtttgttataaatggggattttccctacatgtcttattttttaattttatcactatgaaaagactattatttcttagtttattcgtgtgtgcaatcacgtgtttcgcattcacgaatgcagcagctccagaagttcaacgaacaatcagcggaacggtttatgacctatcgtcacatcaaccgttagaaggaatctacatccagcaaatcaacggaacttcatctagttcaacaaaaacggatgtttccggtcatttctccattaccgtgaaaaattcaagtcaaacagcaactctcaaattctcagacccagattatggggattactctacccgaacagaagactttgacttaagtaaagacaacacgaacgtgtctgtctacatgcaataaacaactattgcaagatacaaaaaactggaaaggataccctagcgtatccttttcatatatgtacaaaagagagtagccgggaagtacgtttgttatatatgcttacttattcaaaatcactatgattttacaagaaaacatagcccgactactctatacacaaagataattcacactcttgaaaagagcaactttatccaatcactttcatgtgcaaaataaacaaaagtatcccaaattcacaacacaaaagcatctatattgaagtcacctcacgatcacgatgaaaattgaatcaaggtcacaaaaatgtccctcgttagaaattcgcatatctatcacgtaacgtccgacaggaaccgtgtgattccaaggtaattctactcgtccacgcccaaacattcgaaattgtgcaacagcttcggggtgttcactccggacattccgaatcgtgtacttcaccgggtttgttccctccactccctccatctccccggattgccaaggtattttaaatttgatctgataagcatcatcatccgggtcaagcccggctttcacgatcatggaatccggcgcataagcagcatgacgaatatctagaaaacccaccgttctatcttgacatcccgtctgtaacatcccgattaaaagcaaacaattcgctatccaatacattcttttcatatcttcaaattattacaattcagtaaattcatacgtgtaactcaacgaatgtaccacgccattcgtcatttcaatatccgcagaggcaaccatagcaatatgaccactcaagacagcatggaagaacaagctttccggaccaatatccggtatcccgttatacggggttagtgtcctatacacccttaattcgacacccccgattgttgtcaccatcgtacctcctgtaagcgttcctttcacctcgtaatcaaaatcctctttcatcatccgcctatccagtacatgtgccaacaacatctcccgacataactccgcaggcacctccttcacggaagagtaaaccatttctcctgcctcgtccgttgttttaaacaaaaattgattgatcgacaaattcgtgggagcaaaaaaagtaatctgctgaaaccctggattcgtcccgtcaaaaacatccttcaatcccgcatgttcaatcatcacgatcaccgaatcccagttataatgatccgtttgtaggtattcccacaccgtgcaatcatgtttaccatcagctaaacctgaatcatgataaaagtcgttatcacatcccgtgaaaaccacccacaacaccaaaaaaacataaaatattttcatcatttacatgttatcaagttactaaaaagaaaatccgttacgtttccaataagaagtctgcctcatcagtgtattatcctcaaaagcctgccgtgccacgggataatacaatgccccgtctgccacatcttgttccgtcaatgttttgaagtttccccgcaatttctcccggaaagtcccgttacgcatgatgtcaaaataacgcgtggaaattccctcgcaaaagagttcccgatcacgttcatctgcaataacatcttgtaaatccccgtctgcgagtgaataatcccgcaccccggcccggttacgaacccggttcaagtcccggatggcaccatccgtgtcaccagtcttggctttcagctcggctctcaacaagatcatatccgccaaccggataataatctcgttatcctcgaaagatttcagttgtccaatctcgctaccactcgtgtaaagcaatatatgccgtaattttcgcacgtagacagccccctgcgtgatcgaagttgacacgccagccatactgtcgagcttgtaaaaatactcctcccgacgctggtctgacttgtccggatacatcttatagacggttgtattatcaaggcgtaacccacgtcttttcgtggccggagttctattaggcatgatcggccatgattggcaaaacgctgctagataagaacctcctgactttaaatcatcctccgtgttccggtaatcaatctcaaatatcccttcctcgctattccccagcatcacccgctcgcacacgtcctttatgcttcccactaaagcataggaaccgctatctatcactgaatcacaggctgcaatcgccagcttattcaactccggctcgttattcaaagccgccttccatgcatacacttgagccatgattgcaaacgccgttccccgggaaggcacttgcttactatctatcattctcccctcgctatcccgcaaatcgttcacacgaggaagatacccaaccgccaacttcaaatcatcgataatcgcatccgcaatatcctgccacgccatccgacctctctccccgacatcctccgcgtgtataatgtaaggggcatccccccaattacggataatgtaaaaatagctccatgccctgattgtcaacacctgcccgagataaaaattgtaacgttcttgcggcatatttgcccgtccaatattatccgcaatcgtgttagcctcggccactaactcgtactcgtagccccagtaagtgttcgggtcatccggcgtgaacctactcaagtcattattcgaaatgttcgcccagctcccaaggttatcaaaaggtaaccctcgatcccggtaatgtacgtccacccggccgatcacccaacgaaaccaacgatgcatcccgtacacggcactttccacgtctttctcgttttgccaaaaattattattagttaccaacgtctccggttcctccgtcaggaaatcgtcgaaacaagaaacagacaacacaaccatcaaaaaaagatatattacttttttcatattatcacaagttaatcgttaaacctatcgtcacccgtcgggcaagcgggtaattacccaaattatcaacccccgtcaccacgtccacgctttcagggtcagcccctttataattagtgatagtgaacaagttctcggctgaaacaaacacccttgccccgaaatgaagtttctttcttaccgcctctggcaaagaataccccaacgtgatcgttttcaacttgataaaactcacattctgcacgttcgcgtaaatattcgtgctaaaattatataatcctgcctctagcctgttcttcgggtaatcagtacgatctcccggtttctgccaaaaagtaacctttcccaaatcctcgaacacgggtttcgtgatatcctccacgatcattcccgccacggtccccaccgaggcaccccgtccggcattcagaatatgacgtcccaacacgtaattaaacaacatattcaagtcaaatcccatccattccaaagatgtcgtgattcccccactagccaatggcaagggagcccccacgtactcacgatcctcttccgtcgaatttgcctctatccggccattcccgtccgcatccacgataacccgatctcccggcctgtaaaactgtgttttaagtgttctcaatggggtgtatttcccgtcaatataataacaaggcacttcatccatcgaattataatatcccgctgtcctgaaagcgtaaatcccgttcagcggtttcccgatcacgttcatgttattcaaacccgcgttagacgaaaaatctttcccatcctgactctttttcaacctgttccagtttcgggcaatattaaaggtcatatcccatttcacctcccgttcttgcgtaatatcccatttcaccatgacttccacgccttcattcaaaatcccgtaagcattctgccattgagccgagtacccgttatgcgtgcccggtaaacgtacaggataaagcaatttatcggtataacggcgataataatccaccaccacaccaagacgataattcaacaagtccatatccatcccaacatcccactggcgggtttcttcccatgtcagttcccggtttatcaacccgaaacctagttccggctccactgtcggattacccagaaacggcttgctcgccccaagcaccccgtacgccacgtacggttggtcaaactgcctgcccgatttcccgaaactcacccgtattttcccgtaatccagtacccttttagcccatgccatgaacgactcttccgagaaagcataaccaatcgcatacgatgggaaagttccccagcgaactttttccccgaattttgaactggcatcccttcgcaaagttatcgacacgagatatttctgcaagtaattgtaattcacccgaccgaacacaccgaccatcgtactcttctccttgtcggaagtaaaatccttcagggaacggttatctttcgtgtcgtacacgttcccttcccaactcacgtagtgaatcaagttagaaggagcccctcgtccccagccggaattcagatacatctcgtccgtttggaacgagagtccggctagcacgtccacggtatgcgcctcggcaaaggtgtgcttataggtcaacaaattctcgttcaacaacatcaagttacgagagatttgaccacttgagtaagtttccttgtattcatcgacttccgagggcatgaacaattgctggttttgctgggaataatccgcggacaacgacgatttgaaagtcaagcctttcacgaactcgtaactcacgtcgaaagccacccgcaaacgatacgattcattcttctctttaattgtttcaaagcgtttgaccagctcgtcgaaagcggcatttcccggtcccggcagcacggttgacgtgttcagcaactcctccggcacctgttccagttccgttcccgacgtgaacccgtacctgtttatctcccgtgatgatcttttacgttccgcacgggcaagataaaaacgcatattagtttctaatttggggaatggcatcatgcagaaatttcccaaaattttcaccctcccgaatcccgtgtttctcaacacacccgattcgtcataatacccgattcccacgttatacgtgatcccggcatttcccccgctcaactgcaaactggcatccgtcacccttgctgtgcgaaaataataatcaaacaagttcgttgaattattatagaatttattcaagctgtcttgataaggagcaacattcgccccgtcacccatattccagaagtaatcatactgtaagcgattcaagtaagaatccttgtaccccgccacgtactcgtacgtgttcgtctccccgttataggccgcttgctggtaatcacgcaaagcctccaggcggtgcaggcgttcccggtgtcctccagtgatgtcaggtaacgccgggtcaaaaatgaaagtcctcgatacattcacgctcaccttggctcgctggttcaagcgtccctttttcgtcgtcacgagaatcaccccgttggccgcccgtgaaccgtagatagcggcagaggcagcgtctttcaacacttgcacgctttcaatatcattcgggtcaatctctgccagcgtgttcgttcccgtcacgggagaggtgaacgataacatgggcaccccgtctatcacccacaagggttccgatccccgtcgagatgattctatcgacaagctgttaaaccctcgtataatcacggaaactccgccgccgccgggagcccccgtcgtgttcagcacgttcatacctgccacccgtccttgtaacaagttagccagcgagggagagggaatatcctcaaggtcctccccctttaccgtggacatggcccccacgacctctcgcttgttctgcgtgccgtaggcaaccacggtcacctcatccagagccgcaactttttctttcaacatcacgagtaaaggggccgtttccccgttgtatctcacccgtgccgtttcgtaaccgataaacgaaaaaacaagcacgccttccctctccggcaacaagagaacgaacgtcccgtcctgtcccgtcacgctccccaccgtggtactatccaatcggatcgttaccccgggcaaaggttcacctttccgatcgaccacttttccttttacccggtaacctccgtcccggagtgcgtttccccctcccgcacttaccagtaaaggataaccagcaagcaagatcatgacgaaacggataatcacgatcacggttaattttctcgattgtaactttcgtttaaaagctttcctgtcagaagtttttttcataactttgatcattagttaatttatataattgattaatacaagggggtgatattcaaaggttcctagtcagcgaatatccccctgttttattttttctcctgtccctttcgttgaaaaatttcctctcttgttatttctttccctatatccttttgataataaatactagcaattcgctccaattcatctaattgcccggcactatataataaataatcagcaatcatgctttttgatttcataatttgctgtacgaaacgaatgtagttgtacaagcgtgcgctcatgtagtgtttctttttctttgccccttctttttcaacgaaatagaacccgaacacttcacaaacgtctaaacaatgcgtgttcaaattacattgataaagatgaaacaataggtcgtgtatacttttgtgtagcttgtacaacatgcgtaacctgttatactcttgttgttctagctcttctgatagattgagaaatagagttccagttaggaagaatcttttcagatcttcatcgggaataaattcttggggttctttcattttgtttgtttctagtttaatcattaatctggtaaatcacttttattttctctatcatatatgatagataattaatcgttttatatcctttcctttgtttttatcatttatgatagaataaaatggacgatag

SEQ ID NO: 189 - DNA, 7833 bp, Butyricimonas faecihominis
cataggaagcatttttatattgtttcagttaaatatttaacacattcgcattgatttgtcaaatttatatcatttggggcaataaatgaaatattttcaacataaaaacggaaataattctttattgagaatcattttacgtagtcgaaaataaatatctgtcaccgcctctgaatttgcggtattaaattataaaattttaagataaaaaccaacggcttggtcgaaaaaaatatgattatttctctgagaatcaattttaaagagagcgtgaagggactaattgggtttattgttcccttgctgtctgtattcgcttggagagcaacctacgaatcttttaaacaggcagaaaaatgtttgggtattgggaaagcctaaggcgagagcaatttctgaaattgttttattcgagcttgttacgaggtattttgccatgtctatttttttcagacgcacgtattcccggagtgtttttccggtttctacccgtacgagatcgttgagataggcaagagattggggaatgcggtcatggacgtactcgatcgagcgtaattcggtttttgtcgcgtattctgcctgtagatattgttccaaaagttgattgaaatacgccaaaatatcattatttatattgcaacgggtgatgaattggcgttcgtaaaatcgcaggcagtaatctaggagtaattcaagatgcacggctaacaaccggaggctgaatcggtcgatgtctcgttgcaattctttttgaaaattgctcatgcatactaatacgatctgtttttctcgttcggataaatgaagggattcgttttcttggtaggaaaagaacgagtattcggatttcttacagacgagtgaagtttcgttgaaaactttggggtggaatgcgatgcctaaaatgctggtctgttccggagcgtcatgttgggtgatgtcaatagtttgtccgggtgctttgaatactaacgtgcaggattggaaatcatgacacctgcgcccgtatctgaaatctccacattgtacttgtttgaagtatagagcgtagaaatcgccggaaatagagagttgaccgaggcgtgtggcttcggctaggtcaataacgcttaggagcgggtgtaatgtcttttgcccgattagcgtgtttagctgacagatggtctctattttttgcgtgtggttagccatgatgatatgattcgtaaagtcggtaaaattctgcttgtcgctagataaactcctccggccttcggccacctcctctataaacagaggaggagctggtaactcttcccgaagacggtgagtattccaactcaccctctgtttatagagggaaatcggcgagtaagcgagaacagatagagagtttactcgttgtctgtcgagcgagagccgattcgagactgtttgcaggctcaataccccgaaggggggagggagtttaaaatgattctttattttatcacatcaatctctttcaaccatttttctacttgcgggcgggctgaacttgctgatccgccactggtgatgaatccttttttattcgtggccttacttgtgtttttcacgaaatctttagagcaactttgttcgccacctccaccgtgcgtgcagaaggggatcacgattttaccttctagcttatagctctctaggaatgtcaagatcggcatgggcattgttccccaccagttcgggaagccgataaagataatatcatactcttccatgttcttcactttctcttttaattcggggcgggcgttgtcatttttttcttttttggctgcttccgtgcaagcgtgataatctgccgggtacggttttgctgtctggatttcgaataaatctccgcctgtcagctctttgatatgattcgctatcgctttggtgtttccgctacgtgaaaaataagcgaccagtactttctttccgttagaagtcttttgtgcttttacattcatgctagatgttgccataactgttgcaattattaaaaaatacattgttttcattctgatatattataaagttgtccatttattttgtgatacaaaaatatagggtgtggcggggattgtgtgtagataaattacagatatgtgtaccatttttactgatttcaactagttggtagagaaacttaaacaagaattgttatttttgtttcaaacaaagccttgaaaattatgggtgaaatattgaaaatgaatacgattcatgattatcatgaatttttaggggtaaagactttgcatcctttggtaagcgtgatcgacctgtcggaagtacctccgcttcgtatggctcgcaaaaatttgggtttttacacggtctttttgaaagatgttaagtgtggggatcttcgttatggacgcaaaatgtacgattatcaagaaggtactttagtttttatcggtcccggacaaatcgtgggggatgacgataacgggacaagggtacaggcgaaaggatgggcgttgcttttccatcccgatttattattggggacatctttggggcgcaagatgaaggactattcttttttctcttatgaggcgaacgaggctcttcatatgtctgaccgggaacgagagatcgtgattaattgttttcaagagatccgggaggagttggaatacgctatcgataaacatagtcgatccatcattaccgctaatattgaagtgtttttgaatcattgtgttcgcttttacgatcggcaatttatcactcgtaaggatgtgaataaggatattcttacccggtttgaagatttgttgaacggttatttcgagtcggatgccccggtttcttacggattgccttctgttgctttttgtgctgataaacttaatctttctgcgaattatttcggagatctgataaagaaggaaacggggaaatcggctcaggagtatattcagtttaccattattgataaggtcaaggaacgttttgccgattcgtccaagtccgtgagtgagattgcttacgagatgggcttcaaataccctcatcatttgagccgcttgtttaagaaaatggaggggtgttctcctaatgagtacagggtggcattgaattaatcatgccgccttgttattctagatttttaatgatctcagtaaagtcagaccaatcctccaccttgaacgctctgatgtctcttacggattttctaaaccattctgtttttcggagtgcatcaatagctttgtaaacagtggctaggttgttgtctatggataggtagacactaccttgtgtccattcaaaaccacatttttttaataacatgcgaatctcgaaataggcattgttataaggctctccataattttttttgacttctcctatcgtgaggtcgaatgatattgcgtacataatatttaatttaaagattggaaaaatctctcctgtccaaagaatatacgcccatcatcaagtttaatagatatgacaataccattaaacctgttgttttcaatatctacgataatcccctcgtaccaagcatctaatcctgttaagtcgggggatacttttactctttcaccaactttcataaagatcttttttaccccataaagatacggagattaggaatataaacaaaagaagcatataaaaaatttgtgggataattcttgtatggttaagagattttgtcaatggttatatgaagagtggtcggaaaattttatttttgtttgccaagaagaaatggtaaagggtacttatgttagatttgaatataaattgagatttatgcgggaagtcatggttcaatatctgcaacatcgtttgttgaagtggtttgacgagaaccagaggatattcccgtggcgggaagatcgggcgacgaagtaccagcaaattgtttctgagatcttgttacagcgcacgaaagcggagacggtggcaaagtattatgatacttttttctctaaatttcccgattggaacgctttggctaatgcttcgcttgaagagttggaagagattatgaaacctttgggattatatcgtcaccgggctcgacggctgtataagctgggggaagatattcgccgacggggtgggaggatcccgggaaacgagaacgagttgagggattccggttttatcgggttgtacgtgaccaatgcgttcgaattgtttatcttgaggaatcgtaaaccgcttttagacgtgaacatgtcccggttgctgaaacgttattttaaaccgggagattttattgacgtgcggcatgataaggagattcaggagttggcaaatgatattatcgaggtacgtcgatgcaaggaattgaactgggctattctggattatgcggcattggtgtgtaaaactcggaatccgttatgtggggagtgcgttcttaataagcattgtaagtattatgagttatcccaaggtgatgtaaccgaagagtcggagtaataatctcctgccatctttgtaacaagtttccttcgctcttgttcgtatattggcgaagggcgatgaaagggcgatgaaagggaggtgaaagggtaatgggagatgattactctgataaaaagcaggctttacactagctttaggctatgtcaacctagcattctcttgatattttcttgatagttcatttagatcaaggagcattcaacaagcattcatcttgcatttatcttcgataaaattgatttttgatacgattatatttgcaagttaggtgtgtcgtgtagtattttagctatcgggtgggatatgctcttgtttgaaaaaagggatggggagtgacgagggagttcaagagagggattagatcggtaataaagctaaagagactttagaatgtatcagaagtctctttagttttataatggaacttattgtttgattagttcgctgtcgttacgatttcctgtcatgttttcgtaccagtctttatgttgttccccgcctgaagtagcccagtctttgaaatggggataagctttcaaaaagtctgctttttcatgagtatgaggaatgtcggtagggatattgatcgcccatactaggttagtgttggaattgtagtagatcccgcttttcccgatataggaattcccttctttcgtttgttcgtatgtgctttgtccgaattcttctgtcggagcgtaacctctcgtgtggatttcttgccattgagaggctccttcctttacaggtttagcaatgaaaaagtcaaatgcgtcaagggtaagatctgcttgaggaattgaattgcggaatgcaatataaaaggtgatgtttaccatatcgcctttttgtattcgtgctttgttatccggatctgtgttaaggaaagcgaaacctttaggagccttcgtgttggttcggatgttatcgaacctgaatataggtgtatttttcacgctattacccggattgagtaacttcatatcggcctcttccaaggcattgtaggattcttgtttttcgcattcttctatttccccggcttttataccttttatagcaagacataagtcataaggtagagagcctccaatggctttgacgcggattccgaggatcatttcctttaccatgtttttgttattggggtaaagttgcatcttataattgacaacaaagtcgttaaagtcataatccccataggccggccaaagatcttcgaacatcaaggtcccccaaccgttttcttgggcaggataaaaaataactgcttgaccatttgctcggcttaagtttgtttttgctgagtaggcaagaggcgtttccatttctttactatcagcgggaactgtataagtcacggtattattggttatatcaagagatttagctgctgataatcctgcttccgtttcgtatttaacgtaaagcgtgttgatgtaggtcggtacgttcaatttgacttgatctatatcctgtccgacatagaacgaggcaaaaggagccgtgtttgctccagtggaaacgtacactttagaggcatgttccgaagtgaaattacaggtcacattttcggacattttccattcgaaatcagcaggaacgactaattccgtgaatcctgttgtttctttttccttatgctcgatatctttcttgacacaactgcttacaattgcagataagaagaataaggccaaaattaagacttttgttctcatgattaaattttttgttattgcaactagacgccgatattgcattatattgctataatgttggtgtaaaggtatggtctatttttcgaaattcaaactatttagcaataaaagtgctggatttatgcttttttatctgattgcgataagtaatttcaaataaatgcaggtgtttggcatggggggaaataaaaaaacagtttgagattgctcccaaactgttttgtataatgtaggtgttatcttcttatttgataacgcccaattgtttaccgatcttgatgaaggcagccaatgcgcgatccagttgttcccgcgtgtgagcggcagataattggatacgaatacgggcttgtcctttcggtacaaccgggtagtagaatccggtaacgtagatgttttctttctgtaattcggcagcgaattgttgagaaagaacagcatcgtaaagcatcaaggcacagatagctgattcagaaggtttcaagtcgaatcctgcttcggttaattttgcacggaaatagttagcgttgtccatgacacggtctcttaattcggtactctttgacagcatgtcgaacacggcgatagatgcaccgcagattgccggagacaaggagttggagaacaagtaaggtcttgaacgttgacgcaacatatcgatgatttcttttttaccggtagtgtaaccacccatagccccaccaagagctttacctagggtacccgtgaagatgtctacacgatccatgcagtgatggtgttctgcagaaccacggcctgttttgccgataaagccggcagcgtgactatcgtcaaccattaccaatgcgttgtatttttctgccaagtcgcagatttcgttcatcttggcaatatccccgtccatagagaacacaccatcggtaacgataatccggtaacgttgagcttgagaaatcttcaattgttcttcgaggtcagccatgttggcgtgtttgtatctgtagcgtacggctttacaaagacgaacaccgtcaatgatagaagcgtggttcaattcatcagagatgatggcatcttcctgaccgaataacggttcgaatacaccaccgttagcatcgaaacaagcggcgtaaagaatggtatcttccgttccgaagaattgagagattttagcttccagttctttgtgaatatcttgggttccgcagatgaaacgaactgaagacatcccgtatccacggctgtccaatgctttctttgctccttcgatcaccgtcgggttagaagaaagtcctaagtagttgtttgcacaaaagtttaatacagtttctcccgtggcaagtttgatttcagcatcttgcggggtaacgataattctttcgctcttgtataagccggcgtcttttatggactgcaattcagtctttaaaaagtcttgaaattttccgtacatataactaatttttttgtttgttttaatggcctcaaaagtaatgaatttttgattatggcgtactcgaaaatgattacctgtcttttatacacatttgactctcccgacgaggttcaaagtgaaatctccgttgttcgcttgttctttaaaaaaaaataataacgacatatacagatctattatacacatttgatgatgtgacaataatga

SEQ ID NO: 190 - DNA, 7819 bp, Butyricimonas faecihominis
gtataaatattctccccgtttttataaatatgcagcgtaaaaaccggacttttgaccattcggaaaaaatttatcatttatttctcttaaccgtctctttttttgtacctttgcgatatgcaaaacgaaaacaaaccatcatcgagaaatttgttccagcgatttgcaaacaaatacactttcgtggggctgctatttgttatctggatcgctctgttcgataaatacagttttatcgaccggttacagttgcgttcaaaaatcaaccaattggagaacgaacaaaagtattaccgggagaagatagaagaggacaaacgtaagaaagaggagttgttgggaagccgggataacctagagaagtttgctagagagcagtatttaatgaagaaagaaaacgaggatattttcatcattgtaaaggaataatcgattgggaagaattattgctattgattacggaaaaaagagagtgggcatagccgttaccgatccatgccaaattattgccaacagtctaaccacggtcagatcacatgaggtattgcaatttttgcagaactattgcttgaaagagaaggtagacttgattgttgtgggacatcccaagcaaatggacaacactgattcggaaagcatgacctatatcaaaccttttcttaccgctctcggtcgtaagctaccggatatacccatcgttatgtatgacgaacgtttcacttccgtactggcccacaaagccatgattgaaggaggggcaaaaaagaaacaacgtcaagacaaagcgataatcgatgctattagtgcaacgattatattgcaatcgtatatggaatcacaaagaaatctgaatatttaaaaatgcttttacctatttacatttatggacatccggttcttcggaaagtttccgaagacatcaccccggaatatgcgggattgagtaaattactcgacgatatgtggcaaacaatgtacgaatcagatggagtcggactagctgccccgcaaattggaaaaaacattcgtattttcgtaatcgacgggtccccattcgaggaactggatccggattgcaaggattttaagaaagcttttatcaacgcacatatcttagagcgttcgggcgatgacgtacctttcaacgaaggttgcctaagtattcccggtatccacgaagatgttatgcgaaaagaccggataaaaattacctaccgggatgaaaactgggtagaacacgtggaagaattcacgggaacccgtgcccgcattatccagcacgagtacgatcatctagacgggattgtcttcacggatcacctatctgcattgaaaaaacgtttactcaaaggaaaactgaataacatcagtgccggaaaattcaaacaaagttacagggtagtattacccaagtaagtttataaggtccgtaaggttcataacatccatgaattcttcggaccttatcttgtttgagccagtcaatcattcaatttaaaatctaaaatttgaaattagtttgcgccctatttactggcatagatttccttttctctttctcgtgatcccgttgatcttgggaattactgccagtcaatatttatcaagctttccttcgacgttcattttaggtgtcattattatatctttttccctgcttttcattatccagaaagttcgttccggccttccgtttgtactactcgcttttactgaacttttctccacggggatatatctatcggaaaccaagacaccctcgatcactgcaggcaaaacttatcaattaacaggacgctgcaatcaaattctttcccccggaaagcttgtcatttcctcacctcatttatgcacgtatttacaaattccagattccatgaaagtctcggttggggattccctttccgggctgataagattataccctttacaaacctcacataatcgccatgatttcaattacaacaactacttacaacatcaaggtatacaggccaaaggctttccggttggtgaaatccataaaaccggacactcgcaagacctttattccgtgtgtcacatgattcgaaataacttagcaactaaactacaacaggtcatcccagatagcacgacgtacaagctattagcagctctttgcctgggatgtagacaagaaatcacttctgatacgaaagaactattccaaaacacgggaacgattcatattcttgccatatctggattacatataggagctatattcgcatttttcttgtgcctattaaggttattccattttaaaagtagaaaatcccgtttgattctgattccgctaatatggttcgtcgcctgcattaccggcctctccccctctgcttgtagagcagcaaccatcctaagctttattacgattggagaggtattcaagcaagaaacaattcccttgaatgccattgccgctgcggcctttttttcacttcttatcaatccggaattactctattctgtcagtttccaaatgtcatacgcagcctacaccgggatcattctaatttacccattgatgcgaattaaaaagatgcacaagttcttccgccccttatacacgctactctgcattagtttttctgcacaagtcatgacattacccatcatggcttactatttccattccatcagtttgaacagtatcttcataaatcttatcgcagtacccgccgcttctttccttttatatggaggaatcctgctacttgcattaccgggattcatcaatttttatttgtcatatatcatcataagtctaacacatctatttattttcagcctacaactattttccaaaatcgtgataaacttaccggatttatacccgacggcaacccacgtcatactattttatctcatcatcgtccttgtcatcatttatttgatcacgagaaaacgtcacgtccttaaatttatctgttatagcatgagtatattgctcgtttttcatggctgtttcacgttctatatacaaaaccatcaggaaatcgtgattcgtaatctctacaaacattccgctattttattgaattacaagggttattacacttacctcaaaaccacgaatcccgatgacggtttgtccacttatatcacagccaatcacttacaagctttacccacccatgaggcttttgtcggacaacaaataaaattcattcggaatcacctgtcatctcctcaatgttctatatcaataattgaccacacttaccctacattttcgaatgaagacattgtcatcattaccgaaaatatttacccacccgactcactcaagttccatccgcagcaaattatcatggacaactcgaacacgggtcgctgcacgcaagcttggcaaaagttctgtctcaagaaccagatcccgtttttcaagacaagcgaagtgggaacaattatcttgaaaatataggcatttttttatggaattcggattataatgctttattttgctcgttaattaacacctaactaaaatggacatagtcatagcgggagcaggagaagtggggacacatctcgcgaatatgcttagcaagcaagaacataatatcatgctgattgacagcgatgaagaaaaattggaattactgggtaatcaattggatgttatgtcaattgtgggatcttgtacctcaattggtgcattgaaagatgcaggagtacacaagtgtgatttgtttattgcagtcaatcaccaagaagatcaaaatatcaactcagcgatcttggctaaaaaactcggggccaaacaaaccattgcccgggtaaacaatagtgaatatttggaagacgagaacaaagagtacttgaaaatgatcggtattgattcgctgatttacccggaacgattggctgcggaagaaattgtagcctccttaaaacagagtggttcaaggcagttacacgaattctctgatggccgcctgcaattattaggaatcaaactttgggagaatgccccggtactcaacttaaccttgataaaaatggcagaacgttacggtgcccagcatttccgcgtcgtggctatcaaacgagcagatcacactattatcccgcgaggaaatgactctttccgctatggagacttggtatttattgtaaccaagcctttctatgtccccaatgtattcgctctttgtggcaaatcacaatatgaagttaagaatgttgttattgtgggaggttctcgtatcggtatcaaaacagcttctctgttagagaaaaattacaacgtgaagattatcgaaaaggatcgggagaaatgtattctcatcgccgacaaattaaaatccacgctggtaatcaatggtgacggaagagatttggccttattacgagaagagggaataaaaaacacggatgcctttatcagtgtaacccactcgtccgaaaccaacattctgtcctgcttgttagctaaaaagctcggggtaaaaaagagcgtggctgaagtcgagaatatcgactacattgatctggcagaaaacatcggtattggcactctcgtgaacacgaaattaattgcagcctctcatatttatcgttacacgatgaacgtggatgtaaagcatttgaaattcctcacgttctcggaagctgaggttttcgaagttacagcagaaccgggttccaagatcacccgtaaaactttggcagatatgaattttccggagaatgcaactgtcgggggtgttatccgtaacggggatgccattatagctaaaggagacgtacagatcgaggcaggagacaaggtagtcattttcgccttacctagtgccgtgaagaaagtaatcaaattgtttcaaaaatgatcaactttaggttcattaccaacattatagggaaactattatttgtagaaagcgcattccttatcttatgcattattgtcgccttgatatacggggagaacgatctcatggctttcgtttactctgcgatcatcacgctgggagtcgggagcctcatgacatttacagtgaaagtcaaagaccgggtacttgctaaaaaagacggctattttattgtaacctgcacgtggatcatcttcaccatcttcggttgcttaccttacttattcggaggaacaattccgtcaattgttgacgccatattcgaaaccatgtccggtttcacaacaacaggttcctcggtaataaacaacgtcgaggccttaccacatgccactctattctggcgctccctaactcaatggatgggcggtatgggtatcatcgtgttacttttagctatcatccccggcttgggaatcgagggacgtgatctcttcgtagccgaagtaccaggtccgacacatgacaaatttacggcaaccttcaaatcaacagcccgacgtatgtggtatctctatatttcactaactgctgcccaagctattttactgttattgggaaatatggatctctttgatgccatctgtcacgcattcacaacaatggctactggaggatattcgaccaaacaagccagccttgcctattgggactccgcatacatccaatatgtggtcattatattcatgtttattgccggaacgaatttcggcttactctatgtcatgttgcacggcaaattccgcaaattgtttcatgatgaagagttcaaattatatctttacatcacgttaggagccagtgcaatcatcgcaatcgttctattcctaaacggttatgcaaacttagaattaagcatccgagaatctatatttcaagtagttaccattctgacaacaacgggattcgctaccgcagactatctattatggccacctctcacgggtgccatcatctttgcactcttattcatcggggcctgtgctggttcaacttcgggtggcttaaaatgtatccggctcaatctattattcaaaaactcgtttatcgaaatgaaacggatcattcatcctaacggaattatcaatgtcaagtataacgggaaaagcgttcaccccaatattatgaccggagtgatgggcttctttatcctgtatatgtttattttcgctatctccagcctaatcatgtcactatttactcaggatatagccacagcttgtagcgctgttatctctagtatgagtaacgtgggtcccggatttggagagattggacctatggacaattttgcgaatctacacgactttgccaagatatttttatccattctgatgatggtcggacgtctggaaatattcacggttctcgttctattcagtaaaacattctggaaaaagtaatctctacccccacaagataatttggatctcacccaaagagaggtattttcggagcttagattccggaatacctcgttactaaaagaatagagaggcggatgaaattatctgcctctctattcttaaaaaatatcctacaattcacccaatccctgcctcgtgacaataatttcatcccccgtacaatcaatcactgtcgaaggaatattattcccatatcctccgtctatgaccagatcaactagacgattatacttctcatgaatcaattccggatcagtgatatattcctcgacttctccttcagcagctttcacagaagtggtcagcaaaggtccgcccagctcttcgacaatagcctgaacaataaaatttttgggtattcgaatacctattgttttacgtctattcattaagacattgggcaacttactggtagccggcaacacaaaagtatatggtcccggtaaatattgtttcatcaaccgaaactcttcattacttacttttgcataagcagcgatgtttcccagatccttacagatcatcgagaaatttgctttctctgctttcacaccacgaatagccgaaacccgttgaacggccttcacgctatttatatcacacccgatcgcgtaaatcgtgtccgtcgggtaaatgataacaccaccatcacgcaagagctcaacgatctttcgaatctcccgatcattgggattgtcctcgaataaacgtacaagcatgatcgtaaattatgaattcactttcttatgatcagccaagaacgtagccaaaccggaatccgtcagcgggtgttttaacaaacctttgatcgcactcaacgggcaggttgcaacgtccgccccagcctcaatacattgaatgatatgttgtgtgtggcgaattgaagcggccaatacttgcgtgttgaaaccataataagcatacatatccacgatcttttccaccaactcgatcccatcactactgatgtcatccaaacgtcccacgaaaggagacacgtaagttgcaccagctttagcagccaacaaagcctgtcccggagagaacactaacgtacaattcgtacggattcccttgttggtaaaatatttgatagccttaatgccatcagcaatacaaggtacttttaccacgatattcgggtgcaaagcggctaattcctccccctctttaatcataccttcataatcagtcgcaatcacctctgcgcttacatcaccatccacgatattgcaaatctcaacgtaatgttttctacaattctcgtcacctttgataccctcttttgccattaaagacggattggtggttacaccatccaacacaccaaggtcatttgcctcgcgaatctggtcaagatttgccgtatcaataaaaaatttcatattctatctggttttattgtttaacttcaatatcacggacaaaattacaaacaatatctgtaatccgatcatatttagtttataaagttcacaaggttcataaagttta

SEQ ID NO: 191 - DNA, 7818 bp, Butyricimonas faecihominis
gaaataaacaacatataaattcctgtattaaagccatacacccatctctctccaccttattacaaataattcgatattaaaattcagtccttgctaccttttttttcaaaaaaatcagtcaattctttgcagagttcaaaaattgcactacatttgcatccgcaatcaagcaacacgggcgcttagctcagctggttcagagcatctggtttacacccagagggtcgggggttcgaatccctcagcgcccaccaagagactcataatgagtctctttttttgttttgaggttactttttcaaataagtcataaggatttatgatagtgtctccaaaaggagacactatcttcactcgttcaattccatccgtgtacgcccattcaaagagaatattgaattctttcaacaacaggaacacgaacgctgccaccgaatcattcaacgccaagcagaaagccttcagggttcaatttaggggtgtgctggatataaatttttcctctttagagtcgcaaaaatttttgcttgaaaagaagaaagaaaagcaagaaagaaatggagatccacctaatttttcacgtgagcctttttccatcggccttttcacgtgaactcatttccgcactcttccgatgattgatgataattccacacattctttatcaatattttgacttaatcaccaaatcaacacattgcgctgtattaaaaaatcttcgggcaaaaccgagtacatttcttgccttaattttatcaataacagcatcaaaataaatcggagaatccattctttttcccgttttattataaaactgaagattttctgtccaaaaagcaattgtattataagccatttcgtcaaccgattttttctctttctctatagaaaggacgaaatcttcaacatcctcatttgtcataccttgcttcaaaaattcctgaatttgttcatgaactaattccctcatccgaggaccttcatccaaagatgttgcaaaacgaataaatagttcttgttgataacgaggttttgaagacacttcccctaacacttgcacactatatgcagcccctcgctcaccccgaatctcttcttggaaacgatactgaaaatacattttcagtatacgcatacacacctcttccattggagtggttttcaaattattaacaaactcaatactcaccaagtatttacgatccggcatattcacttctatatcttcagttatatttccttcccgatcgtaatgatgttctaccggtgtttctttcctgtacgcagaaggaattgcccccacgtacttggccaccagttcacgagctttctccctttcaatatctccgaccaaataaaaagtaaaatctgaagcatcttgaaaacgctccttataaatttgaatcatccgatcaaaattcatcgcagaataataatcggtatcctttttccaaagacgaggagactctactcttctgatcgaggataacatctcgctaatcgtatcattgattgtcgcattcgaatttgcttggttcattcggttaaccgccacaaaacgattaaaaagtacactatcaaaacgaggtcgttccattgccagataaaataactggaaagcaatttccaagtcaacagatgccccaacaacactaatactctccgaacgttcatctaaagacaaattcatatcaaccgtatgatctttcaacaagaaacccaatgcattcatatcatatttatacaatcctccttgcaaaaacaaggcagacaaggcatctgcagagggcaaatcctcagcttttatcaccgaacgcccaccgggacttccagccaacatattaaacatacctttatctccatccgtgtatttataaaatatcctagctccattatccaacacccattcctcagcgtccaacatttttatagtcttctcttttacaatccttcccggtttaatctcaaaatctatcaattcagcattctcttctatcacttcttcccgagcggcaagttgttccatatcagcggaacgggaatcctgaatcatcttttcaatttcttgggcattaggaaaaagataagtggaatcattaccctgcataagaaatacccaattatccgatccaccgtaccaatcagaaatccaatcttgaaaatttttagccgataacgtatcaaggacagacaacgtgacgtccaacttttcatcaaccgtacacaaaggtctgcctaataaaaaattatcttgataaatctggaggaacacgctattcggcatactcccttcctgccccatattcgccctcaccccttgccggtatttctctatcaaaggttgcaagacttcatctgtaaatccaaaacgatgcacatactctattttgtccaacatttgctgcaacgcctctttttcctttcccggcaaagacgttaataccatattgaaactatcataatttctcaccaaattagaaatccacgctcccgcactcaaaagataagactcccccgcctccacatattccgttattaatcctctcatcaccgaattataaaagtctcgtaataacatctcacgtaacatatcttccaaagaattcacgctaacccaaggaatacgtttcaccaattgaattgaattattagagatctctttatcgatcaatttcgcgtataaaggcctgtcattattttctattttataaacaagacgaggttttggattctttcttttgggaataggatcaaataaacgtttcacggtcgtctccacctgctcaacatcaatatccccaataatcattaccgcttgttggtccggacgataaaaatcattataataactcctcagttgttccggagtaaaattctgcacgacatccacggtaccgataatatcatgaatagcatatttactcccgttatacaaataaggctctgccatttttttcactcgtttagacacattcatccttacccgacgttcctcccgaatcactttacgttcttgatccatatcttccgatttcaatttcaagaaaccagaccaatcccgtaatactaaaacacaggaatctaccaacacccgcgaggccgttggtacatgatcaatatgatatatcgtttcatcatatttagtcacagcattgaacgtctccactccatgacgttgtaaaaaggcaggcactccatccggaaaactctgcgtggagtgaaatgccatatgttccaagacatgagccaaaccattctgattgtcatcttccaacaaagaaccgacattttgcacgagataataatcagcataccccgattgaacctctgtatgccgaatatagtacgtcaacccgttctttaacttaccataacgaaacacaccggaactctcttgagccacgacaaaacaactggaacaaaaaaacaataacaacaatagtaaatttctcataacgtactcaatctactttggatcattttctgtaattgcaccatcaactgtttatcctcgatctccgcactcacgataaaagcttgattataacattgttttgctttcacgctatccccagtttgtttcaaacaatcccctaacaaacaaagcactcgggatcttaactgaactgacattcgcgggaaagataaagccttttccagccacgggattaccttcaggtaagcattctcgggaatattaccttgatacaaggaaaataaatcctctaccggtccggtgtaattattaaccgtcaatgttgcgctcgcaccttgaaaatatttattcatattttcaaaaaacacatccaaattcttacggtacaaattataatacccgtccgcaaggaaattaacagcttcaaaagcagtaagttctccaaacgggattgcgccgtaaatctgattcaaatcaccattcaatcgctccaattcttgtttgtactccgccttaccgttacgacacaaggatataatatatccattatacaaactgattatatacctgttcacgtccgttttacccacttgttctacgtatccttgataatttctgaccagagcatcgaaaatcgggtcattcttatctttttgctgatggaacattaccaataaggcaaaatcctctggattcaccattttatccaaggttttatcggccacgtaactatcaaataaagagcctatacggataacccatttttcccggttatacccttcctgtgtaccgataaaagcgggagcttgtaacaataactcttgccgcaaatccaaattcttcttctctttcttaactttttcatataacttttcaaaacttaagacttcccccataacgactttagcctcatgcaataaagtagcagactcttttgcaccgttaattgacaaaagtatttcccctttcacgttaagaaataacagggtcggcaaagcatttactttatatttttgtactaatgttttattctccggagcctcagcattcaactggcaacaaacaaaatttttgttaaaatattctcccacctcaggtaatgtgaaaatcttttttgccatttgcttacaaggttcacaccaatccgcatagaaatctataaaaagatacttcttttccttcttcgcctttgccacggcatcctcaaatgtcccttcaaaaaaagtaatttgggcagataccgtctctagcaatcccataaacaagattactagccataatttaatatatttcattgtaattaaatttaaaaaggaagtgtgtcaaaaattatcctacttcataaactttcccatcaattacttcctgaaaatcaaaaaagaaagcaaccgatcaaatttttgacacattccctgcaattattaattatccctcaaatcaaacgtgaatatatccgtcagtatggcagaatggccttcattttcaacctttaaagaaaccgtataacatccagccggagaatccactttcgcatcaacatacatccgccctcccccaataaccgtcacatattgcgcaaagtcatcggcagcctcctgaccgttaacactcttcacactataaagagtgtattggagaggttctgttcccaatacctgctctatctgtgccgtcgtccacggaatacttttatcgatctgttcttgcaattgagcaatttcctcccgaagcgtgtacggatcaagcacccctacttcctcacacatggaacagattgtatttttctgagaacggattctactttctgcaggttccaccacttcatctttatacaatgtatactcatcggcagctttatccattaattcttgataatactctttatctgcctccgatgcattattaaaggcagtttttgcctgtttataagcttcatacaactcatctttccgttcctgcaaagaaacaaattccgtttccagttgatccgttttagctaaaagatcctgaatttcaggcgtgtattgatcaaaaatacgtttcaactcacgaatattattctctaaagcagagaaacgcgtaacctgtaaagtatccatcgaataagaagcctcattcgtgtacaaataaccgactgcaacattatcgcaccctataaacaaggacgtcaaccataatatcgtgctatataaccagattttcatcatttttcttttttaaattttattcaaatcacaagcatatcccatggcttgcaccaccccgttattcgtttgaatatccgttgacaaaacccggaaactggctgatccggaagatgttctgatatacaaagaaacttctcccgcatcttctatctccatgtaaggctcttgatgagtccatataaatatcgcccctcttaacgcttgagcatccatcccgtccactttctctcctgtactggcaataatctggcccctgggaacatctttgaccatcaatcgtttcgggacgattaatttggataaaatattcttacaatcttcaactggaatatctgtcacttttttatattcattctgtaacatataattcaagatactcaagtttgtcacgccaaaaaatgtaatttgctcatgctctccctgcccctcgaataactcttttaaacccgcatgttcaatcataataattgtagaatcccaatcatacggctgagtatgaagatattcccacatagaacaatcatgaatcccgtaagacaatcccccatcatgataattccatttcgtacatgatcctaaggccaacatcataaataggatcaccccttttaatatacatactatttttgccattgccaataagtattttgagtcatcaatgtatttttttcaaaagccccgattccaaccggtgcataaaaagccccgtttattatatcttgctcagtaagagtctggaaattaccccttaaatattttttatgatatctattacgtacaatatcaaaataaaattgaccttcaccgaaaagctcacgtctccgctcgttgaaaacctcttgccttaaactttctttatctgttagtccatcataaccagacaattccgcacgagcacgaacccgatccaaatcatccacagccgtcgtcaatccaagatttgcccgacattccgctctcaataaaatcaaatctgccaatcgccataccacccaatcaccgtcggtagcaataacaggccgatcctgcacgatttgcgtgttctcttgaataataacgtctctccatttggcgatatgagcacaaggactcttctctcttctcaccacaacaaaatctcccgcttcatcatcccattccgttaccggataagtcaattcccccaattggaaccaaaattctctccgacgggcatccttctcatccggataaatattctcaaccgtttccacgtaaattttagtatagtcatcccatagatcttctgcaagcgaggttatcgcggactcatctgttgtcgtatagggataagacattaacatctgtcctggaaattcaggcctgaaattcgtctcatgttgtcggtcattatcaatcggatcattatcaatacaaaaaatagtctccacgctatatctcgcttttccgaaaacattcgcaatcaacccatctatactttccaaatcatagaagccggctttaccttctatcacttctgaagcgtaaaactcagcctctttccaatacttctcttcccgtgttaaacctcccaaccaagcataaatatttgccaacaacgtatttacggtaccgagactagcatattgcttggaagtaatttgtttcccgtcaacatctttcaattgctcatgaaccggaagagtcaatgccaatttagcttctttaatcgcctcctccaatactttcaaggccggttgtttcccttccggagcaattgactcggaaccttttgaaatcggaacatctccccagatttgagcaagacggaaataagctaccgccttacagaaatgagcttgtcccaaccaaaattctgccctttcttcagatatattttcaaaacggtattcattttcaatcatcacgttagctatatatattgcatcatagaaaccagcccaattaacatctaaaaccatactctcttccggtaaataagtttccggatccaacgtccaaaatccctggtaagtccattctatattatcagcgtccaaagcattataaaaataaggttgtttccctatacaaatattcttcatgtaggaagccatactattgtgtaacgctttaagttcctcctcattcttgaaataattgacaaacgtcactgaatcttcaggttctacagtcaaccaatcattacatgaaaac

SEQ ID NO: 192 - DNA, 7794 bp, Butyricimonas faecihominis
ttgtaatatagtgtattattggtggagtttcaatggaaaggaaataatgattgttgtgtttggctttttgtttctttatgcctagttttgaggaataaaatgtaagaggatgagaaagttgttatttatttggcttgttggagtattggttttccttttcgaaagttgtagcgagccccggcaggtaaagtacgtgttctattttatcggtgatggtatgggggtcaatcaggtgaacgggacagaaatgtttctggccgagttggatagtgttatcggggtgaaagggctgaattttgccagtttcccggttcgtaattacgcaacgacttattcttcttataatggtgttacttgctccgctgccgccggaacagccttggctaccggggagaagacgaagaatggcacgatcgggatggataaggaacagaaagagcctttatatagtgttgccgtacgggcaaaagaagccggacgtaaagtgggaatcattactagtgtcgggatgaatcatgccactccggcggcgttttacgggcatcagccccggcggacgatgtatttcgagttggggaaagatgccatcaaggccgggtttgatttatatggcggtggaggtattattcaatccgtatccccgaaagattccacgaatctttttgatttgttgcatgagtcgggatatttggttgttcggggaaacgagatgtttcgggaaaagatggttgagttgtctaaactggtggtcattcaaggcggattacagacaacgttaccttacgcgatagatcgggaagaggatgatttcacgttaagtcagatgacggaaggggcgatagattttttgagccggggaaaacagggttttttcctaatggtggagggtggtttgattgattatgcttgtcatgtgaatgatgctgccacggcttttcgagaagtggaagattttgctgatgcggtacaaaaagcatacgagttttatttgaaacatccggatgagacgttgatcgtggttactgccgatcacgagacgggaggcatcgttctcgggactggctcgtatcaattgaatcttcgggtattggagaatcagagggtgtctctggagaaattgactcgtgagattcgggaattacgagatatgaagagtaatcaggtggcgtgggaggatgtgcaggagcttctggcgaagaatttaggtttctggaataccgtaaatttatcaacggaagacgaacaggccttgaagaattgttatcgggaaacattctcgggcaagaccgttgaaatggttaaaaatttgtattcggagaatgagccgatcgctcaattgtccatcaatatactgaatcgtcttgccaaaattagctgggccagcggggggcattcggcgggagttgttccggtatatgcaatcggggttggtgcggaatggtttaatggacgcttggataacacggatattcctagaataattgaggctttggcaaaatatgagtagtatttaattaacaatgtttattttttattagatgttattgggtggcgtggtgtcgttgaatttaattcctttatcagtttttatttcgtcaataaaattgatagaatggaaaagcgagagattactggagtacaaggtcaagttaacaatattgaggtaatattcaaagagtattatggctctctttgttatttcgcttcccagttcttgaaaaacgaggaggtgatagaggatcttgtacaagatgtttttatcgctctgttggagaaaaagatgctttttcaatccgaagtacatttgaaaaatttcttgtatttatccattcggaattcttgtttaaattatatccgcaatacccgttcgaaagatcggtatattgcttcattggctcatgaagaacagactgaagatttcgaggaaagcattattttagctgaaattcatagagaattggccgctgctgttgaaaaattgccggaggagtgccggaaggtctttcagctttgttattttcaagggttggataatgaaagtgccgcacaagaacttggattgagtgttaatactgtaaaagcacaaaaggctcgcggaaaaaagattttaagagaaaatttgaaagatattttcccattattaatgttactaaatcccttgttctaagggataaacgtggtgtgtgaaaattaggcgtaggtgtgaattgtattttttttgaaaaaaatgcgatcccgtttaatcctttcgaggtagggttgtgtaataataatgtatgaaaaatagtattaacacatatccgtatgacattgccgcgataatattagcttatttgcggagtgaaatagatgagaaaggacaacaaaaactagatgcatggttggaggaggccgattctcataaagctctttttgcccggattcaggatgaagcgatgcaatatgaagacattcagaaaatattgtcttatgatgctggcggagcatggcagatcgtgaaacaaaaagcagcccggagaaggagaaaacgtttgatgagggtatatcaagttgcggtttctgttgtggttgttttgggagtggcaatcgctttcttgttgaaggaagaggctactgttgttccggttgccaaggtggaagagattactccggggcgttccattgctaaactgactgtcgcatcaggggacgtctatcatttggattcattgaatcaggtcgatctcgttacttctttggcagaaaataacggaaaagaggttgtttttacagatcgacaattggaggaaagtgtgagagaaataaggtataataaagtcgagattccaagagggggagagtatcagattgtgttgggagatggaacccgggtgtatttgaatgcacagacggaacttcgtttcccggaaagttttgctaatagcgagcagcgtttggtatatttgaccggggaggcttatttcgaggtggctaaaaatccgtccaagccttttatcgtacaatgtaaggattatgcggtgaaggttttgggaacttcgtttaacgtgaatagttacgagggagacgaaacttctaaaacaacgttggctaccggtaaggtcgaaattgatatggatgggaaacagacgattttgaatcctggtcaacaggcgattataaaagatggagaagtgaacgtgagggaagtggatgttgaggtgtacacgacttggatgtatgagaatttccggtttaaaagtgaaagtattcaggagattatgacgaaactttctcgctggtacacgatagatgtgttctatatgaacgaggctgtcaaaaattatcactttaccggttacttgcctcgttatgccaagattgctgatgtgttggaattattgagtttaacaacaaatataaaatttgatgtaaagggtagaacagtgacagtaatggagaagtagtgaaatagtaaagccgaagctgcaacttcgactttacaaaaatgtgtactaaaataaacccaaaggggatttcacaaatatacttgatttttctccaaaacaaaatgatgtgtctcaaacaatggaaaataatttcattgaaggtgcgtgttatgtttgaatttttaagttttaataaacatcaattgcttgggccagaggcaaattctttgaatttgccgaaacgtccgggtgtatgtgtgcaaaaatgacctaaataaattatcaatgaaaagtaaaattagaaactgggtgatcagatgtggcaaactatcattaggctgcaaactaatggtggtgttgttactatttacacattttgcgttttcaagcgaaaatgcgtttggacaacagactattactgtgcaatttgaaaaacagtcattaagtgaggttttacaagttttaaaacaaaagactggttttgaattcctgtacaatgacgaggaaattaagggggtgacgaatatcacctgttctttcacgaatgcttctgttcaagagattttgaaatcttgccttgccggaacgaagtataattttaagatcgtggataatttgatcgtgattactccggatgataaaaagaaggatgaggtgcagaaaatcgtggtatcaggtaaggtgctggatgatggcggacaaacattaccgggagtgacgattttattgaagggaaccacgataggggtggtaacagatgttgatggtaagtttaaaatcgaattgcctaagcaggattcattgattttgcttttctctttcgtgggaatggaggtgcgagagttggatgtgaataagattaaagatttgagcaaggaagtggtggttcacatgaaagcggacgtgacggagatggaggaagttgtggtaaccgggtatggacaaattaagaaacaaagttttacaggtagctccgtgacagtgaaaaaagaggatttattaaaagtttcacaaaccaatgtgattgctgctttgcagacgtttgatccttcttttcgtattcagacgaataatcaatggggatcggatccgaatgcgatgcctgaaatgtatatccgtggccgttccggtatcggggttaaagagttggatccgaattacacgacaaaaggtaatttggaaaataacccgaacttgccgacgtttatcatggacgggtttgaggtggatgtacaaaaagtgtacgatatggacccgaaccggattgagagtatcacgattttgaaagatgctgctgcaacagctatgtacggttctcgtgcagctaacggcgtggtggtcatcacgacagtagccccgaaaccgggagaggtgacagttacttattctttgacaggtggagtgactttcccggatttgtcggattataatttggctaatgcagaggaaaagttggaaattgaacgtcttgcgggactgtatgacccggaagaaggagccacgagtatcagtaaacaggatgcttattggagaagatataagaatatagcagaaggagcggatacggattggatttcaaaaccgttgagaaacgcagttactcataaacacagtctgtatattgaaggtggaaattcggatttgcgttatgctttggatgcttcgtttaacggggacaatggtgtgatgaagaagtcatatcgaaatagaaccggagtcggtttctccgtggattatcgattgaaaaacttccaagtaaaaaattatatttcttatggttatgtgaaagcacaggaatctccgtatggttcttttagtgattataccacgttgttaccttatgaccgttgctttaatgaagacggttctatgagaaaaaagttacaatttactgaaattaggtatcagagcgccttgaatcctttgtatgaggctagtctgcatagttatgattatgacaagtatgatgagattattgataatgtcagcgtgaactggtttatcaatgactacctgtcgatgaaaggacaattcagtattaccaaacaatttacaaaaggggaacgttttattgatcctgagtccaataaatcatcaacccaagccagttccaatgagttgctgacaggtgatttgtacgtggataaaggtgaaagaactatgtgggatgctcaagcatttctatattatcaacagtcgatagccaagaataatataaatttatctgtgggatttaatgctacttctgattttacggaaagcacgtctactcattatcgtggtttcccttcaggagaatttcattcttctaactatgcggcagaagtagtggataaaccgacaaaatcacagagccagactcgtttgtttggggtgattgctagcttgaactatacgtataatgatatttacttgttggatgcttctgcccgttttgacggttcttctgaatttggttctaatcaaaaatgggctcctttctggtcgggaggtttgggtatcaatattcataattacggatttatgcagaataatggtatctttaatcaattaaaaatacgagcttcttatggacagaccggtaaggtaaatttcccttcttattcagcaatcacgacttacgaggctcaatttgatgaatggtatgttacaggttatggtgttaagctaaaagctcttggaaatgaagatttatcttgggaaaagacgaatacgttcaatctcggattggatatgcaagtatggaatgaacgtgtgacttttagtgcggaatggtataataagaaaaccattgatttgattacggatgtaaccgtgccgacttcttccggattcgtttcttataaagataatatgggtgaaattcgaaatagaggatacgagtttaatattcgtgccaatatcatccagagaaatgatttgttatttgctttatggggaaatttcgcccataataagaataagattataaaaatttcggatgccttgaaggcttataacgaacaggttgatgcattctataatgatccgagtaataacaatgtggcagaagtgaagaccaaatatgaagaaggaggatctacaacttctatttttgctatgcgttctttaggtattgatccggcaaatggtcaggaattgtttatcacccggaatggagttattactcacgagtggagtggggccgatcaggtaattgttggtaatacggaacccaaaggacaaggatcattcgggttaaatgcttcctataaaaacttctcgctatttgcttctttcatgtacgagtttggtgggcaggagtataactccaccttagtaagcaaggtcgagaatgcagatattcaatataacaatgtagataagcgtgtgttgacggatcgctggcaaaaaccgggagatgttactccattgaaagatattaaagatcgttcaacaacaacgaaaccttcttctcgtttcgtgcaggataataacgtactttcattgaatgcattgactttaagttatgattttgatactcaattaatcaaaaagatggggttgaatgtattgagattagaggtgagtacgaatgatttattgcggttctcttctatcaagcaggagagaggtacaagttatccgtatgccaagactgtgaattttacgttgagagcaagcttttaataaaaaagatgagttatgaaaatgaatagattactacttatatgtatattaccggtattgttttcggcatgtaatagctggctggatgtacaaccggaagaacaaatcagtgaggacgaggttttctctactggcaatggttatcggaatgtgttgaatggggtgtataaatcattgtccggagtgaatatgtatggccgggagatgacttggggggtgatggatgtgttggctcaatgctataatgttcaaaatatgccatctgagtatccgggaaggcagtataaggaaggggctgctttttacgattatgaatacactgattttcataaattgcctcaagcaatctgggaagaaggatataatgctgtagctaactgtaataacttgatcgctcatgctcgtcatgctgacccggatttatttgaacttaaagaatctgaaagagcattattggaaggcgaagcgttggcgttacgtgcttttattcagtttgatatgttacgaatttttgctccggcaccggtgacttctcctaaaggaacctatattccgtatattaaaagttatccggaggttctgtctgtgaagttgtctgtagaggagtgcatggagaatgttatacaggacttggaggatgcaagaaagttagtttataaatatgattcaattaatgtaagtaaattaaggattgcagagc

SEQ ID NO: 193 - DNA, 7753 bp, Butyricimonas faecihominis
ttgtaaattttagattgtaaattgtaaattgaaaaagcaatctaaaatttaaaatttaaaatctaaaattagaaacatggaatacgtttttatatttatagccgccgtatttgtcaacaacatcgtgttggcacaattcttgggaatctgcccgttcctaggggtttccaagagcgtacccacggcactcggtatgacgggagccgttacgttcgtgatgattctggcaaccatggtaacatttatcgtacagaaaaccgtacttgacccgttcggcatcggattcatgcaaaccatcgtgtttatcttgatcattgccgccctcgttcagatggtggaaatcattctgaaaaaggtaagtccgtcactttatcaagcattaggagttttcctacccctaatcacgacaaactgtgccgtacttggtgtggccatcatggtgattcaaaaagattataacttactggaatccgtcgtgtttgcagcctcaaccgcattaggtttcggattagctttaaccatctttgcaggaatccgggaacaactggaactatcctccattcctcaaggcatgaaaggaacccccatcgcactggttacagccggattgctggccatggcattcatgggattttcgggtatcgtgtaatgggtcaaaagttcataaggtttataaatctataaggtccttggacccttgcaggtgctttgtcaacggcaattctgagttgccattcaatattacccgaaggacacccgtcactttatgaaccttatgaactttacaaactttcgactcacctttccattaagccgataaactcatcatacacgcatcccgtgaaatcggaaagcacccaatcgactttatcctgtatcttctctctcgggttcgtggttgtcagaccgataactttcattcccgcacgtcggccggcctcgatcccggaaaaagagtcttcgaagacacagcaaacatccacttccatctgcaactcccgtgctgccagcaaataacactccggatcgggtttagaccgagtaatcttatctgccgtaatcacacgttcaaataactcggtaaactccggatgagccattagcacatgagccatcttcttgttgtttgaactggtaaccagtgcggttctcaccccatgtttctgtaacgtccggataaaaagctccacaccggggaagtaggggaaatccatccggctctcgaactcgtcaagttccagagaaatctgttgttgcaaagcaacatttccctcgaaataattcttcagaatcaattccatcgtttgccccttgatcatcttgtgaaattccggtttatccggatggtaacgtcttccttgttcccgccagaaattatcgtactgcccttccgtgtcaagcaccaccccatccatatcgaataatgccgctaatcgtcgctctctatccataatctttattctcaataatacataggtcacaaaaatatcgaaaaaagggtaatccggacaaatccgaaacaatttatttggtctgtacgggataacttgataattttgcaaccaaaataaagaatatgcagttaactcatcctatttttaagatattatccggaatcgcggcagagaaagggttggaaatttacgttatcgggggatacgtgcgcgacctgatattacaccgtccctccaaagatattgatattgtcgtgttggggagcgggatcgaattagctgagacggctgccaaacaactcggagacttaacggtttccgtgtttaaaaatttcggaacggccatgttccgctataaaggagtagagattgaattcgtgggagcccgcaaggaatcctaccatctcgattcccgtaaacccgtcgtcgaagaaggcaccatcgacgacgaccagaaacggcgtgatttcacgatcaacgctttggccatatccttgaaccaagaaaactacgggacacttgttgacccgttcgagggacttcaggatttggagaacgggatattaaaaacaccccttgatccgatcatcacgttttccgatgatcccttgcgtatgatgcgggccgtccgttttgcctcacaattgaatttcacgatcgaacccgtgacatttgaaagtatcatcgctaatcgggatcggttgaaaatcgtctccaaagagcgcatcatggacgagtttaacaagatcatggtctcaccgaaaccttccgtgggattaaaattactggaacaatccggcctgttgagtgtcttcttcccggaactatccgctttaaaaggcgtggaacacgtggacggcatcggacacaaagataacttttaccacacgctgactgtcgtggactcggtaagccgtgtttccgacaacctgtggttacgctgggcagctttactgcatgacatagccaaaccggtcaccaaaaaattcattccgggacaaggctggactttttacggccacaatcacgtgggcgaacgtatggtcggaagattattcaaccgcctgaaactcccccaaaatgaaaagatgaaatacgtgcaaaaactggtcggtctccatatgcgcccgatcgttctctcggaagacaccgtgacggattctgccgtgcgtcgcctcctttttgatgcgggtgacgacatcgacgacttgatgacacttgccgaggcggacatcacgtccaaaaatgaagagaaagttcgtcgattcttggcaaattttcagatcgtgcgccagaaattgaaagaagtcgaagagaaggatgcgatccggaatttccaacctcccgtcagcggggaagagatcatggagacatttcaactcccaccctgcaaggcaatcggggatattaaaaatgccatcaaagaagctatccttgatggcataatcagcaataatcccactgaggcccgtgaatacatgttccaagtagcggcagaactagggattcagaaaaaaagtgaatagagatcagaaatgatccttgcgtttcttcacttcatccacgagtttcgtgaaagatttctcttttttccgtttctcgtgttcggaggcagagaaatgccacgtttcccgtcgaagtttcaaataactctcgtaaacctgacgatctagtataccacgactcaccgcatccaacacggcacaacccggctcattgatatgctcgcaatccttgaaacgacacgattgtgcgtagtcagtaatctccagtatctcatcaagcgcaccggaatcatcaaccgcaagaccgaattcccgaaccccgggagtatcaatcaagacaccgcctccatccatcaacaccatctcccgacgggtcgaagtatgacgcccctttcccgtggattgacttattccggacgtgagtaacacggatttctcacaaagtgcattcaccagagaacttttcccgacacccgaagaaccgacaaacacgaccgtctcccccgccgcgataaattctcttaaacgaaaaatcgtccgagactcgtgaatactcgtgtaaaacaccggaatctgccgggtaacgtgccgtatttgctcttccactttttgttggtcaaaacctaagtcgactttattaagcaccagcacgggaataatattttcttcccgcatctgaaccataaagcgctcagcacgacgaacattgaaattatcatccagactttgcacgataaaggctttgtcaacatgagccgctatggcttgtttttcggcaaccgttccgttttttctgcgggacaaagtacgtgaccgaggcaacatatccacgataatccccattccctcatcaaacggctgaaagatcacccaatccccggtgcagggtaattcgaaatccgacttcccgtacatcatgtttcctgtcaactcgcaccggaacactccgctcccggcaaccacctcgtaacacgtccggtgtacaatagcgacacgcccatgtgtgagagttccatacgtcgattcctgtttcagttggtttaacttgtcattccaaccataacgatttaaatctatcattactttatctttttagcgatataaaatacataaccgtaaaactccttgtacttacggtatagttcagcctcgtgatgctgaaaacttattagttcctcgaccgttttattcccggcatatttccggctgaatatctcccgggctttaactaacggggtaaaatagttctccgtccagcaatattccggcaggataaaagtcgccacggggatataccccgctttctgaatctgggcgactttattgggtatcgtgtcgatctcctcgtaaacggacatccaaaaatcatggatctctgccggacgttcttcggtaaaccacgaactctcggaaacggcaacatatcctcccgtcttcagatatttgcgccactcgttcaatccccgctcaaaaccgatattataaatagcaccttccgaccagatcaagtctaattcttcctccccgaaaggcaacgcatccattgaaccgactatgcctttcacccgttcttgaagattcaacaccctagcgttatgattaaaacgctccacgaatcccggaaaaaaatcgagtcctgtaatctgccccggagcgtgccgtgccagcgtcatcgtctgtcctcccgtcccgcatcccaagtctgcaatccgggaatgatccgtaagatggtctataaagcttaacgctttaagcgttacttcgggacttccgggtccctgccgttctgtattcaagaaaaattcgcaaattaaattaacgtcgattccaagaatggtattattttcgttactcatgattgatcaatataaagcatacacgtgaaagcataattctactttcctcgttgtacacggattaaaaattcaaattataataatagaaaaatcaccccccggaaagagctttccgaaagcaagcgaagggacaacctgtatcagaaatacagattgtttattacaccaaatccgattgtaatttagtttttaacatgatgtaaagatacacatattttattcatttgaaaataattgtctctattttcgtataagttggtcatcccctcgtcatacgtacactgtcactcaagcatatctctccaatgaataaatatactacacgaccgagccatccagcaaatataatcgtatcaaaaatcaattttatcgaacaagaatgcaaggggaatgcaggatgaatgctccgtggtctaaatgaactatcaggaaactattaagaaaaagtaaaacgaggatagcctaacactaaggtagtcccagtgtaattttaatgatacgctctagcagaaacgcattcaatattttgtaaatattccaatttagtttatatttgccacgaataaataaaaagattcacgttcgtatcggcaaaataataacacgtggcaacaataacacctttaaattctagttccatctatgacgaaaaaatcgttcgggaacttttcgaacagcactacacgcccttggtgttattcgcaaaaggctatattcccgacttggacacggacaaagatgttgtgcaggaagtgtttctctcgttaatcgaatcccaagagacattcaatgacgtggataatctaaaagcctatctatacggtacggtcaggcacaaatgcctgaaatatctccgccacgaagaggtaaaaagacgctaccaaaaatatatgcaaagcgaggctccggatgaaaccagaacttacgaagaacgtgttcttgaagaagaggtttacgctctcttgataaaagccattcagaacttaccggaacaatgccaaaaagtgtacttgcttgttttagaaggtaaaagcaatcaagagattgcccatcaactccaactaaacatcgaaaccgtcaaatcccacaagcaggtcgggaaaaagttgctttacgatcaactgaaacacattattcccgtcgggattcttattttcttgctggaattttagacggcttcatcccattatttgtgtttgcccgtttacaatttattctctacctttgttactaatgacccggttgcgagccttctttgccgatttcccctatgagttaaatgcccagacagaacgacattatcaagtcgtatcctatctcgttttcaaactcatgggacagtttgtagatgctgaaatacgtagtgccaccagacgggctgatgccgtggttaaaactcccaaatacatctatgtatttgaattcaaactggatggcagtacggaacaagccctgcaacaaattgacaacgggggctatttgatcccgtacacggcagacagccgacaacttatgaaagtcggagttaatttcaatgccgaaaaaagaaatatcggggaatggaagattaaaaatgaataacatactcatctttacaagaaaacacctatcaccgtaatcacaatattgcaatattttcaaaaataattcatttttgactcactcttttttacgctcaaggggacttactatcaaatgagcgaaaagatgagtcaaaaagagaataatatatttcagttagcccgcatcattgcagcgtctcttagagggaaagcaaatgatgaagaacaacgcaccttgagggaatggttatccgtttccacaagaaacgaaaagatttatgacggattcaaagacggaaagcgtctggaacaaaaaatagtcgaatcccgacagatcaattgggagaaagactatcaacaattcatcactaaacggcaacgcacccgcaagaacagaaggatgaaaacgatcatccgttacgcggcaatactcactcttccgatcgtggcggcaagtattttcctacttcaaaagaacgatcggcaagccatcgtctctatttcagaagtcatcaagccgggagaacacaaggcagtactaatcacgggcggaggcgatagaatcacgttgtcggatagcacgttatccccgatacaggaacaaaacgggatgatcgtgaacgtcatgaacaacaaggtcttctatactctaccggaagatagcttatgcacacaagaaagccctatattcaacaccttgcagattccccgaggcggggaatatttcctgacacttgccgacggtacggaagtatggctgaatgccgagacggaaatccgttacccggtacagtttacaggcaacaaacgtgtcgtttaccttgacggggaggcttatttcacggtagccccggacaagaagaaacccttcacggttgtctccactcatgccagcgtgtccgtgctgggaacacaattcaacttccgagcttatcccgacgagcaggacgtgcagaccactctcgtttccggttccgtgatcatgcaatcggaaaaatacaaacaacaggtcaagctggtccccggcgaacaaggcgttctggaaaagaggtccgccaatctcacgaaactggaagtgaacacgtacctctacacggcatggaaagacgggcgtttcgctttccgtgatgcacggttggaagatctgttcaacattctagcccgctggtatgacctcagcgtcttctaccagtccccggaagccaaagacatccggttcacgggtgacctgaacaaaaccgatgatttcaaatccatattaaaaataattgaacaaaatgaacgagtgacatttacagtaaacctgattcttaaacaaatctccgagcccacaagacttggcttaatctcgtattccgtcttctgcttgaaaaaaa

SEQ ID NO: 194 - DNA, 7751 bp, Butyricimonas faecihominis
atccctaaaatcattaatactaaaaacttgtttttcatcatactttaatttacctgttaaaactattctcatgttagatttttatcatttactcctaacaaaaattaagccaagaatgttcaaatcgctcatgatcatttaaaatagatctaactcacattccattatattcaataaaagagagttgcatcataccatagtaatacaactcccttaaatcacttatatcgcaaattatactattccgtaatatttctttgcgtcaacaccaatcccagttccgccgttttcccttcttggataatcggtcccaaatccgtgataaatccagcgtaactctggaattcttcaggcataacctctcccaacataggaagcaaagacataaatggtaataacgtctcccgggtcatatagacatccattgtctctttttccgtatctttcgtgacttcaaaaggaaggccctgttccaacacgaccatgatctctgtcaatgggtcagaagtactacgcccgacatcctctataatacctgcaatatttgccgagatataaagctttcctcccgtcaaattataaaaggccatgcctttaggagacgttgcatattgcggattattcatatcactattgtaagaagccgtgatattgccatcactcgtgaatgttatatcctttagaaaagtgggtaacatccatccaaatataccattcacaaaccctatcacgttctccggagcgacctcggtctcaccgtatttcaccttttccttatcagtcgtaaacgtaaaatgtgtggccataatgcctgcatccagatttcctaccgcccaagttccctcaatatccgtggccttattctttaccgcaagagtcaggttcatttttccttcttcaattttcccggaaaccttcacttcccggaaatcattactgctcgtaccttccactacatttcccgtgatcgtcacgggaatcgccaatgccggttctcccggaatcacgttacccaaggttagcgtgttacctgataaagcgacactctttccactcaatgccatcccgtcccttgacaactccaatcccgaatctttatatgtcccgtcataattcgggtccttgtcatcatcgctgcaagcggaaaaaaacacgactcctaaaatcaacagtaataataatttgttactcataatcgatcatttgttggttaataatatttggaataaattcctaaatattaatttacagcaaagtgtaagcccaagttccaataaatcgcctctaattccgcaacactccccaataacaagtgtctattttcgcataaacccgcaaatcacgtccttacttttattacctttgtccccaattaaacaaataaacccatgagaccccagaattcatcccgtgccaaagccccgcgtagccgtagtttcgaagtacaagaagaaaacacgctaatgcctttcctgttacaagctttacatgaccaaagcaggacagccgtgaaatcattcctcgcccacaaactcgtgcaagtgaacaaccgcatcaccacacaattcgacacgccactcaaacccggggacacggtaaccgtcgggatgaacaaaaatgcggcacctttccatcaccccatgctcaacatcctacatgaggacgaacacttgattgtcgtggaaaaggcaagcgggctactctccatgggaacagagcgggataaaaccaaaacagcctattatatactgaacaactacgtgaaaaataaagatccccggaaccatatctttatcctgcatcgcctagacaaagaaacctccggtatcatgatgtttgccaaaaacaaaaaagttcaagaaatcctacaaaaaaactggaacgaaatgatccgggaacggaaatatgtcgccgtcatcgagggatgcccgcaaccggaacaaggacaggtgaaatcctacatcagcgagaacaaagccttgatcgtccactccacctcttcacaagacgggaaattggccatcacgaactacacaaccttaaaatcgaaccggcaattctcactcgtggaacttgaattggaaaccggacgcaaaaaccaaattagggtacatatgcaggaaatcggacaccccgttaccggagaccccaaatacggggccacgaaaaaccccttgcatcgcttggctctacacgctttcaagctcacttttatccatcccgtcacgggaaaggaaatgaaattcgagacccccgttcccacgaaattcacgaccctgttcaagtaacttgcaccgtactctcaccggagtcgtaggcgtatctcgttaatatcttgattccatttcaagataaaatcaagcacacattcacgcccccgacacgtcaacttcccgttgacttccggttaacttcccgttaacttcccgttgacttactaacgagactacggtacaactacagtgcaagtaacactcgttaccctagaagaaggggaataaaaaacggggaacactcctaaaagtattccccgcacatcaaaaatattttatttaaaacaatgactcgatcaactggtcatcggcaaaattcggtaatgtcaccttcaaattcgggtttgcttccatggcacgtttgatggcaaaaacagccccctcgttacgagcccagctacgacgggagattccattattcacgtcccagaataacatattcttcaaacgtctgtcgctatcggcagaaccgtcaagcatcatcccgaaaccaccgttaataacttctccccaacctacaccaccaccattgtggatagatacccaagtcgcgccgcggaaagaatccccgatcacgttctggatagccatatcggccgtgaaacgagatccgtcatatatatttgaagtctcacgataaggagaatccgtaccggaaacgtcatgatgatcacgtcctaaaatcacgggagcagaaatttccccggtagcaatagccttgttaaacgcctcggctatcttaatacgaccttcagcatcggcatacaagatccgggcttgcgacccaacgaccaagtgattctccatggcagccttgatccaacggatattatcatccatctgttgttggatctctttcggggaatgtgtcttgatttcctctaacacgcgagctgcaatctcatccgtcttcgccaaatccttcgggtcaccactggaacatacccaacggaacggaccaaaaccgtagtcaaaacacatcggtcccataatatcctgcacgtatgacgggtatttgaaatcaccgttcggcttcatgatgtcagcacccgcacgggaagactccaacaagaacgcattaccgtaatcaaagaaataagtattgaaacgtgccacgcacttgttaatagcagccacgtgacgacgcaaagattcttgtaccttttgtttgaataactccggctcctcggccatcatccgcttggactcctcgaaactcacgcccacgggatagtaaccaccagcccacgggttatgcaatgacgtctggtctgatcccagttcaacaggcacatcaccctccgcgaaacgttcccacacgtccaccacgttcccctggtaagcaatggaaacagtctctttcttctcacgagccactttcacccgttccaccagtttatccaaatcatcaatcacctcatccacccatccttgagagtgacgggtatgcgtggctttcgggttaatctcggctgtaatactgatacatccggcaatattcccggctttcggctgcgcacctgacataccacctaatcccgcggtgataaacaattttccggctaatccttctccatgtttggaaatcttacgcccggcattcaacacggtaatcgtggttccgtgaacaattccctgcggaccgatatacatgaacgaacctgcagtcatctgcccgtactgggaaacacccaaagcgttaaaacgttcccaatcatccggcttggaataattcgggatcaccataccgttcgtaaccacgacacgcggtgcatccttatgcgacgggaacaatcccatcgggtgaccagaatataacaccaacgtctgctcgtcggtcatctccgacaaatacttcattgccagacgatactgtgcccagttctggaacaccgccccgttgcccccgtaagtaatcaactcgtgaggatgttgagccacggcataatccaagttattattcatcatcagcatgatacccgccgcttgcaggctcttgtgaggataatcattgatattatgagcatacatcttgtaatccggacggaaacgatacatgtaaatacgcccgtatttctccaactcctcggcaaactccggggccaacacggcatggtgtttcgggtcaaaataacgtaaagcgttacgtatcgccagtttcttttcttctttcgtcaggatgtctttccttttaggggcatggttaatctccggctcgtaagccttcggagccggcaattctgctggaatcccttccctaattgattgttgaaattcttgtaatgtcattatattatcttttacttcattttattattgccattccccacgaatcaactaataatcattaatttagtctctactttcccactttttagtttttaacttttagtttttaactcaccaatcggctggctaaattaatattttcaaatgaaaaaaacactatttttgcctaacaataaaacagaagatgacatgaatataagaataggcgacattgtacgatttatatcagacaagctagagggtaaagttaccggcatcattgacaacaacaccgtgaacgtgtattgtgacgaatacgggttcgaaattcccgcatccgtgaataacctagtggtcattcattccgacagtaacacgacaaaaacggtttccgccacatccgcatccggacagaaaaacgtggtcatggaatcggccgataccctttacatcgcgttcgtccccgaaaatttcaacaacttgacagaaagtcggttcgatatttatttcgtgaacgataccactcaaaccagtctttattccatctcgtttcatgacggggaaaagtacaccgggattacggcaggcaactgcaacccgaacacgacatacctgatcggcaattactcgctcaaagaaatcgacacgattaaagcgatacacgtgcaatccgtgttctatcagaaaggcgttcacgttctgaaaaacgccatcgacacgcaaatcaaggtcaccccggtaaacttgtgtaaagcgggagcttacaaacatacccgctggtttaattccacctcgctactccgaccgctggacaaagaatccatcgtcaaagaagaaggcttggaaaccattccggaacaatttttacaaaaaacgcctcataaaacggaagacacgtcccacaaggaaactcccaaacaatccaatagcaacatcatcgagatcgacttgcacattgacaagctactcgacgacacgacaggcatggaaaacaaggatatgctggactaccagatggacgtgttccataaaacactggaacaatacaaactccgccggggccaaaagatcgtgttcatacacggcaaaggagacggggtattaaggcaacgtatcctctgggaacttcaaaccaaatacaaacgtttcaaccatcaggacgcctctttcaagcaatatggttacggggccacgatggtcacgataaaataatcaaagattaaaggaataccccacggaacagacccaatttttcccgtaaggagaatacttatcctgtatcacgtcataataaaacatcacggagatagagcctgttccggtgggaataactccacctccccccactagcatcgtggggacataacggaagtcaatcttcttctcatacgattttccccaacttcccttcagttccggctggatttggagggcaatataccgcaccgggttcacccgcccgaacacgtttaccccgagataattcatatcataacgattggaagaatggtgataattgtaacttacccctcctcccgccgagaagaactcgttccaacgatacccgatctggggagaaacatcgatactggtataatccccgaaggacatcccgcaagaaccgcttaatgtccattttcccgttttccgggacacggacgatttcaaagggacactctttttcacgggagctttcaccacttggcgttttgccccggatttatagatcgtgtccaatcgaaaaccattacgattttcctgagcctccaccctcccgaaagaggctgttacaaacagaatcaaaaccaaccagaatctcgtcatcattcatcattttaatgggaaaaagctgttcaaagacaccttcaaacagcttttttatttcaaaaagttctcttcgagagaaaatcacttacgcatgtaattctccgatgtaacgttccgcatcaatagcagcacggcaaccggttccggcagcagcaattccctgacgataagtcgggtccatcacgtctcctgcggcaaacacacccggtacattcgtcttgcaagacttaccttcggtaatgatatacccttgctcgtcgacttcgatatattttttgaacacttctgtattcggagtatgcccgatagccaggaagaacccgtcaatcttgatttccttggttgcctcttccggggtccccttcttgtacaccaaacgagcgccctcaactcccatgtctgacccaaacaattccaacgtgttatgctcgaacaatacttcaatgttttccgttctgaacacacgttcctgcatagccttcgatgctctcaaatagttcttacgaacaatcaaatatactttacgacacaacccggccaaataagtagcctcctcgcaagcggtatctccaccacctacaacagccacgtcttttccgcgatagaagaatccgtcgcaagttgcacaagcactaacaccagccccgcggaatgcctcttctgaaggcaaacccaagtacttggcagttgcacccgttgcaataatcacggcatccgcctcgatcaccttctccccgtcgatcgtaaccttatgaggatgaccggaaaagtcaacatccgtcgcgatcccgaaacgaatatccgttccgaaacgttccgcttgctttctcatatcttccatcatcaccggaccggtcacgccttccgggtatcccgggaagttttccacttccgtggtcgtggtcaactgaccacccatttgcattcccgtgtacaacaccggattcaaattagctctcgatgcgtatatcgctgccgtatacccggcaggccctgatcctataatcaagcatttaactctttctatagcattttctgttgacatagacaattcctttcttttaatttacaatacaatttcacgtaatggattgcaaagttacctaaaaaaatggtttatccaatttttttaccccatatccccgtattctcattccccaaacccatgaaaacctgcaatctaagccaaaaagcacaaacaatcatcagatttttctctcaactccttgtttcattccaaatttttttactacatttgcatccgcatttcgggatgtagctcagcccggtagagtccacgtctggggggcgtgttgtcgcaggttcaaatcctgtcatcccgactactgagtatcaaacaattagagaggttaaaacaacctc

SEQ ID NO: 195 - DNA, 7708 bp, Butyricimonas faecihominis
gccatataccatttagaatccaacatttaatgaaaaattaaaacttctcgcaaacggataatttatagctctctcctctttcacacttctccatttacacaaatcattcgcactaaactgcacgctcaagcttttgagtttccacttagaaatcaactgacggctaaaatcataacctattgaaagacttgtaaaatccaaacgattatcatcttgcacgaatctggaagtcggattttgtgtcggatttttactcaaatcataataaggaaccacgtctcccgcatttttccatcgtgcagacaacacccgtttatccacattctgcgtgctaacctgagcattctcgactttctccgctaatgttgaattataactctgtcctccccactgataattgaaataagcattcaatgtgattcctttccatgccacattgataccgaaagaacctttggcatccggttccgtatccccgacaacaacttgatcattagcatcccacgtgtaagtcgacatcccgtttttctttacaaaacgttcacgtccattagccggatctattccctcggaacgaaccgcatagatcgcagacaaggactttccttcataatacaatatcaacggcctgcttaacacatctttgtacttagaatcttctttctcgtattcggcaagaatcgtttcattataagcattcatctcctcactcaattcagtaattttactcctgttagaagataaatttgccataaacgtcaccatccaatctttattctggaaaagagtagaagtcaacgcaacttcaaacccttcattcaacgttgctccagaattctccttgtaagaagtaaaaccggaataagccggaattttcacgtcatcgatcaaatcttctgtttcattccgataatacgatccctccaaagtaattttatcattcagtaaacctatattgaaacctgcatccaacttatatgtcgtttgccaagtcagccgcgaattccccaaagccatcaaagaagctgcaggccccgtgaaaaaccatgcatctgttgctgtttggaaggttgttatggccgaataaggagcgaatcccacatttccagtagaaccgtaagaagccctcaattttaaacgactaatcaaccaatgcccttttaagaaatcataattatgaacattcaatccggctcctactgaccaaaacggagcaaattgcttatccgaaccgaaatcggaacttccatccaaacggaaagagccgtcgaacaaataaatatcattataggcgtaattcacggaagctaaaaaacctatcttacgagttttagattccgacacatttaccggcctggcctgagtggctgcaaattgaggttcatgcatattccccaattggaaaccatttaatacatacgataacgactccgttttgctttcagaaatctcccctccggctgttgcattaataaaatgattgccgaaaacatgattataataaaacatcatttttccattccaactccaattatcattttcttgccgactcaactctcctttctgatcggcaggagttacatcatatacaggatctgcaggatccttaaaattatccgtacgaccatccgttctgcgaagacctaattggcctttaaacatcaatccttccataatatgaatgttcaactggaaattattggttaaatcccggtttttcatcttgccatagaaagttgacaaattggccactttccacaagggatttatcatagaaacagtagttccaagcacttctttcaacaagcgtccgttttcatcatatatctcagcataaggctgtgcttcagcatattgagtatactgcccataaggagaatcctcagactctgtaaccgtataagaaatattattcaataattgtaaccaacttcccgcacgataatccaacgttaatcctcccccataaatatgacggaaagaacctttcatcacaccgtttttactcgcattataattcaaatctataccatacctgatgctctcctccccaccagatacattcaaactatgcatatgaccaaaggcattccgcaaaggttgcgacatccaatcggtgttcaccccgcgcaaaatagcattttgtttcttataatattgagccgtaagttcaatttgtttttccggatcatcagatgaatataaaccacttaagcgttcaacttccaatttttcagccgcatcacaaagattataatcagacagatccgggaaatccacattaccggaaaaattataataaatctgcatctctcccggtttaggagcaaccgtcgtaacgacaaccaccccattagcagcttgagaaccatacatagctgttgcagcggcatccttcaaaatggtaattgactcgatacgatttacatccaaatcataaattttctgaacatccacctcgaatccatccaaaataaacacgggcaaattaggattattttccaaagtcgtacgctgtgttcttttctgctgttccacatccaatcctttcgtctgcccaatagaagtctctccccggatattaaactccggtaaagcatttggatccgatccccacaatttattatctttgatccggaatgaaggatcaaacgtttgtaatgctgcaatcacgttttttgaattcactttcattaactgctctttagttacagtcgtagctttaccggtaaaactctctttacgaatattggagtaccctgtcacaaccacctcgtccattttcttgtgatcttcctccattacaacgtttatcgaatccagtcctacatatttaatctcctgtgtccgcatcccgacaaatgaaaacaccaacacaaaattagtatcacgcatggcgggtaaaaccatcctgtattttccctcgctatcagttgccgttcccaaatttgttcctttcaccaccaccgttacccccggcaacggcatctttcccttatccactaccttaccgacaatcttgatttctttcttcttttcatcattcaaaggtttcagcacgatcacctcattttgaaaaacatacgtcaagccggttcctttcaaacagtcactcagaatcttttccaccgttgaggcttttgcctcaacattcacttttcccaccttatccaaatcttcctcgtgatacatgaaaacaaacgtggtttgtcgctgaattgcccataaaatatccttcaaataggcattcttcatagagattgtaacctgttgctcgttctgggaataaaccgttccgtgcgtgtttattatccctagaaaaacaaataaaaaagtccatttcgacataagccataatttttgtaatttctcacgtttgcacctgagaaacattagaaaattttccataaatttgttctcccaattattagttaataattatctcaatgttaacgaagtaattcccgcaggaaatgttggtaccatttcctgcctttatctacctcgttgtattttcagcacttttccctctttcgttatctttattttgccgttcaattcaaaaatattcaacaagggttctatcgtttcgagacgactcatgttaaaaccgaaatgtaaatccttgacactctcatcctcgtacaccacagtcatatcataccatcgttccacgactcgcatgatctcttccaaacgaacatcccggaaccggaacataccatccttccaagccgtataataattcacgtccactttcctaacttccacgcctccagatgtctgatctaacaccaactgttcattaggccataatgttcttgccgctccaatacacttaccagagatggaaacaaccccctcaaccaatgttgtcgtgatcacatgttcatcggcgtacgccgtgacattaaatttcgttcctaacactgtgatctcataccccccggtcttcacgatgaaagggacatctttgttcttagttacctcgaaaaaagcttctccacacacttccacttcccggcatttttcagaaaaacgttccgggaaacgcaccttcgtcatggaattcagataaacaagcgttccgtcactcaacactaattgatactcccctcctttcggcacgatcacctcgttatatcttaaagagtccatcggagcctgatttcctgtatttttataggaaagagtttttccctcgttattaatgactgtattttccccacgcgatataaccccggatctcgcaaccaaatcaaccacctcccccgaaggcaacaccagctctgcccgggttcccccgggagtgattgcattcagatccgccaaagagacggtctcctctcccgaatgaagaacgccataaacagcaacacccaaggggatcaacaaaactgccgcgtaacgtaaaaacactcgccggcgcatcgccttcttctctgttttccttaattttttcgagtatccctgccaaccggaaactttatcaaaagtcgtgaaatgtttttgtttcgattccctcccctcccgatcaacgatccgatcatacaattgacgattccgctcggaagtctcccgccaatcatccaaagcccgctgttcttcatcagacaactcccccgccatggcttttgcgatccaagaggctagcaaaaacggatttcccgtccattcttcgttatattcattttttcgttccatgttcatttatcggcacgtaatattatttttatactattacaacacgaaaaatggaatttatggggaacgaaaaattcacttttttgaaagaaaaaacaaacagctctaaaaatcagctatttattcaggaggaaaataaaaaccaaataataatattctcgcaaaatctcgcgcaatttcttgtacgctattttctttaacgtatgcacggaactctcggcaattcccagctgtccggcaatctcgctatttttcaagccatccaaagacaacaaaatcacttgtcgggtttggtgaggtaaggattccacggcattataaaacattcgataggcctcttcctctaccagcgtctccgtgtaaaattcaagagattcaaccacggaaagatcctcccgcctcaacttgtaatcgcgtatatagttcaaacaatcattccgcactatggtataaaggaacgatttcaccttgaaataattatcaaacccctcccgtttattccagaatttcacgaacccttcctgaacaatatcggcagataaggcatcgtctttcaaataggtggacgcaaaaacgcacaaggcttgataaaatttatcaaacagttttttaaatacttgctcgtctatccgcaacgagctctcgttttccacgtccatacaaatgctttcttttgttattaaacacaaacctaatgaaaaatatgacaagcagcaaactcatgccataaaaaaaaacttgccgcccgtctctatacccgttcatttccggacataaaacaataaagataacgtgattattgttaagaaacttcgaagagatagatcccgcagacccggaatagcatcccttatcccgggtctttaccggggatataatggcccgaaattttattcttgagcgtgaatagcctcgttattaacccggttgacgggatattcgagtatgttatttttgttttccatctgttaaaatggcggcgataatcgggcgagcatcgggcgacaatcgggcgatggcgcctaacagcctcccaatagtcgccctaccgccatgtaacggacatggataaccccgggaaaaaggatgctaaacactcctagttgccaatccataaacaattcactactttcgcgacaagaagaatgacacttatatcacaaatatgtttatagatactcactcacacatctatgccgaagagttcgacaatgacagggaagaagttattcaacgggcgttagcagccaacgtccgacagattgtactgccggatattgacaacacgacccggcaagcaatgttatcactggcgcaagcccacccggacatgatgtaccccacgctgggtgtacacccgacttccgtaaacgaatcctacaaaacggaaatgcaacttttcgagaaattactaagccaagaaacaatacacggaatcggagagtgtggaattgatctttactgggataaaacattttacaaggaacaaattattgtcttcgaacgacaattaaacatcgcccgggaaatggatttgcccgttatcatccattcgagagactcgctaatggaaatattcaccgtgttaaaaagacaacactataacatgaaaggtatactccactgtttccccggcacggaagaagatgcccgtcgggcaatagacttaggttttctactggggatcggtggtgtcgttaccttcaaaaaatcatccatggctgaagtcgtggagaaaaccggggcagaacaccttgtattagaaacggatgctccctatcttgcccccgttccctaccggggtaaacgcaatgaaagtagttatattacgtgtatagccgctaaaattgctgaaattctagggatcgacacgaaaaaagtcgaggaaataacaacgaataatgcaatgaatttatttaatttgcacgtcagtagtgcgaactgttcatagaaaagatgcagacaggtaatttactgacgaaaagtgcagagggagcttaaagcttgtaatgttttagtttttaacttagtgcgtatgacaaaacccgtgttaatcatatataccggaggtacaatcgggatggtaaacgatcccgaaactggggcgttatgccctttcaattttgaccagatcgcttgcgaggttccggaaatcaaagaatttggattcacgatagatagttacaccttaccggaaatcatagattcctcagatctccaaccacaattgtggaaagacctctgttcaatcatcttgaaaaattacgatgattaccggggatttgttgtcctgcatggaacggacaccatggcctactcggccgcggccttgagtttcatgttaaataacttgaccaaacccgtgatctttaccggttcccagctacctatcgggaaaatcagaacggacgggaaagaaaacctgatcgcggccattgaaatagcagccgcttacgatcaagaaaaggccattgtcccggaagtctgcatcctgttcggggataaactattccgaggaaaccggacgacaaaaataaacgcggaaagtttcgatgccttccagtcattcaactacccggcattggcaaacatcgggatacatattcattacgattacagtgcaatcgattacaccctgcgaacggaacccgtaagtgcattctgtgacgtggacacgaatatcgccatattgaaaatattcccgggtatgagaccggaagtgattgacgcagtaacagggattcccgggttaaaaggaatcattctggaaacatacgggtcaggcaacgctcccacgaataaagtttttcttaacaagatcaaggaagtactatccaagggaattttcgtgtataacgtcacccaatgtcaaggtgggagcgtcgagatgggtaagtatgaaacaagtagagagctacttaacgcgggagtcatcagcggtcacgacattaccacggaagccgctgtatgcaaaatgatgtatgtactgggcaaatataaagac

SEQ ID NO: 196 - DNA, 7654 bp, Butyricimonas faecihominis
catttattgacacttagttttaatgaaaatttgtaagataaaattaatatataatacgtttttagtatggagaataaattagatattttgacccaaaagctttacaacgagggggtagataaggctcgccaggaggcggagaatatcatcaaccaggcaaagcaagaggccgaaaagattattgccgatgcgaaagcgaaagtagcacagatgaatgctgatgcggagacagaggtttctaacttgaaaaagaaggccgagtctgaaatgacgttaagtgcacgccaagctatcacggctttaaaacaggcaatcacgaatcttgttgccggtgatgttgccggtgatgttgccaagatcgggttcgaggaaaaagcttttattcaggagttgcttatgacgatcgtgaagaagtgggatgtagccggaggaaacttgaacatggaaattcttctttccgaggatgaaaaggcaaagttcgaatcatttgttgcggccaagtacaaggatctgttggataaaggtcttgatgtaaaggtgggtaatttagaagaagggtttgtgatccggcctaaagatggtggtttccagattgctttctccgaaaaactatttgaagctttctttaatcagtacatgaagggcttcacgaaaaaactgttatttaaggattgagtgattatagattaagtgattgaatcacaaaatcgttgaatcattaaatcacagaatgaataatatgatattaaaaaataactactactgttttattgcaggactaccggaggtctttctggatgatcggaaactagcgttgtccgtgaacgggtttcgggagttggctcgggaggctctgaagaaggaggatgtgaagttgatggagttgttttttctgcctgccgataataaacaagttctgcggttgctaaataaaatggctcccgataccaatcttgaaacagtatatccattacaacgtctggaagacgaaatcaccgaaccgacgaattctttacctacttacctcaatcgatttatcgcagattttaaaggggaacatttgaaatatgatgtttctccggagaatgtgttgagttggatgtattacgatcacttgatgaagagtggcagtaagtttgtccggaattacgcggaattcgtgatgaacgtgaagaatctggagacagccttgacttgtcggaagtacgggaaagaggttgccccggagattattggtaataacgcattttctaaggcgctgagaacttcgaactcaaaagatttcggtttgggaatggaattcccgtacgtggaaaaagtgatttctctgatgggaaatacaaaccttgtcgagcgggagagaggactggatttacttctttgggattatatcgaagaggccgtggtttacgagtatttctccatggagaaagttttgagtttcatgcttgagctgatgatcgtcgagcgatggagcaagatgagttccgaatcgggacgaaaagtcttcatggaagtcgtggataagttcagaaagagtttcgagtttgcggaagaatttaaaaattaaaattgagacatgaataagacacaaggaaaagttcatagtattatttccaaccttgtacttgtgcgtaccgaaggaccggtatctcagaatgagatttgctttatccaacttggaaacgagcggttgatggccgaggtgatcaaggttgtcggggatattgcttatgtacaggtttttgaaagtacccggggattgaaacccggttccctcgtggagttcgaaaaccatatgttggaagttacgttgggtcccggtttgctgtcaaagaattttgacggtcttcaaaatgacctggataagatgacgggtgtattcttgaaacgaggagagtacacgaacccgttggaagaagataaaaaatggagttttaccccgttggccaaggtcggtgataaggtgaccggtgccgattggttgggcaacgtgaaggaaaactggctggatcataagattatggtacctttcaagttgaaaggggaatataccatcgcatcaattgccgctgccggggaatacacgataaaggacacgattgccgtgctgaaagatgaggccggaaaagaaattcctgttacgatgatccagaaatggccggtgaaggtggctatccgtaattacatggataaaccccgtccttcccgtcagatggagacaggtgtacgtgttatcgacacgatgaatccgatactggaaggggggaccggttttatcccggggccgttcggaacgggaaagaccgtgttgcaacacgctttgtcccggtttgccgatgctgatattattatcatggctgcctgtggtgagcgtgcgaacgaggtggtggagatctttaccgagttcccggaattggaagaccctcgttccggtcgtaagttgtacgagagaaccacgattattgctaatacgtccaatatgcccgtggctgcccgtgaggcttccgtgtacacggctatgacgatcggggagtactatcgttccatgggcatgaaagtgttgttgctggccgactcgacttctcgttgggcgcaggctttgcgtgagatgtccaaccgtatggaggagttaccgggacaggatgcgttcccgatggacttgtcggctatcatttcaaatttctatgctcgtgcgggaatggtgtatttgaataatggtaagacgggatccgttacttttatcggtacggtatctcctgccggtggtaacttgaaagagccggtgacggagtccacgaagaaagtggcacgttgtttctatgccttgtctcaagctcgtgcggatgcgaaacgttacccggcaattgatacgttggaatcttactcaaaatacttggaatatccggaatttatcgagttcgccaagaagaatatttccgatacgtggattgctgatgtgaacgaggctcgtaatatgttggttcgcggtcgcgagacggcagaacagatcgacattttgggggatgacggtgtgcctttggaatatcacgtggtatactggaagtccgagttgatcgacttcgtgattctgcaacaggatgcttttgacaacattgacggttctaccgcaatggagcgtcagaagtatatgctgaacatggtactgggtgtggttcgttccgaatttaattttgacacgttcgaagagattaacccctatttcaaacgtatcattaatggtttcaaacagatgaactattccgaatatcaatcggaagcgtttaaaaagtatgaggcagaagtgaacgagatcattaacgaaagaaaaaagaaataaatttagtgattaggtgatataatgattaagtgatttgactttatattgagaagaatcacacaatcatggaatcgaaaatcacagaatcaaaaaataaattatatgacgactgcttttcaaaaagtttatacaaagatcacccagatcacgaaagcaacgtgtacgttgaatgcccagggcgtcgggaatgacgagctggctattgtagacggacggttggcgcaggtcgtgaagatttggggaaatgatataacccttcaggtgttctccgggacagaagggattccgacgaatgcagaagtgacattcttgggaaaagcgcctactctgagagtgggagacgatttatgcgggcgttttttcaatgcctttggcgacccgattgacggggggcctgcagttgacggggaagaaagagagatcgggggaccttcggtgaacccggtgcgtcgtaaacaaccgtcggaattgattgcaaccggtatcgcgggaatcgacttgaacaacacgttggtgtccggtcagaagattccgttctttgccgacccggatcagccttacaaccaagtgatggcgaacgtggcactgagagcgcagacagaccgtatcatcttgggtggtatggggttgacgaacgatgactacctgtatttcaaaaatttgtttgacaatgccggggtgttggatcgtatcgttagtttcgtgaataccacggaggcaccgcctgttgagcgtttgttggtaccggatatggcattgacggctgccgagtattttgcggtggacaagaacgagaaagtattggtgttgttgacggacatgacgttgtatgccgatgctctgagtatcgtgtccaaccgtatggatcagatcccgtcgaaggactccatgccgggttcattgtattccgatttggcgaagatttacgagaaggccgtgcagttccctgccggaggttctatcacgatcatagccgtgaccacgttgtctggcggtgacattacccatgctatcccggataacaccgggtacatcacggagggacagttgttcctgcgtaaagacacggagattggtaaggttattgttgacccgttccgaagtttgtctcgtttgaaacagctcgtgatcggtaagaaaacccgtaaggatcacccgcaagtgatgaatgccgccatccgtctatatgccgatgccgctaacgcccggaccaagatggagaacggtttcgacctgacggactacgaccgccgtaccctagatttcgccaaagactattccaacagcttgcttgctatcgatgtaaacatcagtaccgatcagatgttggataccgcttgggatcttttccgcaaatactttaacaaggcggaattgggaattaagcaggaaatcgtggaagagtttggaggatttagtgattaggtgattgacgattcagtgattaattaatacagtttatgaatcagatagagtttaaacgtagaacaaaacagttggggttagccgtgatcaggatgacagaaaagtttccggagacacggttagcttgggtcgtgaaagatcagattttacgttcggctttatcggttggtgctaactatcgggctgtgtgtcgagcaaaatcggataaggatttcatcaataaaatgaggatcgttgaagaggaagcggatgaaacagcttattggcttgaaattattgaagagtctgatttactaaaatcagatgatttgagagaactcaagagagaagtaaatgaattagtggctatggttgtggcttctatccggactaaaagtatcgggcttaacaaagagcagcaatcacagaatcattaaatcgcaaatcacagaataatttaataatttggtaaggtgataaagtttcaatataataagacatcgcttcaagggctggataagcagttgaagatgcgagtgagggcattgcctaccatcaaaaataaggagtcagctttgcgttcggaggtgaagaaggcgaaacaggtggcggatgagtttaatgtgaagttggaagaaacgctgaattcattgaacgatatgctgcaactttatgacgagtataaggaagacatacttgtcgtgaaggatgtcaggatgtcggtgaaaaagattgccggggtaaagacgcctgttctcgacggggtggattatgaggtgaaggatttcagtttgtttaatcaacccgggtggctactcgatggtgtggaatacatcaaagaggtagtaagtatcgctttggagagggaatttttcacccggaaaatggagctgttggatagggcgagaaagaaaacgacacagaaggtgaatttgtacgagaaagtgcagattccgggattccaagaggcgattcgcaagatcaagcggttcttggaagacgaggaaaacctttccaagtcgtcacagaagatcgtgaaaacccgtaaattgatggaggaatagcctatgatagtacctatgatgaaattgtccctgttgatattttacaaggaatatcaaacatttctcggagaactccgggaaaagggaatggttcatattcatgagaatacggaacgtacggcagaagatacggatctacaggcgaaattgatgttgatcaggcggactggggagatgatcacgcgcatgcagagtcggaatgacgtggagcaggtggaaaaagtgaaggtggatgacgagcatttgctggattatctggaaggtttgtatagtcggcaggatcagatcgagcaacaattggcaggtttggagaaggaccatgcggcttatcgtccttggggaaaattttcccgggagatgatccaaaaactggagactgccggttgggaatttcatttcttttccgtgccggaacagaagtatcagccggaatgggaagagatgtatgacgctgttataatcagcgagatgatgggacagaaatattttgttactgttactcctgctgggacaagcgtgaacttggaggctgatccttatcttttccctcaagccacggcagaagagttggcaaagcaaattacggctttgcgagaggaatccgtgaacatcgggaaagagttggatgctgtttctcaggatgcgattgaacggctgaaaaagtatcgtttgaagattaccgaggtggcagacaagattaaagtggaggatgccgctcaacatctgattgacgagaaagtcattgctttggaaggatgggttccggtggaaagagagactgaaatgagaagttttctggaaacgaaagatgtgtacttcgaattcacccggcctactccggaggatgatgttcccgtgcagctgaaaaacaatgcttactccaagttgtttgaaccggtaacggaaatgtttgccctgccgcaatatagggagttggatttgacgcctttcttggccccgtttttcatgctgttcttcggaatgtgtatgggtgatggcggctacgggttgatcatctggctggcttgtttcattattggccggaaagcctcgccttcggtgaagggttaccttgtgctggggcaatatttgggaatcatgacggttattgtcggcttactgacgggttcattctttggtatcgctttggattccgtggaatggccttggttggctggcgtgaagtcactcttcctgacggaagcgaactacgggaaatatctggggggatataacccgatgatgattatcgcggttgccgtgggtattatccagattctttacgggatgtgcttgaatgccgcaaggttaacgaaacagtttggatttaaatatgcggtatcgacgttaggttgggtcgttgccattatcctgttgggcgtgttgatcgggttaccgatgctaaaagtcgtgatcccggaaggtttgaaatacgtgctttacgctttgttgggcctttccgcgttgacgatttatttctacaattctccgggaaaagggatcttctctaattttgggtcaggattgtggggaacgtacaacatggctacgggattgctgggagacacgctttcatatatccggttgttcgcgatcgggttaacgggaagtatcttgggaggtgtgtttaacacgctggctttccagcttacggatggactaccgtttatcgtgaaattcattgccgtgttcttgattctgcttgtcggtcactcgattaacttcgggttgtgtatgatcagttcttttgtacacccgatgcgtttgaccttcgtggaattctacaagaatgccggatttgaaggcgggggtaaacaatacgccccgttcagaaaaaaagtaaatg

SEQ ID NO: 197 - DNA, 7578 bp, Butyricimonas faecihominis
tcctaaaactgtctattatgaataaagctcaattaattgacgcaattgctgaaaaagctggtttgtcaaaagcagattctaaaaaagcattagaggcttttgtagctacgatcggagaatctttgaagaaagatgagaaagtggcattggttggtttcggatctttctctgtatctgaaagaagtgcaagagcaggtagaaatccgcaaaccgggaaaacaatccaaattccggcaaagaaggtggtgagatttaaagctggtgctgaattggaaggccaactataattaccatttaagagatttaaaggggggtgttttgagacaccctttttttgttcatcatcaaattgatttggtgatgaacaagttgcaagttacaggtttcccggttgcaagttgtgaaaactggagcgaaatgaacttgtaacctgcaacttgtgaacttgtaacttttaacgtgacgaagtcaccttaaaatagcattatgcatactgtaagagagcaggttgagtatctgagtgagtttgtgacggattacaagaatgatttgtttcgtcggttaatcgcggaacgaacgagttatgtcacgatggtacttgaggatttttaccagcaacataattgtagtgccgtgttgcgttcgtgcgattgtttcgggattcagaacgtgcatgtgattgaaaatatgaattctttcacggataattccgagatttctatgggagctgccgactggttgaccgttcatcggcatcggaagagagagaataacacggtggagacgattgagatgttgaaatcacaggggtaccggatcgtggcgacaactccgcatgaacgagatacttttattgatgatattgacctttacaagggaaagatggcttttttcatgggaacggagctgacgggattgtcggatgacgtgttgtcgagagccgacgaatttgtgaaagtacccatgtatggttttacggagagttataacgtgagcgtgtgtgccgctttactgatgtatagcgtggtacagcgtttgcggcaaacagatatagactggcatttaccggaggaggaacgttacgaagtgttatttgcttggtacaagcgttcgatcaaggcttcggctcagatattggaaaggtttaatcataacgagtgagagatgtattatttgaaatgtaaacattgtaatcacctgaacgaggtgaagtccgagtatttggtggtatgtggtttgtgtaaccggaaactggaggataattataaggattggaaagtgaaacacccggagaagtcattcgaggatttccagcgagaggtttgtttgacggaggaacaggtgaagaagggaaatatgatgaaaccgaccgggaagaaagggaataagaaaggtttgattgccgggagcatcgggggaatactggttatattgatggttgcgcttgtcataaacgggatgaaggatagttatgatgcgttgtatggagatgatgatatcccggtgttggaacagcaatggtacactggaacatatgcgggaggggtgtcccttgccacgcccaaggcgatgaagtccgcggggtccatgatcaataagttgccggaagaagtgcgtcctttgattaaagagatacaaacttttagttataaagggaacggtttggagtttatgtatttatataccgagtacacgcctgaagtcggacaggttgatttggagggggctgtaaacgggggattgaatcagttgaagagtcagccgggagtgttcgatctgaaaaatgatattgcttacgtggaggagggtgatttgagtggggtcgttatgcagggaacatacgtgcaaagagggacggaatatgaatttaagattactttatacacgaccggattgaaactttatcaatttatttcgagtaataagaaaggagatgacacggccagaggtgttgtgcgtcgaatatatgattcgttgaaaatcagcggacatggaacatcagaaacaggaggtgcagaatgaaagaacaagtgtatttattagaacaatttgacgatataaagatattgcgttacgatgtccccgcttttgagggattgtccttgcgggaaaagttatttgtttattacttgagccgggcggctttggccggaagagatattctctgggatcagaataataaatacaatcttcgggtccgggaggcattggaaagtattcttcgggcatatcaaggaaaccgggagacggaagagtttcaggcttttctggtgtacgctaaaaaagtgttttttgctaacggggtacatcatcattactcgatggaaaagtttaccccttcctttactcccgaatattttaagtcacttcttcgggaagtgggagcggaacagttgtacggggaagtggaacgtgttatttttgatccgaaatatatggcgaagcgggtggttctggacgaggggaaggatctggtgcaggcgtctgccaatcattattacgagggggtgacacaagaagaggtggagaaattctacggggagaagaaaaaagagaatgcgttgctttcttggggattaaattctacgttggtacgtgatgaaaaaggtcagttgcaagagcaggtttggtttgccgggggaaaatacgggaaagaaattcgtcgtatcgtggaatatttgaagaaagctgcggaatatgcttgtaacgagcaccagcgagaggtgattgaattattgatccagtattacgagacgggtgatttatccttgtttgaccgctactctattgaatgggtgaaggaggtggcagccccgatagattttatcaacggttttattgaagtgtatggagatccgttagcgtacaaggccagttgggaatccgtggttcagattatggatgaagaggcctgcaagcgtacacgtaaattggcggataatgctatgtggtttgaacggaatgcaccgattgatgagcgtttcaagaagagtgaggtggtgggtattacggcgagagtggtacaggctgccatgctgggaggggattgccatccggcaactccgatcgggattaatttgccgaatgccgaatggatccgggagcgttatggcagtaagtcggtaacactggataatatcacgtacgcgtacgaccgggcttcactgaattccggggtactggatgagtttgcctattcggacgaggaaaaggaactggtgagaacgtacgggtatatcgggggaaacgtgcataccgatttgcatgaatgtctgggacacggttccggaaagatgctaccgggcgtgggacaggaggcgttgaaaaattattattccacgatagaagaggctcgtgcggacttgttcgcattgtattacgtgatggacccgaaactggtggagttgggggtaattccctcgctggaggtggcaaagagcgagtattgcaattatatccgcaacggtttgatggttcagttgacccgggtgaagttgggaaataatctggaagagtcacacatgcgtaatcgccagttgattgcctcttgggtttacgaaaaaggcaaagcggctaacgtgatcgagcgggtaagtcgggatggaaagacgtatttcacgatccgggattacgaggctttgcggaaactgttcgggagattattggccgaggtgcaacgggtgaagtcggaaggtgatttcgagggggctaggaatttgatcgagaattacggggtacggattgatcccgtgttgcatcaggaagtgctggaacgttatcaaaaactgaacgtggctccatatgccgggtttgttaatccgaagtatagattggtggaggaagagggaaaagtagttgatgtgaaaatagaatacccgacagattttctggcacagatgctggaatacggggataataaataataatgatgtttatgttgcaaatgacactggccgcgataaccctgccgttgacggacccggttttgaagttcctgttgattttggtaattatcttggcggctcctttattgttgaataagttgaggattccccatttgttgggattgattattgccggggcaattatcgggccgaatggttttaacttggtactacgggatagtagtattatcctttcgggaacagccgggcttttatatatcatgttcttggcggggctggagattgatctgggggattttaaaaagaataaatggaagagtttgaccttcgggatgtacacttttttggtgccgatggccttgggaacgcttgtcgggctttacgtgttgaatttctccatgttgacttccatattgctggcgagtatgtttgcctcccacacgttgattgcttacccgattatcagtaaactggggatcacgaaggataaggccgtgggaattaccgtgggagggacgatgatcacggatactttggcgctgttggtgttgacggtgatcgtggagatggccgtgggggatgtggatgattggttttggtacaggctgggggcggcaattatcctcttttttgctttcgtgatgatcgtgttcccgatcgtgggacgttggtttttcaaacggtgtgaggataacgtgtcacaatatatattcgtgctggtcatggttttcttgggggcttacttggcggaattggccggactggagtctattatcggggctttccttgcggggatggcgttgaaccgtctgattccttcgacttctcctttgatgaaccgggtggagttcgtggggaatgcgatctttattcctttcttcttgataggggtgggaatgttgatcgactaccgggcgttctttaccaattgggacacgattaaagtgggggcggtgatgatcgtggtggctaccgtggctaaattcgtggcggcttggctcacgcagaagacgttccggatgtcggtggaccagcggcgggtgattttcggattgagtaatgcacaggcagcggcaactttggcagccgtgatggtggggtataacgtgattctaggagagaccccggcgggagaaccgattcgtctgttgaacgagagcgtgttgaacggtacgattttgatgattctggtcacttgcacgatggcatctttctccgcgcagaaaggggcgcataatatcgcgatgaatgacgtgtcggaagagaaagagggaactggggaacatcaggaacgcatcctgattccggtgtcctacgagaagaacgtgaccgagctggtgaatttgagtacggcaatcaagtcgaagaagaataagaacgggctttttgccttgaacgtgatcaacaatcaggcatcggacgataaggccttcaaacaatccaaaaaggtgctgaatatggccgtcacgacggcttcggccacggataacgtgttacaggatttgttgcggtacgatctgaacgtggcgaatgccattatcagcgtgattaaagagcagggtatcacggatttggttttgggattacatcagggaaaaggtgtcgtgtcctccttcttggggaatatgaccgaggcgattctggggcagagtaacgtgactacattaatttatcgccccatacaacctattgccacggtgaaacgtcatctggtggtggttccggcccgggcggaaaaagaggtcggattcccgatgtgggtgaataaggtatggaatattatccacaattcgggtgcgaaggccgtgttctacgcatcagaagacacgatggtgtacttgaaggagatgtataaaaaaaggccgatcgaggcagaattttcgtcctttgatgattgggatgatttcttgatcatgtcccgggaaataaagagtgacgatacgttgtgggtggtgatgagtcgtcgggaacggctgtcctatcatgccaatatgagtaggattcccaattatttgaacaagtatttccaatccaatagtttcgtgttggtttacccgatacaggcgggagagacgaataatcggtatttggtatagttgaaaagtaaaatttaacacgctgtccactccctataattggggagtggacagcgtgtttttacccgattttgaggatgtaggttttcaggatgtatttgtaattttgaaagcttgaaatatcataaataattctataaactaatgaataaacttggtgttgagtcaattatttccaatatttgcggtaaaaataaggatatgaattcacatctattttccgcggatatgaaactggcggacgtcattcatgccgattattcactgttgttactgttgcatcggtttggaataaatctgggattcggggataaaacagtccgggaatgttgcgaggcgaatcatgtttcgtgtacgttattcctgatgatttgtaacgtgtacagcaacgagcaatacttgccgacggagaaagagatcgagggaatagggacggacgtggaccagttgattgcttacttgaaaaattctcattcttattacttggaaaaccggatgctttccatacaagaacagttaaaggaaatttccgaagggtgcgaacagcaacatcagcaaatattgaatctttttttcaatgaatacaagaatgaggtgattcgtcattttgattacgaggaagtgacggtcttcccttatatctccaatatggtgaaaggcgctcgtccgggagattacgagatcggggtgttccgggagaatcatagtaatattgatgataaactgaatgacttgaagaatatcatcatgaaatatttgccgggagatactttatcggatatgcggatccgggtgttattcgggatctttgccttggaagaggatttgagtaaacattctttgattgaggataaaatacttattcctttagtaatgaaattagagcaacggtatgcaaaacaataataaaagttacaagattgttattattgagccgtcaatgattatttcaaccggactgaggaagttgatcgaaatgaggaatgagtttgaggtggtagcggttattgccgattgttttcattgtctggagaggattaatcatttgaatccggatattatcatcattaacccctcggccgtggagctgaaaaaacggcagcatctggaagagttgtttgaaggggtgaaggatacggctttcgtggcgttagtttaccagtatatcgatcctgagattctgaaacaatatcacacgacgattgatattgccgatgatggtgataagattgcccagaagttactacattcaatcgacgcgttaagtgccccggctgatttgcttgataagaacgaactctccgaacgggagaaagagattttgatttccctcgcgaaagggaagattaacaaggagatcgcggatttgcatcatatatcggtacacaccgtgattactcaccggaaaaatatcatccggaaaaccgggataaagtctgtttccgggcttactgtatatgctattttgaacaatctcatcgatattaatgaggtggagtgatattttgattgaaatatccccattataagggattgcgggaaagggtggaattgttgatctttgtaatgttaataat

SEQ ID NO: 198 - DNA, 7539 bp, Butyricimonas faecihominis
tttttttttttcaagcagaagacggcattcgaagttcagccaaggctcgtgggctcggagatgggtataaggggaagattctgaagggaagaggcttggaaacgagtctcttttttttttgtgttaaatatttaatagccagaataataaaccagtcggaaggtaatctgccagttcttggcggagttttttcaaggcaacttcgatgtgtttctctgccgtgcggggagagatttccaattcttcggcaatttgggcgatacttttaccatcgaaacgattcataatgaaaatcttttggcattgagggggaagttgacggattgccttttcaatatgttcccgaagttctgattccacgtaatattcccaagtgagtaatccggtaatgtcccctttttgtaaaagttgctcttggtactcgttgcgtacctttaattgttccaagtgattcaggcaacggttgcggacggatgagaagaggtaggctttcgcagattccatgaggagtgaatcttttttttcccaaagagtgataaaaacgtcatgcacgatgtcttccgagatctcgatctggttcgtgaaacgattagcatacacgattaatcctgaatagtacaggttaaataaggattcgaacgtctttttctctatgtttatcatacatcaggtttcctacatcaaaacaaatttagaattaatattttgatattgataaaataaaaatgtaattttttcgagaatgtgactacgtgtattttttacttgatctgtcttggttatataaagagaagaaaaatatgagagagaaagatcaaatcgagaagaatgacacggaatatgatgaagcccgattggaggaaacattagatattttcatgcaaatgcgggctgtggataaagcgaaaggttaccgtaaaatcgtggaacccgtgaatcgcagagcccgtcgccggcaatttattttattgagtcgatacgctgcagttattgtcgtgatcgtggtggtgggtataatttggggagtgcgggggagagttgaccacgctgttccggtgattcaggttcaagagattactccgggagagatgaaagccaagcttattttagcgacgggagaaaatgtccttttagatactttgtccttaagaagaactgttattcaggaggcaggggttacgattcaaaaggccaatggggttttaacttatgaacattcgggtaaagaggacgttcattctgtggaagttgtttacaacacgctagaagtgcctagaggtggggagtatgatgtagtgctggaagacggtacgcgggtgtggttgaatgcagactcccggttgaaatacccggttgtttttcccggtaatgaacgtcgggtaattttggaaggtgaggcatattttgaagtggcaaaagacacgaatcgtcctttttgggtggaaacaggcgtacaatcattgagggtgttaggaacggcatttaacgtgtatgcttatccggatgaggcagatatttacacaacattggtacacggaagtgtggctgtatctgttgagaaacaaggaaatgaacagatccttgtgccgggggaacaagctgtttgtcatgtggatagaggaaattttacggttaaaaaggttgatgtacaacaggtggcagcttggaaaaagggggtgtttgtatttgaaaatcagaatttggagcaaatcatgttgaaattggctcgttggtataatgtgatggtgttttttcaaaatgaaggtgctaaagcgatcgagtttaaagggaatttacccaaatacagtaattttaaatcgatattacaggtgatagaaaagagtagtaatgtaaaatttgatgttcaagggcaaacagttgtcgtgagtatataaaaaaatcgggggaatttgacagcttcccccaagatttgaaaacatctgttgacagcagatgtaatgttaaataaaatcataaacaaagttatgaaaaaaaagatcggatgtgaacattttccggaaggaaaatggcgaaaaattttattgattatgaagttgaagctttttattttgttatgttgcattcacacgttaagtgccacgacttattctcaggatcagaagctggatgtgaagttcgagaatgaattgatcgtgtcggtgcttgattacttgaaaatgcaaacagggtatcaattctttttccaaaagggaatcgtatctgagacggagaaaattacggtggtcttaaagaatgccaccttgaatgaagtgttggataaggtactgaaggatcatgggtactcttacgaggtgctagatggcgtgattgtcgtgcgacgaatggaagaacaaaaacaggagaaaaaaacgcttgtcggtattgttacagaccagaaaaaagtaccgatgccgggagttaccgtgaaaatttttggtacaaacattggaacggcgacgaatgctaaagggcaattttctttaactttacccatggcgcaaggagcattggagttttcttttgtcgggtataaatctcagaaagtaaattttaccggaagaacgaaagatacgcttcgtatcgtgatggtggaagatattcaggcattggatgaggcagttgtggtggcttacggaacgacgaataaaagagaaatgaccggggccgtgtcagttgtcaaggccgaagagttacaaggaataccggcttcggatatagcctctcttttacaaggacgggttgccggtttggatattacgaatatgtccggggcaccgggaggtggtggaacagctatcacgattcggggatacaattctttggatgtggagcaaggacggcggttttctaatcctttgtgggtggttgatggggttccgttaaattcttttgcttctccgattaccggtactaatttactggcagacattaatccggatatgattgaatcggttcagatattgaaggatgcttcttcggcttctatctatggttctcgtgctgccaacggggtgattatcgtgacaactaaaaaaggaaagaagaatcaaaaagcaaccttttcgatcaacgcatctcaatcttggggtatcgttgctgaatttcccacgatggttattggaaaaggggaacgtgatctgcgttttaaaacgcttgaaggaacgcaattagcttatttagataagacgaccaagcgatataaatatcccttgtccaatgaggaagttttttggaatgatcaacatgcatcttatgattatttcttttctgcccagccgggcaatcccgtaacattgatttatcaagatagtctgaatgctttttataataatgcaacgaattttttcccggcttatttccgaacagggaaagtgacaaatgctaatattcaaacttatggtggaggggaaaggatgacttacgggattggtttggggtattataatgaaaaaggggtatttgtcggaaccggatataatcgtatggatttgaattcttctttgaatgtaatgccggtcaatcgggtaaacgtggatttacgttttaatgcaacattgacgaatcgggaccgcggggaaaaggtggagggttttggtacggccccaatggtcgaaggagtaccgggtgatcctttctggcagagtacgttattgccgggtaaaggaactgaggcttgggaggctacgattgataaattgaaaggaacaaaagaaaagaaccgttctgttcgtttacgaactaattttaaaatagggtacgagattattgaaggattaagtgtttcaacttccttggcaacagattattctatccatcgtagaaattattttcaaccttcttacttgagtggtaaagggtattcgatgagcttgggtgaaacggggataaacctgatggtgttgaacgaaaatttgttatcctatcgaaaaacgataggcgaagatcatacttttgattttctcgctggattctcttatcaatatgatcagatggaatataacgggggaacggctgagaattctccaagtgataagatttattatgcaccgagtggattgccggatttgggacaggaagtaaatgaatggtcgggagaaacggtcccggtggcttttcagcattaccagtcaaatatggaggaacagaaactatactcctattttggacgtttggaatataattatcgcttgaaatacttgttgtctctgagtttccgtcgagatgggagttccgtgttcgggcggaataataaatggggaacttttccctctgtggctgccggatggagcttttcagaggagcctttcattaaagataatttgggttggctttcgttcgggaagttgcgggctagttggggacgttccggtaaaatgttcgaatacccttatttggcttacggtttggtgggtcccggagagttttcacatcaagggaatccgactttggaaccagtgtataatggaggactttataatgaagatctttcttgggaagaaaccgatcagtatgatttcggtttagatgttgatctctttgagtaccgattaggtattgttcttgattattattatcgatatacggataagttgttgtatcaggtcggacttcccggggattataatggttttatgtcccaatgggcgaatgcggccgctttgtcgaatgaaggacttgaattgttgattaaatatgaaatattccgtcgttctgatttgtattggaaaatttctgtaaatggagctagaaattggaacaggattgaaaaatcatataatggcaaagatttgggatttggaattacaggtaagccattgaatcgaatctcaggatataaaacgaatgggtacgtgcaaaaacaggaggatcttcctctatatttcacggcacaaggtgaaagttgttatccatattctttaatgggaggttcctattcttctttttatcgtccgggagattattattacgtggatgtggatggtgatggtgtgatttttaatgatggtgtatttttaggaagtgctttgcctattataagtgggggaattgtaaatgaattccggtggaaaaactttgatttgaatttttccatgcattattccatcgggcggcacatggtgaatcagttaccttccatatctttggcattctcaactgatccgtcccagaaatattacaagcatcccgtattcgtggatataaataaaacgactttctggcagcaagaaggggatgattcggattatgcccaattacgtcttgggagtgaggggtatgtcttagacagacaagtagaaaaggtgaattatttgaaattgaaaacattgactgttggttataatctgcccaaatcgttgatctctaaatggggaatggagcaattacgggtatttgtgagtggagaaaatcttttgactttttccaattattcagggatggatcctgaagttgtgagtattgtaaacggggtagatgacggaatgagttatccattagcccggaagtttactttaggtctaactgtaaaattctagttatgtgtaaaatacaatattttgtaataatgcttttcggtttatgtttattgtgtggatgtgaggatgcgttgaccgtgaagccagaaaattcactcacctatgaaaacggtttgagtactccgaaagatttcgaatcctttatcaatggggtggataaagctctaaaagtgttgacttacacgaatgaaccgaatcttcaaataaagaaaggtgtgtatgtcgatgactattacgatgattctgaaatggaatggtcccagacattaagttttccttcttctgaactttcatattggaatacccggagttggcagatatattatcaaccgatagctaatgcaaatgtcgtgctcgcttatgcggacgtggcagatttatcttcagaggagcgtaatttgtacaaaggacaggcttggttttataaggctttattatatttggaaattatccgtcaatggggagattgtatgttgattcgagatcaggtcgagctattgccgacggcgaagacgaattgggatgaggtggctgattacgcgattgatctagcaacgaaagctgctgaggtattacccgagtttgataaaatcagaatggcaaacgggaatgtggcaacgtataaatccaccccttgcaaaggaagtgcaaatgctttattggcacatctctgcgcttggaaagcgggagggaaatattttgctcacgatgatgcttatgatgaaatggagttatggaaaaaggctgaagaggcgtgtacacgggttattacttccggccagtatggtttggcggcaaatccggaagaagtatgcgcaagcgtgttgttaggggatagtcgggagagtatttatgaaacgattacacgtaatttttggaacgaggagagacttcctatggggcctaaacatattgtagaggactatgcaggatggccaataattccgacaatacagccttcgtctgttgcgtataatgtttgtcgtataaaggcctcttccatgaaggagatgtatcttcaaaatgatttacgtcgggaagcttatttttataaattggattccatgagccatgatacgttattacctgtgaccggagggtatgcttatttgtacaagtttcgcaaattttacacggaaaggacggacgacgggtatatcatggtacgcggtttggatcagaataaaatctggtggcgtttggcggatatttatttgttgcgtgcggaatgtcgagcccgtttaggaggtaattacatggagggggcgattgatgatttgaataaaattcgagagcgtgccaatgctaaactctacgatgcctcggagtatgggggagatttgagatacgcaatttttaaggaacgggaaaaagagctgttgttggagggacaacgctattatgatattattcggaatgattatgtccgaatggaattgaaagggaattaccaaacggtaaccaatcaggatttgaaagatggagctttgtttttgatgattggtgacggggctttcagccagaatcccttgctgcgacaaaatacgtattggcatcgacgtttgtaaattaatttgttgaatcatgaaaaataagtttatgaaaaagatatggctattatggggaattattgctcttgtttgggcttgtgacacggaacaaaaggtgattgatacgggtgtttctaatccttattttgacgggacaattatggattatttacgttcgaatgataaaaactgggatctgacggtggagatgattgagcatgccgatttgacggatttattcgagggacaggtggatacttgtccggaaattacgttctgggctccgcctgcctattctattttgcggtttatgctggagtcgcagaaagctgcggttcccggtgagatttatacgaaaatttcggatatgcctaaagaattgtgcaggacgttcctgttgaaacatgtggtgagcaagaaatatttgaagtcggatattgcttacattaataaag

SEQ ID NO: 199 - DNA, 7532 bp, Butyricimonas faecihominis
cctgttttttcattcattatttcttacaaaaacatttctatccttaatctctatatctattttattaataagtttcagcatattaacaacttgctccaaatcactgtatcgttttatatttcccgtgaacaaaatatctttcaccgaagaactctcatagaacacattaatattataccaccgggcaatcgtgttcatgatcacctctaaacgttgtttctcgaaaacaaaccttccatctttccacgaacaatacaaaagcacatcaacggtctcaaccgttgtctttccatcttctttattcaagcgtaattgttctcccggtttcaaatagctataattacctcccctttcaaaagcaacttttccgtttaccaaagttgtttctaaaaaattttcatcttgataatcccttacgttaaaagaagtccctaacacacgaatatcaccttgatgggtatgaaccacgaaaggagccaaagaatcccggactatatcaaaataaatttctcccttcataaaaacttcccgttgtcccttctcaaatgtcaccgggacccgaatttcagattctgaattcattctcaaacgactaccgtcacttaataataaatcatattctccaccccggggaatcgtaatcgtgtgataaagagtttctaccacctctttctcttcctcattctttcttgacatcacactcttttgaacaaaagctagaaacgtcgtgtctgaaatatctatttttgtcccatctggttctgtcaatatcgccttacaagatcccggttgtattttctgaacgaaagcaatggattcatctttagtgtcgtggaaaaaataaaaacttccacttagcacaaataataataccaccgcagccacataacgatataatgccaaagttctcttccggtgttttgcctgtttcactcgtcctgtaaattcttggtaagcttctatagcactatattccttgataaattcaaatttgcgagcgatgaaatccggtgattgataaagattatacaatcgtaaatgctcgggagtctcatgtttccaattttcaagctcgtttcgaccggcatcatcaattttcccggttaattcagctataatcaaatcggcaatatgagtaatatgtttatcctgctccgtcatgttttcttgggttttattacaagacacggaacatcataaaaagtgacaaaaatctacaagaaatttattagtaaaagcaaaaacgggtgatttagtttttctttcaactgctcttttcccctctttttctgttgtttaaccgcatcaatagatattcctaaacgcaaggcaacttccttatcactcaatccctccaaattcaaatttatcactttcctatatttctccggaagttcttcaatggcttgttgcaaacgaataaaaatttcctcctccaataccgtgttataaaagaaatcttctgaaacgacctccgctcgatcacgataacgatcctccactttcttatcccgaatataattcaaacattgattctgtacggaacgatacaaataaaaacgtaaatccgtggtcgcagaaaatttatgaggtgtagtccacaatttaaaaaaagtgtcctgcacaatatccttcgccacctcactctccacatatttacaagcgatggcaagcaatgtatgaaaaaactcttcatacaaaattttaaacgcttcttcatccccctgaaaaattcgtttagctaataatccattgtccttattcattctacaccttcacattctaaatgcaaagatatgactttattttatacagacaagagtcgcccgaaattcccggccgactcttctcgaaattcatgctacacgatattttatcttctttttcttctgattaagaacacaatactccatgccattattgccaatggaataagccaaacaaataaaattttcacccaaaccatcatattctgagaaaacaactcctcgaaagccttgttctccaaaagatctcttgccatagtgcaatttattcacgacatctcctccacaaaagtaaactatttgtcccatttttcaagaaatcattaaaatatttcaacgaaaagaggagttatctctatattttaagataactcccccgaaaacaacaattaagatgataattaactacttttcaaataattccttcaacttcgtatccaaccacccgccacgggcattcgtcagcacgattttaccttgcggatcgatcaggaaagaacttggcaccccgctgatcccgtatttcttcacgataaaaccgtcaaatccttctcctttatcgcaaacctgcaaccaaggcatttgctcctgttccaaagccttcttccactgccctttatcagcatctatcgacacgctcacaatatcaaatcctttcgcatgatacgccgaataagcatctttcagatgaggaatatccccccggcaaggcccacaccaagaggcccaaatctccaacaaagtatatttaccgggctttatcacgtcagacaatcttatctccttactctccttatccaacatctcaatatccaaatattgatcgcccacgtaaaccggaatattattcaatcgttcggctagagccttccctttggcactattccgcgatgcccccgacaacaatgacaacaccttttcaatctcaccccgcccatatttcgttatcgacaaagttccggcaacatatagtgccaccggagaatccggattctctttgataaaatttaccttgtaacgataaatctcgtccttgcaattctccagctcctccaaagcatcataagccggttgcctgttcttacgtcccagatcatccgctttcgcgtaataataagcgacacgatacttctcgaacaactcagaatttaacgttgacaacggctctaaccctttgtcataactcacgtacaaatcattcgtcggagaccccgtgattttcacgcaagccggaactgttttcgttatcttcgtgggtaaactatcataaggagcctccaacatcatggatgaattatcgacaaaaaccggtaacttcaccgtacttttccaatccccccgcttgtcatcatttttgtgaatcgtgatacaacgcatttcaggcgtatcaaccctcccgctaaactcgaactctccatttttaattaccgtactatcataaatatgcctgtactgcgaaagatcagtgagaaaaactttcactccttcgcctcctccaacaatccttcccttgatcttaaaaccgtctgcacgacactcgttcacgcttaaaactagtacaaccaaaacgtatattattttcataccaccccttatttattatacttttccaacaacggggtaatcacatctttctccgatggacgaggagcagaagctgaaataatcttgaaatctttatcgatcaacaagaaacgaggaattcctgtaatatcccagcctgtccggaccaacggatcctttgaaaacaactccaacactttcccatgatcagcatctcctttcaatttatttaaccaaacttccgtgttatcatctaaagacacgccaacaaactgaacattcgggtactttttgctcaactcattaaagaaaggcatttctcccaaacaaggcatacaccaagtcgcccaaaagtcaataaacaacaccttccctttataatcactcaattttccctctttcccgttcatatccacaacagcaaaatcaatagccgggcgtccttccatcaatttcgcccttttttccaaccgtcctagaaaagcctgcttaaaatcagcatttttcaacttagagccgaatgcatgtaactcatcataaagagattgcgtcatctcctcattcattcgatccccggtcacgtaagcatcatttaactctttcaaccgttgtgatttcggaaaatcaaaaatagaagcatccatatcataacaactcagcaacacatctctcaccacggcaacctccaaatactcatccttagcagaaatctctttcaatattggatttatatattctcgaatagacttgttaaaatcattagcgaccttttctccctcttcccgtgttttacaatctttcaacagatcagaataccataaatatgccatataactattggcaacatccgccttgatacgcatcatttccaactccacaaactccttactcgcattcggcaatgccttcaattctttctcccgttgggcagcccgctcatcaatatattttttcgtctcttcgaaactacctttcacatttctccccgcctctaaaaatgatcccgcctttgggaacaaacgtcctttcatatagttattcacgcccgcaccttttcccttaaaccaactttgtggttgagacgttcctagatacacttccatatcatcccccggagtcaaatacagcgtgttccgtcctaccgaataatatcctggctttttcaagtcaaaagaaaaatcaaaactaccatctttattcaccgtgattttttgactccactccttagataattcacctgcagcaccatcaaaatccatagataccacattagccccgaactctttcaaagaaccatgcaaccgcacgttcttccccatcccgtggctggcaacaccaaccacgagtaggaacaataacaatacatttttcatacaatacaaattttataaaaccgaatttttattctttaaacaatgccgccaacttctcgttcaaccatcccccacgtgcatttgtgctaatgactcgcccttccttatcaatcaacacgcatgaaggtacaccgttaacaccaaacaaatccatacattctttcttataacctttcccgtttgctccacaaacctgattccaaggcataccttcctcttttactgctttctgccatgcctccatatcatcgtcgatagagatactaaccatttcaaaacctttttcatgatagcgctgataagtctcttttaaatgaggaatatctgcccgacaaggtccacaccaagatgcccataattctaccaacgtataatgtcccttttttaatagcattgacaactttactgtctgtaaatctacattcaacacatcaaaatcaggcaacacatctcccacgtaaagcggctgttccaataaagctttcatagcttgttgtcccatcggggtagctttcacgttttccggtaaaaaaccaaccacttctttcgctttatctctatcgtaagctcttacccgtagattttttgccacatataaagctaccggagactcctgatgttgccggataaattcaacacccacggcaaaaacactatcacgcatagcatccatccccctcacacaacggaacacatcatcttccgtcccttttttataataataagcacgacggtaagcatcaaacaagctgtcatcttttacaacaaaaggcgttacccgttctttatatttcgcatataaatcatgagcatgagaaccttctacacgcaaattacccggtacttttttctctaattttgagagtagccctgcaaaaggtaaagaaacccgaatagtagaattttccacatatatcggtaactccatgatcttatcccatccataaattcgttgcgacggatctttaaaataagtaatactacgtaattccggataatccactttccctttaaactcaaactttccttttttcaactgtacactatcataatacacagtctgcccggtattcgttaaatatacccattcattttccggtgcaccttgaaattctccttttatcacgaatccttcaggcttactctggcatcctactagagacagtaaaccccatataataattatccacttcatcttaataccttttttaaataaatacaaaatcagctatttctccaaaatcagaatatacctgtgttgccggataagttacactattagccccaacactaccggttgatgacaaattcaagataacaaaatcactcttgccatttcccatatcaaaagaaactcctaaactacgttgcaaatcaaactcataggctgcaaactctccttctcctggagcctttctcttggcaaatttcattttcgtagcctttccccccgtatgagtatagattgcagtagcttttcctccggcctgtttaaagtctaaacgataaaccgtattacccgatgcgtaaaaaataataccactataaggcggagtggaagcaaaacaagcattttcatctaatcctttaggtaaatcaatttgataataagcattaaaagaggcataatcagcataagtaaaccctcttggattaaattcataaacaaaacatttatcatcacttttagccaaaccataaccatacacacttgtccaactttgatcaaattgatatccggttcccacgtacaacactttttgatccggagctaacttgttaggatcagctcccgtagcattaccatctcgaaccggaatagattgaatcaaatcactattttcctcgctctcattaaagtacaaaggatcatacttcttcacgcctaacccatcacttttattgtaataaaatgcaaaacgatgtccggcctcatcatacaacaaagcattgttaataactttagatgccaaggtaatcttcacatcaccggtcaacccgcttcccggtttatacactttaccggccctagggatctgataaagaactccattggacaacaaaagagcactggcacttccatcaccatccatcatctccacatgttggaaatcaaaacctgcttgagccatcggggcaaccattcgagacaaactatcctttttctcaaattttttccattgacaataaactccggcctctttggcaacatcagtaagcacgtaaaacatattccagccgctcccggttccataatatttaaccgacgttgtatattgtcccaaacaaagtggcttacctgtcaatcgcttgcctgattctttataataggcatcttcattcaccacgatatcagcaccgatatattcaatcgaccccaattccgtctgtccgtttttactatgtaaaaccatccaagttccatcataaggtttgatcaacttgatcgtcgtatttaccggatattcaattcccgttaccttgtcaaacacatttaaacgaaaaaaatgctcgtatttcaaatttttctcttccgggtctatatgaaaacgtaaactaggttctatactcacagtgtcaaaaccttcacgatccgctaaaccatagaaattatgattgatcgtagaatataaccaaacataactcaaattttcatcgtccttttgtaagagctgtgacagccggggaacaatagtaagcgtggtatccttgtccaaacgcacggaatacaactcatccaattcaactgctaccgtattaatatcttcataatcataatttcccttatcatcataacaagacacaaacagtaacaaagccagtatataaa

SEQ ID NO: 200 - DNA, 7523 bp, Butyricimonas faecihominis
atattttgtaacacatttacgggataaaattacaaacttaaattgaatcatgaaatagtttccctgtattttaacattgttttactttcatgttaagaccattccactggagcttttcccgattcaatttcagtaaattgaaaacttgaagttgaaaattgaaaatgagatttttgcaagacattttcaattttccattttcaattatttcgtgtgatctgccgcgaatcgtttcaagcgttcttccagttccggcatccggtggagtccggtttgagaaacgcaagcgcggagaccttgtttcttggaacccgtgtcacgcaacgggatcgctgatatgccgtaatacagaatttctttcgtgaggtcaccacccgtgaatcccgggtagatgatcgtgaaatagaacccgtcagcgataggttcttccagatcccggtcatacacgatctcgaaaccgtatttggtgaacagctctttcatggcgtgggctctctccgcgtattcccgtacgccgtcgaggatattgatacgtccctcgttggcggctttcaagatggcagccatggcgtactggcaggagtgtgtggttccggatgatagcgtgtagatgatccggttcacgatagtgtaacccaaggtacccattcccccgaaacgatcgtgcaggttgtcgtatttccggttgtataaagcgtctgaaatacacatgattcccaaacgttgtccggcgtaactaaatagtttggaaccggagatcatgacgatgtagttatccgtgtatttgccaactgagggttggaacggggctttacccggtacggaaagatcccgacggaaatccatggcgaagtaggccaagtcttccagcacgatcacgtcatatttggtggccagttccccaacgattttcagctcctcgtccgtgaaacatatccaagccgggttattcgggttgctgtacaggatggcagcgatgtttcccttggaaagatgctcttccagtttctcccgtaatttttcgcccctgtaattataaacgtcaaatgactcgaacggttttccgatgacttgcatttgtgttttttgaacggggaatcccgggtcgatgaaaagaacggtgtcttttcctttcttgcattccgttactgccatgaaggcggcgaaacaggcctgcatggaacctacggtcgggatgatgccttccggcttgatgtcgatgtccacgaagttcttcacgaacttggaaccttcttccttgaattccttgtggccttcgagcatcgggtagaattgagcgcatccggcacgtaacgcctcgatctcggcgtcgatacctattttagaaggggcaagtccgggaacgcccatttccatacggatgaatttttccccgctttcggcttccaccatattcaccactttcacgatgtcgcgtatcgtggcatcttccatgtcactgatcccgcaggctgccagtttctggtcaacgatctttttgtcaattagattattttgcatgactactttatatgatttattctattttttctcagcatgtacgcgagtttaataaaaaattgtcattatatattccgaaatcgttttaaatttgaagtggtgtgtctaatttagtttgattctgaaattgattattccctctttccttgtgttttgcaagtatccggatataatcccattttgagtatctgaaaagaaatagttgtaatcgggtaaatatggcgttataatctattatgcccctttgaaaactctttgcttgcccttgttgctatattggcaaagggcgatgaaagggcgatgaaagggtagtaaaagggaccaaggagattattagagtggtattaccatgttttaagggtgggtatagggtgttaaaccggattttaatcagggattttttttatggacgattattgttaaatgtgtgtgaagattgagggtataatgccatgttatctaagtggctatgaacgtcgaaaaacgatcgtttaatgcgctgcaaatatacatcaattttaaatatcaccatctatttgtcaatttttttttggattcttgtaattagatatttacacttttaggttatcaatttaacaggtctgctttgttaatatcattaaacgatcgtttttttaattcaaatgaatcgttcgtgcagacagcttccatgcattgttgctgtgtagagtgaagtgcgtggaacacatggccgtaaatcaggacccgtgacagggttagtgcgcgaagcgcgtccgggcggttcgtgtgtccggggattacagatacaaagaaaatcatcgttcgctagaaaatagggaaagaataaaaataatggttgcgtgtaacaagttaaactggtatgctgcttatacccgggtaaatcaggaattattgatcaagaggaaactggacgagctgggaatcgagaattttttgccgcaggaggaacaagttcgtgaaacacccctgggtcgtaaaaagatccgtgtacttttgattcatggtttgatatttattcgcacggacaaggccacgagtttttccctaataaatgatcactcgctgaatatcgtttatttaaaagatatagaaggacgacactcgctcgtggtccccgacaagcagatgcaggatttcatgttcctgttggacttctcgacgggtagcgtggaggttttgaacaagggtatcaaacgaggcgatcgggtgagggttatcaagggacccttgctgggcttggaaggggagctggtacgtttgaaaaatcacaagcgtgtaattattcgtttggacggggtggcctctattgccacgtcttacatcccgagttcatttttggagaagatagagtagtacaaaataatggaaaaagttttatttcacgagttgtataaacggtcgcgcgagttggaaatggggcgttgtccctccccggcgttgtcaggattcttgcatggttacttgtccgtgtactcgatggttcgcgtgtacccttggctggaggaggatttcggggaggcgtatgctattcacgagcgagtccgcgagattgcccgggtcatagaaccgatggcggggaacaagaatttgcctgttgatgcccgtgccgggtatgcggtagatctgatggatgcctatcaactgtattctgacttgaatttcttgaacacggcgttggacgcggcttacgatatactcaccccgtggggaagtgacaagatcgttctgccgtgtcggactccgaatatctgtcgattgttatgtaattgttattatctgacgggggaggaggaaaacgggctgttggccggaagtttgatctccgaggcgctgggttctattcgtgatccggggcgtcagggattgatggcatggtgggatgctttttgtttttatgaaaatgttgttggggcaatggagttaccggaagtagaacggaaacgattggcagaagaacggattcgtttggcagttaccgtgaaacggcaggaggaggaaatgattacacgttttacccggtcaaccggggagaatattgaattgtttgcaggagtgttccgtattttggctaggcgggaattcgatacttgtaatgagactatagagtgaaagaataaatttggttgtatgtttctttcttctttttttatcagtttactggccacggcataccttattcctaaaatattgcttatatctatcagaaaacacttgatcgatcaacccaatgctaggaaggtgcatacttgtgtgtcttcgcgtttggggggagtggcatttttcccggcgatttttttcgcaataggagttacagtttccgtgttttctcggtttgacacgaatgtgatggaaaattttatgaccgcgagctttattatggtgatgtgtgcgtgtgtcctgttatacttgatcgggatagcggatgatgtggtgggcgtgagttggcgaatcaagttcgtgttccagattatggctgccggattggtcacgttgtccggcacatgggtgaataacttgtatggtatttgtggtatatgggaaatatctgcttgggtgggagtccctttgacgatcttcttgatcgtgtttgtaatcaatgccgtgaacttgatcgacgggatcgacggtttggcttccgggttgagttgtgtggcgttgttgttcttgggaattttattcctttacgagggcaaagagacaagttccttgttggcttttaccacgctgggcgccttgatacccttcttttattataacgtgttcgggattgcaaaaaagagatataaaatattcatgggtgacacgggagcgttagtgatcggtttgatattaagtatattgaccgtgaagtttgcatgtctcgtgaggaaagagggagtagagatggcctatccgtttatcgtggtgtctttttccgttttgctggtgcccggctttgatgtcattcgggtggttctgcatcgctatcgtatgggacaaccgcttttcttgccggacaagaatcatatccaccataaatttttggcactgggatgttctcatcgtaaagccatgttcacgatccttgccttagcatcgttgtttattattctgaatatggcgttatgcttgtatatcaatattaacgtgctaatcatgttggatgtcgtgttgtggacggctttgcatgtctggttgacttctaaaataaagaaaaagcgggaagagttagctcgtttggagcaacagcttgttgaagcgggatgtcgtaattgtaaagagcgggatgtcgtgaaagtgaagttctttttggaaaagaaagcaggaaagattatcacgattgctgatataaaagaaaaatcgggtgcagagagattgcgtgtggattctatccttttcgattttgtacaggagggacttatcaccttagaaaaagaaaatgaagtagagtacggaatttatgccgataagacaacaattcgttggtttgattcccgattgccggttgcggtagaatattatttgacgagattaatgaaaaactaataaatatattttggaaatgaaggcgtgctttatggggttaggctatatcggtctgcccacggcgataattgccgcaaaacatggtgtacagataacgggagtcgatataaatccgagagttgtcgagttgacaaaccaagggaaactccatatcatagaaccggggatggaggagatgctcggggaagtaattacaagcggggcgttgcgagcgtcagttgttcccgagaaaagcgatgcttattttatggttgtacctacgccgtttaaagggaatcatgaaccggatatttcttacgtggaggcagctacccgtgctgtattgcctttgctgaaagagggggatttgtacgtgattgaatcgacttctcctgttggtacgaccgagaagatgatgagtttgatttacacggaacgcccggaattacgggataaaatctatattgcttattgtccggaacgggtgttgcccgggaatgttatttatgagttggtacacaatgaccgggtgattggtggtataaacgaggcttcaacagaaaaagcagtcgagttttacgtgcaattcgttcaaggaacattacatcgcacgaatgctcggactgccgagatgtgtaaattaacggaaaattcatcccgggatgtacaaatcgcttttgcaaacgagctttccctgatatgtgacaaagccggaattaacgtgtgggaattgataaatttagctaataagcacccgagggtgaatattttgcaaccgggatgcggcgtcgggggacattgcatagccgtggatccttattttatcacagcggaatttcccatggaatcgaagattattgccgatgcccgggaaattaataattataaggcgttctggtgcgctgagaaagtacaaaacgaaatgttgaaattccaattgaaataccagcgtacgcctgttatcgccatgatgggattggcatttaagccgaatatcgatgatttacgagaatccccggcaaaatatatcacgacgaaagtgatgcagggatgtagtaatgcggatattttagtcgtggagcccaatgtttgcgagcataaagtattcaaattgacaaattaccgggaagcctatgatcgtgcggacatcgtggtgatgcttgtcgctcacgacgtgtttaaagaattgccttggacggacgggaaagtgattcttgatttttgcgggatatacaagaaataatgatgaaaaaaataatgttggttttcgggacacgtcctgaagctataaaaatggctcctttggtgaaagaatttcagaaacacccgaaggaatttcagacaatcgtgtgcgtgacgggacagcatcgggagatgttggatcaagtattacatttatttgaaatcgtacctgattatgatttgaacatcatgaaacaggggcaggatttgtatgacgttacagcacgggtattgaccggaattagggatgtgttgaaagaagtgcaaccggatgtggtacttgttcacggagatacgacgacttcgacagccgcagctttagcgagtttctaccagcaaattcccgtggggcacgtggaagcgggattgcgaactcataatatttacagtccttggccggaagagatgaataggcaaatcacaggacgaatcgcaacccatcattttgccccgacagctttaagtcgacaaaatttaatggtagagggaattaacccggaaacaattaccgtgacagggaacacggtgatagatgccttgtatatggtggtggataaaattaagagcaacgagagtttgaatatttctttgagtgaagaattgcagcgtgccggatatgatatggagcgtttgaaagatggtgtaagaagattagtacttatcaccggacaccggagggagaatttcgggcagggatttgttcatatgtgtttagcgataaaaacattggcggagaagtatactgacgtggatttcgtgtacccgatgcatctgaaccccaacgtgcggaaacctattcgggaagtattcggggaaaaggtcgcttctaatatgttttttattgagccattggagtatttgtctttcgtgtatttgatggaaaagtcaactatcgtgctgacggatagtggaggtattcaagaagaggctcccggcttgggaaaacctgtcctcgtgatgcgtgatactacagaacgcccggaggcattggaagcagggacggtaaaactcgtgggaacagatttcgagcggatcgtgggagaggtttcgatgttgttggaggataaggtttattacgagaagatgagtaaggcggtgaatccttacggggatgggaaggcatgtgaggaaattgtagtatttttggataaacgactaggtatgaagaaatatttagtgaagctgagaaataatgtgaatgagaattcttcacatacaaggtttctttgttagattttctatctcaataagat

SEQ ID NO: 201 - DNA, 7505 bp, Butyricimonas faecihominis
actttataaaccttataaactttacaaactgattaaagtacccggtcgctgatttgtttcttgatcttcttgtcacccatccagacaacctcgttggtctcgatgttcgtgagttgaaggtcgatctggtaagtcacgactttttgtttcttgtacgagtcaacgatgctgttgattgtcccttgcaagatgaaatcggcacccagttcttttccccactttttggtggtttccggtgacgcgtaatcttgttgctcggctctttcttttcgaagttcattccgcttctctccggcaacaaccaaacggatgttaccatctcggataattgctttttccacgtccttaatgaaggtttccgagttaatatgctcgtgacttttgttctccacgaggccgactaccaccacggggcgtttgtcgtttgctttcaagtatcttggaatccaagctgaggtaagcaggtcgccgatcatttcttcggaaacaagccgtgagtcactatcattccaacgtccgctaaggtcgatggtttcattcgggtctacccgggtgattttccggttagcacatccgttaattaaagcaatggtcaacacaacaagtgttccgataaatattcttctcatattccgttgttttaggtttctattcaatttccacgatcacattttgtgttcttgtaaaagtttataacaataattctaccaaatatacgtattgcgcagttttatggatgttaattagatttaaaattgatgagacgcccgatcattatgccggaatgtgacgtgattcgttgcaaataatcggggagtgtttctgtcgtgacggacacttttttgtcggaaaccgaggcgtggagcaggtatatttgcccctcattttcaatggcaatgcccacgtgggctgtgtcgagtccttttttcttcgtggtgatcagtataatatccccggttttgatttgtcccgcaaaagggagtactttttctttcgggatatagtaatatgtcctgccgttaatagtcttttcaatatcaattatttttgtaacgagggtggaatcctgtattagtgccgggtactttttccagttttgggagatgaaggatactttgttggggaaggggatacctcctttttctttcgtgatgtcttccagaaggttcaggcaggtcatctcgtataaccagtcggaagagtaatgcaggcgtgacgtgtagtcaacgatcttcccgttccggtaccgaatctcttgtaaattcttttggaattggggaatactttgttcttcgtatttatctaggcgtgccaaggcaatgacattatcgacgaaagtcacgcagtcaaattctcgcaggttgacaaccagcttctcttggggattgatgtccaacgtccctcccacgtaaggcgtttcgagaaaatagcgtccgatggcgacaactttttcgttgatcgggagtttagctatttcctttttattggcgtattcaaagaaatgttttagcaaagtttgatctttccggtacacggaatcggcgggagagcaagcgaaagccccgaatgaaaaggtgatcaggaatagaatgactaaattcttcatagcaaccggtgtttgagaataaaaaatgaggagtcgtgtgaccgacatcctcatctctcttgtgttgtgtttatatattatttgcctgcggccgaaaactgttcaaggaaacggatgtcgttttcgaaaaagagacgtatatccttgatgccgtattttagcatggtgatacgctcgatacccataccgagtgcgaacccggtatatttttccttgtctataccatttaattccaaaacattggggtcaaccattccacacccgaggatttccaaccatccggttcctttacaaacattgcaaccttttccgtgacatagtgtacacgatacgtccatttctgccgatggttccgtgaaggggaagtatgacggacgaagacgaatttgcgtgtccggtccgaatagttctttcgcgaaataggtcaaggtttgctttaagtcggcgaaggaaacgttctcgtcgatgtaaagagcttcgatttggtggaagatgcaatgtgcccgggccgaaatagcctcgttacggaatactcttccgggagtaactagccgaatcgggggacgatgagcctccatgtctcgcacttgcacggatgaggtatgcgtgtgtagcacgatgtccgggttcttactgataaagaatgtatcctgcatatcacgtgccgggtgttcttccgggaagttcaatgcggagaagttatgccagtcgtcctcgatttccggtccctcggaaatggtgaatccaagtttattgaagatggccagaatctcgtttttcacgatagctaacgggtgacgggttcctagttttaaaggatctcccggcatcgtcaagtcaataccgcttaaatcttcttccgcgttagaaagtaactctttcaactcgttgatttttgccagagccgtgttcttcaattcatttaattcctgtcccatggcttttttctgatccgcgggaacggttttaaaatcatcaaagagagcagcgattgttcctttcttgcttaaatgcttgattctgaactgttctacttcttctaggctcttcgcctgaaaaccggctatttcagcactgagttgtttaatcttgtctaacatcttctcaaaatttgaaatctttggtggacaaagttaataaaaaagtctcatacatttcaattcttttgagaacttcatttttcatcccaaatatttttcatcgtgtacggtccgtcggggaaaatccaagccgagccgtcggtcatccgggtgtgtgagtcgagggtggcaattttggtcatatcctctggcgaaatgttgatgtccagtgatttaatgttttctttgattcgttccgggtgaactgattttgggataatcacgattcctcgttgtaccccccaagcaatgataatttgtgccggagtgcaattatatttttttgccaaatcgataataatcggttcattggtcaggccgggtttgtttttgatgggcaaattacgtccaagaggggaataagccgtcaagtaaatcccttcagactgacagaatcgaaataattcattttgttgcaagtaaggatgcatttctacttgattcatttcgggcttgtttttcgccacggcgatcagttcttttaatttcgggatgctgaaattcgagaccccgatatgtctgcacagtccttttgcctgcatttgttccatcgctttccaagtctccgtgaggggacattcttcgagggaaagtaaatcggatgcttgtcgcgggtattcaatgtcgtgtttcagtgctatcggccagtgaatcaggtacaggtccaagtagtccagccggagatcgtgcaaagtctttcgaagagcctcttccacgtgttctggggcgtggttattattccataatttggatgtgatgaaaagttcttcccgtttcacgagtccggacgtgaatgtttcttgcagggcagccccgatgatttcttcatttttataataggcggcacagtcaatcaacctgtacccgtctttcagcgcactaatgatggcgtcatgtagttcgtttgccttggattgataggttcctaacccgaagaggggcattgggtccccgtttctaaatgtaattgttttcatatttatgaatctttatattccattttagtgaacgagattttccccggagtggttatacttctttccggctttttagtttcttgtatagataatcaacaagcttgtctttctgttttttcgccgtggggtatagcaggcaaccagccactcccccgagaacgtcggcaaacaagtcccaccagtctccgccccggttgaaatatttgaattgaagaacttcgataagtcccccgtagatgaaactgaacccgatggcgatcaggtagatttttcgtagagacaatcgagtctgatagcggagttcgctgcacaggaatatcgacatgataaagaacattccgaaatgtaccaccttgtcaaggtgggggatgtttaatttcggatcaggaatcgagtcggatggaatagcgcataagaaaaagattactcctgcccagatgatattcctccataataaggagtatttgcgtggtatcatgttattttattatttttacactgattattctgacgtctttgaacgggcggtcttgcctgtccgtgggaagagcggcaattttatccagtacatcgaaaccttcgatcagttctccgaaaaccgtgtactctttatccaaatggtggaccccgcctatcgtggtatatgcctttcttttttcatcatccatgtagagcttgtccgtgttgttttcccattcgaaattgatgtctgatttgatcttttccgcgatagcccggaattcaggtactttcttttgagccctcaaggtgtcaagaatggcttttttctccggggtataatattttttctggatggctcttttaatggggacgtttattgatttctcgattttgtccagttcttccggcgtgtatttcttaccgaccacgaaatagaattgggcgatatccgattctttgaagacatttacccggtccggttggcggggtgcggctaaggctccttttttgtgataatggtgtggtttgatttccgcgtcaatcgtgacccctttaccgtagccgatagcttgtccggctatggcatttcgactgtcggaagagcctccctgtaccacgaagtttttaacgacacggtagaacaatgtcccgttgtagtggccggattttgccagccggataaagttatcccggtgtaagggggtgtcgttgtatagttttgcttttaagtttcccatatttgtttcgattaaaacaacaggctctttctcctgacttttcgaggtcaaggggagtagggtgagcgttagggataaaagtgagagcgttaaaagtttatacatagcgtgatccttatttatgatttgacgattttgttcacgaggtattttaccgggaaatgcgaggctaggtaaccgatagcaatcaccgtgatcatgataatcagaatatccgacgcgatgactttcaccgggtaagcgctgacgatgtagctcccgttgccgagagtgatgaacccgtaatattcttgtagcaggcataatatggtccctaatgccagaccgatcaatgctccgaatccggtaatcaggttgccttccagcttgaaaatcgagattattttttctttggtcatccctagagcttgataaatcccgatgtcttcttttttgtcaataattagcatcgatacggaaccgatgatattgaaggaggcaattaacaggataaataacaagatcaggaagacggccagtttttccgatttcatcatggcataaaaggaacggttcaggtcatatttattttcgactttgtatgtcggttgtatttggacggatagtttttcttttaatgattctatctgattggggtcttttaattttatctctattttggagatttgtcccggaaccccgaacaactcccttgctgtttctagtccggtgatcacgtatttaccgtcaatgtcttgttgtgcggagaatatcccgagcgggtatatttgctggctgtttagtgccgagcttgatgcggaagacgcttttcgatccgggtagtagaatgtaacgggagaaagcgttcctaatctgatttttaaagcagccgcgatgccatagcccatgacgacggcaggtttaccgtccttttcgagcgagtagatgccactaacaatggaagggagtatattcacgtgttcggcataggtcgagtctacccccttcacgaccaccggaaccaatttgtcgccgaatttcacaagtgaattttcttccacgatggggtcacaggaggcgacttccggcatttgggtcagttggtcgatcaaaatggagtctttcgtgatgaatttcccttttgtcggggaaatcgtgagatccggagtgaaactgtccgttgcttccgtgaggagcgtgtcgattccgttgaacacggagagtacgacaataagagccgttgtgccaatcgctacaccaaccatgctgatgatggaaatgatgtttatggcattctgtttcttttttgaaaacaggtatctccgtgcaatgaatatcgacagattcatcgtggatacgggctattgtttcaacagggaatcgattttgtcgatgtaatcgaggctgtcatccacgaaaaatttaagctccggaatgattcgtgtctgtttgccgatcttttttccgaggataaaacggatgcttttgtttttttctgccaagctctccagtaccttttccgtcaggttcgaagggaagatactaaggtaaactctggcgtatgacatatccgggctaactcgcactgctgtaacggataacatggcacctgcggtgaattctttacactctttctgaaacatttcgcttaggtctcgttggattaagcgaccaaccttattttgtctaattgagtccattctgaagaaaaatattttatgcaataaaattttttacaaatatagtgattataattgatacttttattatctttgccctcgcaaaacggaaacgagatgtagcgcagttggtagcgcgccacgttcgggacgtggaggccgctggttcaagtccagtcatctcgaccaaaaatgtagacgctctgatcatcagggcgtctgtttttttgtgaatgaatttatatcttctttgtttactttttcactgtgaagtgtgccgatagttcgtcagctgaataaaaacccgtgtggcggaagaactctttccctttcttgtcaagtaatacttgggtgggaattgtggcgacaccgtagtattcaaagaatcttttgctctctggttccattaagttcataaaaactacattgactttccccttgtattcggcttttatttttgtcatgacttcttccatttggcggcaagagtgacagcccgtggaaccaaattcaatgaacgtgtaatcgtaactctttccgttatggtgatagttgtatttttgtgcaatcgtgtcgctgatgcttttcttggagttgtcggataattgttcgattttactttgtgagatgtaggtggcaatgtctttgtgaaagatcatgagagaaaagaacatcaagatgataagtgcaaccggtacgtatgttttgtattctttcatgattatatttttgaaaggattttataatggaaactatctattcgtaaagttacgaataatattcatgcgaggcaaatgttattgaaatattttggaatgatggggcgtgtgttaacaacaaggaacgaataaacgctctttgagagggggaagggtaaacactgaatcctttgttttataaagaaaaagaattcagtggtcgtatat

SEQ ID NO: 202 - DNA, 7495 bp, Butyricimonas faecihominis
agtcatgacattttcacgagcaaacatctatatttgcaagtttaaaaaaaagaacaaataatgataaacccattagatattattcgtaaatattacacgttggattccctcgccgggcaatccctcctcatacatagccaacttgttcgagataaagcacaatcactggctatccgacatcccgaaatggatctggacattcccttcattcaagaggctgccatgctccacgacatcgggatttttctcacgaaggccccggacatcggttgtttcggagaacatccctacatctgccacggttatctgggagccgatctactccgcgaggaaggccttccccgccatgctctagtatgtgaacgacacacgggagccggcatatcacttgaaatgatcaaggagaatcatttacctttaccccaacgagatatgctccccgttacgcttgaagaaaaactaatcgcttttgccgataaattttattcgaaaaccaatttaacccgggaaaagaaactaggcaaaatccgagcagaaatggccttttacggcgaagaaacagccgcccgtttcgaggaatggtgtgaactttttctttaaactcgtaatttaaatacgtaatgcggttatggaaaatttaaacaactggattatagtaaccaatgattttatctggacctatatattaatagccctgctcatctgtatcgggatctactttaccttcaagagtagattcgtacaattccggaatatccgggaaatgttccggctgctcggtgacggaatagcaagcgggaaccacaagaactcggtttcttcttttcaagcattttgcattgcaaccgcttcgcgagttggtacaggtaacctagcgggtgtggctacagctctagccttgggaggaccgggagctatattttggatgtggcttatagcgcttatcggttctgcctctgccttcatcgaatccacattagcccaaatatataaagttaaaggagaccgctcgttcatcgggggacccgccttttacatggaaaaaggtttgaaaaaacgatggttaggtattctttttgcagtcatcattaccatcaccttcggacttgtattcaactcggtacaggcaaataccgttaccttggcatttcatgaagtcttcggtacaagccgtgtctggctgggaatcattctaaccctgttcaccctactggtcatattcggtggaattcaccggatcgccgttatatccgggattatcgtccccctcatggctatcgcatacattctacttgccgctttcatcctgttcacgcatctcggaacattacctcatgtcattggttctatttttacgaacgcattcggattcgaacaattcgcaagcgggggtttaggagccgtcatcatgcaaggtgtccggcgaggacttttctcaaatgaagcgggtatggggtctgccccaaatgctgccgcaacggcaaccgtctctcacccggtgaaacaaggattaatccaagcactcagtgttttcaccgacacgctgatcatttgtagctgcacagcactcattatcctactttcggacgttccgctagacggctcggtgaaaggaatccagctgacacaaatggccctgtctcaccagatcggaagcgtgggaggacaatttatcgctatttgtatacttctgtttgctttcagttccatcgtgggtaactattcatactgtgaaacaaacttatttttcatatccaagaataaaacctatttacaactttaccgaattatcgtggggggaatggtcatgttcggatcaatcgccgccctagatctcgtgtggaatattgccgatctattcatggcaatcatggctataaccaacttgatcgcaatcgtattactgggtaaaatcgccttgaaagcattacaggactacaaccgtcaacgccgtatcaggaagaaaaatatcatattcaagtcctcgttcatcccggaattaaaagattccacgagtgaatgggaataaaatattttttttaactttgcaacaaacagaagggattgacacgatgatagatttatgtgtaattttctcctgccgctgtactttaaaacaggaaaaaggcagcattaaaaataaagaatagtagagatataaaagatgagatttgacgagctggaactagaggattcattgttgcaaggattagatgccatgaattttcaggaaacaacccctatacaagaattaacgatccctgttatcttagagggaaaagatttaatcgcctgcgcacagacaggcactggaaaaacagccgcttacacccttccgattttaaatcgattaatcaaagaagagaaccgatcggatacggtaaaagctgtgatcatggctcccacccgggaattagcccaacaaatagatgtacaattcgagggattttcttattttctccctgtttcgacagtagtcgtctatgggggtggtgacggaagtttatgggatcaacagaaaaaagcattgcgtctgggtgcggatgttgccatcgcaacaccgggacggttgatcgcgcatctgcaacatagcgatgtggacctttcgcaagtaaaatactttatccttgacgaggccgaccggatgctggatatgggattttttgacgacatcatgcaaatcgtgaacaaactgcccaaagaccgacaaaccatactcttctcggccacgatgcccccgaagatacggcagttagcccaaaacgtacttcgagacccggtagaaatcaacgtggcggtatccaaacccaacgaagccatcatgcaagccgcctacatctgccacgaaagccagaaaatgggtatcattgaagagcttttcagcaaaccggtcttacacaaaacgctaatcttcgcctcttccaaacaaaaagtaaaagacctcgccttcaccttaaaacgtaaaaaattcaatgtagcagccatgcactccgacttggagcagtcagaacgggaatctgttatgatggattttaaaaataataaaatagatatactcgttgccaccgacatcgtatcccgtggtatagatattgatgagattggattggtaatcaactttgacgttccccatgatccggaagattatattcaccgtatcggacgaacagcgagagccagcgcagaaggtgttgccttgacctttgtctccggggcggaacaaggaaagtttcatcgcatagagcaatttattgaagaaacgatttacaagataccgctccccgcctacttgggaccggcaccggaatacaatccgaaagcattcgaacatggctcgtcaaaaggcagaggacgaaaacctagtggccgttctttcgtaaaaaagaaaaaccacgccaagcgagaaggaggctcaaactagataaataaccctttaaaattaaacacttatgattctaaatgccggaaatatattacttattggatctatcctattatttattagtatcgttgtcggaaaagcaggtttccgtttcggagtacccgctttacttctctttttgggagtaggaatgcttttcggaaccgacggtttagggatcgagtttaacaacccgcaaaccgctcaatttatcggagtgattgcattaagtattatattgttttccggtggtatggatacaagtgcggcagaaatcaaacccgttctgggacaaggcattgttctcgccacggccggagtcatgtttacggcctttctcacgggttattttatctattatatcacgaatctcgaaaatagtttcgtcaccctaaatttcacagaatcattgttactcgcctccgtcatgtcatctaccgattccgcatccgtgttctcgatcctccgttccaaacgacaaggactaaaagagaatttacgccccatgctagagctggaaagtggtagtaatgacccgatggcctatatgttaacgatattacttatcggaattatccaatccggagaaagcagtttaagtaacacgatactgcaattcatcatgcagatgagcattggtgccgtatccggttacttgttaggaagattggcagtatactgcatcaataaactaaacatcaaccaatcattatatcccgttcttttattagccttcgtgtttttcattttctcgttcacagatctggtaaaaggtaacggttatctggcagtttatttagccggcttagtagttggaaatcacaaagtggtacacaagaagagtcttaccacctttttcgacggtatcacatggttattccaaatcgtgatgttcctcacattaggccttttagtaaacccggctgaattattcccggttgcggtgttaagcattcttatcggggtattcatgattatactggctcgtccgataagtgtatttttgtgccttctccccttccggaaaatgaccacaaaagcacgggcatacgtttcatgggtcggtttgcgcggagcagtccccatcatttttgccacgtacccgctaatcgcaaacatccagcacgcatcattaatatttaacgtggtattcttcattaccattctttctttggtcgtacaagggacaactgtcagtttcatggcaaaattactcggtttgtcaacccctgaagaacgtaaaaacgtctttaacgtcgaactacccgaagaaattaaaaccgccatgtccgaaattgaagtcattccttccatgctggcaaaaggcgacaaattaatggatttggtattaccggataacacgttggtagccttgatcaaaaagaacgattcctattgcgttcccaagggaaaaaccaaactacataccggagataagttactcgtgatcacggatgatgatgaagctctcatgaagacttatgaaagtctgggaatcacggattattcaattcaaaaaaatgcttgatactggccatacggtagtacatcagagatagaaaaaattacactttataggcattttctatcatctgataaaaactaaatatttgtttatcaaaacaaattgtcgtattattgtgctatcaaaacacgaccactaaaaagattaaatttatgagcattaaaggaacaaaaacagaacaaaacttattgaaatcatttgccggtgaatcacaggccagaagtcgttatacttttttcgctagtgtagctaaaaaagaaggattcgaacaaatcgccggagtattcatggaaactgccgaacaggaaaaagaacacgccaagagattcttcaaattcttagaaggtggaatggttgaaatcaccgcatcttaccccgcaggtgtaatcggaacaacagcagagaatctgaaagctgccgcagaaggagaaaatgaagaatggtcagacctctacccggaatttgctaaagttgccgaggaagaaggatttaccgccatcgctgctgtattccgtaacattgcgaaagtagaggcagaacacgaggctcgttacagaacgcttttagctcgcgtggaagccggtaaagtattcgagagagacgaagtgatcctgtggcaatgccgtaactgcggtttcgtttacgaaggcaaaacagccccgaaagcgtgtcccgcttgcgctcatcctcaagcatatttcgaggaaaagaaaaacaattactaatcatacttgtaattgaggataaaaaactaaaggttgaggcagatgtctcaacttttagttttttattttatccctcttgaagaaatcacaactcgattttcgttatattcgcgacaaagaaacagaaatctattttttaattgataaaataaagtcattatgaaaaaagtaatcaactcaccaaaagcaccgaaagccatcggtccttacagtcaagcaattgaagcaaacggaacgctttacatcagtggtcaacttcctattgacgtgaacaccggaaaattcgttgaaggtggagtaaaagaacaaacagaacaatgtttgaaaaatatcggttacatcctagaagaagccggatatacttttgacaacgtggttaaatcaacttgcctgttgggagatatgtcttatttcgctgatatgaacgaaatctatgccaaatattacaagacagattgtcctgcccgtgcagcttttgccgtaaaagcccttccaatgggtgccatggttgaaattgaaaccatcgctataaaataaagataaaaacggctggttcagccgttttttcatttttttttcttaccttagaggaaagtagtgcataacttaaatcaaacatgatgagaatattcggtttactccttatgcttgccctatttttctcctgtgcatctcaaaaagaggtagcccaaaataaaaaggggcgttgcgctataaaagattcagcgcaatatgaattgatcgtttttgattcgggattcgatttttggttggcaagtcaccaaaacgtggccagtcaacactcggaaagttattaccaaagtatgaatcaccagtatgccatcgaatggaacagaaggtatgctgccggagatccgagaatcaacagttatatcgattacagcctgaacagggactacgggtttgatttcaattacaaactctacatgtatttcaggttcttcgaagacacgaacaggataaaactaatcccgggaaacagaagcctttaatgattttagatttaatgattttagattgagagattaaaagaagggatagcttgtgtggttggaatctaaaatctaaaatcattaaatctaaaattactcgcttcttttattgcctccggggtacccaagtcgagacatcggccatcgtgccggaaaagctcgataggatgttcttttgcctgcgccagatgctcgtcgatgatagagaatactccctgatgaatgatatgctttaaatattccgagctaagaatctgaatcccgcagtaattgaactccgtggccccgtaaaagccttcgtccacgatcttttgctccccggttcgcttgttctcccaccccttcaaaataccgtgattaaacttcaatacccgatctgcaacggcctgttgcacgaccagtgtggcgtatgcctcacgtgattcatgttgacaaacgagagccttcaaatccaagtccgttaaaatatccacgttatgaataagcacgggttcccccggaataaataattctcgggccttcaaaacccctcctcccgtatccagtaactcatctcgttcatcggacaaaacgatgtccataccgaaatctcctttctctttcagaaagagttctacctgatcggcgaaatgatgaatattaatcactaaccgctccacctgcacttctctcattctctcgaccacccgttccaacagcgtctttcctttcaattctaccagagctttcgggcgatcgtttgtcaatggccgcaaccgggtacctaaaccggctgcaaaaatcatcccattcatctatatctctataatat

SEQ ID NO: 203 - DNA, 7494 bp, Butyricimonas faecihominis
atctttaatatccagtttaacgccttactatcaaggaaaatcaacgaaaacgttttaaagttccccgaccgtttattccgatggaaagaataaaatattaaaattaatagtactatgtattgcataatactattttttattcatatctttgtctggcattacaaaagaaccaagagatgaacattgaaaacacacaagctcaaatgaggaagggtatcttggaatactgcattttactgatcatcgcgcaacaggacgcctacgtgccggacatcatcagtaaactgaaagcctccaagatgatcgtggtcgaggggacgatataccctttattaacccggctgaagaataccggattattgtcataccgctgggaagagtcacagcaaggccctccccgcaaatattacagcatcacggaacaaggacgagattttctcaaggaactcgaaaactcatggaatgaattgacctctgctgtgaacagcattaaagaaaaccataacaactaatatcccccgctcatgaaaaaaacatttactattaacctaggcggcaaggtactcaatattgacgatgacgcactggaatcattacagcaatacatcaacgcgctgaaagcccactactccaaaggagaagacggggaagaaatcatgtacgacatcgaaagtcggttggccgaattattcatagaaaacctgaaacaggaaaaccgggaatccgtctcgatccccgacgtggaacaagccatttccatcatgggaaaaccggaagacatttttgacgaagaggctccccgggaaactgcccaacaacaagagactcgctcggaaaagactttacccagaaaactgttccgggacccgcaagaccgcatcttgggaggcgtggcctccgggctcgccacgtacttgggaattccggtcaccctcacacgtgtatgtttcctgttgatgatgttcgtttatggaatcttcttccttgtctatatcttcatgtggatgctggtcccgaaagccgtcacgccacgacaaagactacaaatgagaggaaagggcatcaatgtttccaacatcgaagattccgtccgggaaggtttccaaaatgccagagagaaatacgcacaccaacgtagcagcaaaacccgggatgccctgttgattggcgggatcgtcctgtgttttatcctctcgttcaactttttaaccaagttaatcagctttccggtaaattatctttttggtcacatcgtaccgggccttagcacattcaacctttttcactcgcatatctacacggacatccccggcatgttattctctttcaaactagccacgggggcacttatcgtcatacccattttcttgttattctaccttttggtccaagtatttgttccattcaaaagcaataacaagaaagtgatcatctataccttgattctttggatcttcgctctagcattttccattttcacggctcaaagacacagcacccggcaccaccagaattacggggtgattcacgaacaggaacagcccaaccatattctcgacaacgcattgtacattaagtccctaaaccaacatatagcttaatcacccatatcatgaaaaaaacatatactataaacttaagcggtaagattttccacatcgatgaagacgctttggaaaaactacaagaatacatcaataccctcaaaacatattacacgcaagaagaagacggtaacgagatcatggatgacatcgagaaccggatcggggagcttttcacggaaaacttgaaaggacagttccgcgaggtgatcactctcgatgacgtggatcaggcaatcgccacgatgggtacacctgacgacatcatcgacgaagacgagcagccccgaaaatccgccccgaaacaggcaaaaaaactataccgcaacccggataacaaagtacttggtggagtggccgggggattagccgcatattggggaatatcccccttgctcatccggataggtttcgtacttctgtccttctactatggaatattcattatcgtgtatatcattttgtggattgccgtccccaaggccaaaacgaccaaacagaaactcgaaatgaaaggagaaaatataaatgtctccaacatcgaacgctctataaaagacgagtatcaggagattaaaaacggcaagggtgccgctttcgtgaaccgggtaggcgaaggcttatgcgaagtatttaccattatcgggaaagtgttggccattattatcggcgtggccctcttcgtctggggaatcttcatgctgttcgccttcttgtcggcattattcttacctaacctttatccttggaaaagtggttttatggaactcgcctacgcgttcactcccttaaacttcactttgggtaaaatcgctatatcattcttgattggaattcctattatcatgatcatttatatggcgatcaaattgttattctccttcaagagtaataacaaagtgatcgccctttctgccctctcgtgttggatgctgggactcgttatgctcatagtcgtggggatcagcgaaggtcgaagctggtcgattaaaggtacccgctatggagaatcgctcgaactcagtcaacaggacacgctcgtcctacttgtaaatgaacgctacaaactacctgaaaatctttacatagaccaagacgtgttccaattagcctccagcaacatgattgccccggacatcagggtatactcgaccgatgacacaaccccgacattacgtgtgcaattttatacccaagaagaaaagccggtgtatgacaacatggactttaactggaattacaagaacgacacgctccgatttgataattacatcaagctcgcaggacaatggagggctcaaagagtgacactgtctctatacctgcctgaaaataagaaagtactccttccaccccaaacaagtcaatacttgagaaacttgagggattttgactggggtgtacgttccagactaaataaagataagatattattaatcatgcaagacgggaggcttcaacctctcatgtaaaccgaaacggcaggccttcatccctttggcctgccgtttctcccttttatttcttcgagtcaatctctttcaacaactccttcaccgctgtctccaattgctcgtcctctcccttaataatcttctccggagagttagcaatcttcacatccggttccagttgtttattctccagatagctaccgtccggtaaacggtaaccgacgatcggaatcccaaaatatagcgtcgggtcctgcaaagtctcccaagacacgctcgtcatggttcccggcacaggcattccgacaaccttaccgatcccttgatgttggtaaacccaaggcgttccgtgggcgttcgagtaattcgcctcacaggtcaccataatcgaaggcttattccacctacggcttggcatatcgcaagcctcccgcccccgaacgacttgcgtaaaatatttcttaccactgaacagaatctcaatatcctcgtgcaaacggccaccaccattgaaacgagtgtcgatcacaattccttcccggtcattatatttacccagaatatcggcatacacggaacggaaacttggatcgtccatactggaaatatgcacgtagcccaaacgtcctcccgataaacggtccacatcggcagctctttgttttacccaccgccggtaaagtaacccgttcatcgtaccctttgaaatcggctcgatcacctcatcccaacgttccttggtagtggggtcataaatagagaacaatacacgtttaccggacttacctctcagcaggggatagtaatcttccccggctttcaccgtctgcccgtcaattttctcgatgaccattccggctttcaacttcgaacggacattatcaaaaggtcctttctccaacacctcgtcaaccagcaacccgtcctttgcatagttcacgttcaacaagagacccagctcggcagttgcctcacctcttgacccggggcggtaacccgatccggtgtgtgaaacgttcaactcacccaacaactcactcaataactcggagaaatcatagttgttattgatataaggtaaaaacttctcgtaagccttggtcatttttgcccaatccacaccgtgcatattcttctcgtagaaacgtttggcctcctgacgacgcacccgatcaaacatatatgcccgctcggcagcctgatccagtttcatttcggcagaatacgcaatcggacttcttctctccgaacccagattgatcttctgcatggaacgtcctcccaacaggaacagatctttcccgtccttatccatctccaaagacgcccaaccgctgttcagcttatgcatcaccttggtactccgtgaacgcagatcgctcacccacaaatccatacctccctcgaaagaggccatgtaataaagcttgtcgccactcttgcttaatatcgcatctcccaattgtgaagaattcggcgttaaccgcatcacccggtcctcgataccttgcagttcgacctcaatattctttttctctttcacggcgggtttcgtctcgccttttttatctttctgatcctctttctgttctttatttttcagagaggccatacgtttctcctcctctttcagcaactcgtaatcttccttgttcaaacggaatttatcgtaagcatcctgattcatgaacacgatcatcacatcctgcaaagaaccccacgatgcatggttacgcatcccgtaacgttcactggaaaacaagatggcatttccatccagcacccaccggggattactatcaaaatagccgctattcgtcaggtttacaacttcccctttcccatcggcactcacgatggcaatatcactatacggatcgtgacgattcccgatgatttccatcgcgaaccatttcccgtcgggagaccatgtataggtgaaaccgtcccccgtgcgatattgatatttatcgtccgccacctgtcgtaccttcttcgtcttcaaatcaacgaccatcaattttgtacgatcctcgataaaggccaattcctttccatccggagagaattgtggggcaaaccgctctttggttgaaaccgggagaacagcttcctcttcgattaaagttgcattcgggaaattcacctcttcctcacgagcaattttcgccgtgtagatattccaatttcctccccgttcgctggcataagcaattgtacggttgtcaggagcaaagctcaaccacttctctccctccggagtcgtggtaacttgtttcgtcgtcgtgtaatcggtggaagtcacgaacacatctccccggataatcatggccacctgtttcccgtccggggaaatagtcgcactagttgccccggaagtaaaacgcaacgaggcgatattatctttcgcattgtcaccaataatatccactttcactttcttgggacttccggatgcatctttcacgtatatttcaccgtcataaccaaaacacaaacgcccgttacccgcaacactcaagaaacgcacggggtgagtcttgaaagaagtctctgccttcacggcagaaggatcagccaccgggaacgagtacacgttaaacgaatcttcccgctcactcagaaaatataccctttgttcgtccggagacaacacgggagaacgatcttcccccgcccgatcaatcagacgggtatgtttcccacttttcatatcatagcgataaatatcacgtgtgatagaagaggtatgatgtttacgccattcattctccccgccctttttatcttggtacaagaaagcatcacccgatttgaagaaacaaatctcttccgccggggttgccaatatctgccggggacgtcccccatccaccgatatggcatacaattcggtcatggaacctgccggaaataaagcactctgcgcgggatcactcatttgcgtcccgtaaacaatttcttttccatccggggtaaacgtgtagggtatctccttggctgaatttgtcgtcacttgccgggcatcacctccccgggccgacatcacgaaaatatcgaaattaccattccgatcactcgtgaaggcgatctgtttcccatccggagaccacacgggatgcgattcatacgccggatgcgtggtcaactggcgagcctcgccaccttccgcggggacaacataaatatcccccttataactaaatgcaatttgctttccatcgggcgaaatcttcggataacgcatccaaagcggtcccgcctgaacgaaaaaagcaaccagtaaaaaagtaacagtcaatacgattctattcatccttcatttattttggtatttaacttagcgcaaatatacgatccgggattccggcatccagataaaacgggtaaaatcagccccttgaataagggcaaggccatttccacatacctcactttccctgtataattgaaaaattttctcacgaatcggatcaccgggaacccactgaatatgttgtcgaacacgagcatcaacaatcattcccccgtagaattcgagacaaggaatttcccggatttcgcctccggtattcaccacgtccaccaccttcccgtccttcaaaacaacatatccattcttcacgaattcaaatccgggtaacaaaatataattagccgcaatctttctcattcagaatatgatcttatttcttttttacagatttcctttcaagctccatctgtctcctctgctcgtattcctttttcaattgtttctcccggttcggggctacgtacgttttaaagatttcggttttgtacacgcaaccttcccggtcattcaacttcttcactttcaccctcgtatcccggtcactcttgggaatcttcataaataacttcgtgtaactggaatccgccacgtagaactcccagtctttcttgtaagggcgcaacgtgtcgactcccacgtactgatccggaactttcagcgtatcattatcggcagacagaaaataagtctgtatgaaattccgttttccccggtctgatttttccaactttatcgtcgaggtaaatttgtacataccgggaacaatgctatccaatttcaccagcacgaattggttccgcttgtcaaaataaaccgtatcggctttcaccacacgtgtttcgtacacgatggaatctttcttccggactttagcttgtgtagaatccgggcgtatagtatctgccacgatcatcgtgtaccccgggaacagattaactgtatcattcacggtcaactctttccactcccgcatgattttcgtctggcgacgactcaaggtatcaatcaccacgtcataaattttattgaataacgccgattgcagagaataataggtcacgcaagaatcaaaatcctcccgtgtaatcccgtatttcgcaaacaggtcgttataatataa

SEQ ID NO: 204 - DNA, 7411 bp, Butyricimonas faecihominis
ctcttacacagcggactccgccacggtcttcgtctttgtgattaatcaagtaatataccgatccttcattttcaacggaaaaaccaacgcgttcgccaccggctgtgttaaagctgaaactacttctggaaaaatggtcgctcaggggccaagaggtcgcgtttcttggcatcctggagtacattaatgccagttctctttgattgggaaccctccatcctttggggcataccggatttgttcctccgggttgagagcgggcgttaaccatctcccaggttaacccgtttccgtatgtcttggcatttatttcaaaagcgttccaaggtttgttgtacccgcgaacgtctcgttcgttgtgattgggcaactcttctacggtactgaaacctcgtatcgatttgggatctagttttgttaaagtgatggttctatttgcggcatcatacgtgacgaaatcttctggatggtcattttcgctcgcctttttggctagtcctagattcctgacacacctgtagtacaccttggtcgaggtaatggatccgggtccatttaaaggaccgacggttgaaccttccgaagaccacaatatctggggaatgtccctgtaagtataaggaaacaaattagtacccaatccttggcggtctttatctagtacggtgctgctggcgtaccattgtttgttttcttcccacgtgctgaatttgtatagtcgggattgcgagtcaaaggagttttctccgatccacaagtccgagagttgattgatactggccaagtaccattgaacctcctccttgtcgattcgcccgttgccattcatgtcgcgattaaggcgcaagcatttgtacttggccgcttcatacgaagcttgcatttcccatgtcgtgggatctatgtaggtgttccaattcatggtttcgtttccaatccacatgttgatggagttttttcgtccgttattgagatcgttatacgtgcgattcgttttagttctttctgtttcaaacgggagaagagtttcatcctgtatagcctcggagccccatgcggtgaagttttcagtcaagtttttgttatacatggtttgtatggatgattgcctgatggagtacaatgcgatggatttggtactcatctggtcttgactgtattgaagattggataaaatattgagcactctttcctgtgtattgacgaattttttccaaagcccgttttccacggtttcagatgtgttttccgggttcacgtcatagtaatactctttaagataggtggtaaatatgattttatctccactatcaaataaatggttcccttgtgatgcgagatacctgcgtttacattccttcaaaatgctgacgagttgtttgatgtttagcattttctgtgttccattgtttatatcgttcatgtaacgatccagggggtgttggtacttcttatctttgaattcggcatccgtgtaaacaccattatctccttggtaggttacaaaagtttcggtataaaaatttctactttttgtgttaatgttgaaatatatccagtcatagtctttgggattttcattttctgctccattggagaatggggtgtaaacgttccaagtcaagctctcgtcgatattcttttgctcgaaagttgtcgtgaaaatttcattgtgggcatcgaatcttttaattcgttcggcgacaacaacatctccctcgcttccgggtgagggttcttcgcctgttgttgattcaacctcgacgatgatgtcttccacgctattgatggttaccgtgtaagtataaaaatgatttctgaggctgttgtaatcgttcacgccattcactcctccgaggtgaatggtgtaagttacgtctgctgaaatttcttgtcccccgccgatgctataaaaaacatttcctttcaatttcacgtaggtcgcccgttgatccgcgtaccggtaagccccgtttgtcacgcttccgtcagcgttaggtgttttttcttgtttttcccgtagggcatattgatcgcgatattccccctctgcgggtattgtttccttggggtttactttgttttcgggtatgtagaacgcgaacgtgatggcgttcgtggtggagatttcaaagttattccactcgctgttaaagtaattctcaaattcaaattgtccttgtgtggtgttcggtaacacgcttacttctcgcggtatagccacgatcttccactcgcgaggggtgaatgttacgccttctttcgtttgcacgttgaaacgtacttttgcgtcggttcgtgtcaatgggatgtcgatcgtgttattttggtttgctattaactcggctccttctttcatcccgctcatcagaaactggattcctctctcgatgtattttccctgcatgtgcgatgtcagtgccagcaaatcggctttcgaggtgacggcatccagcttcgtgtcgttcaggtcgtgaatcgtcgtgttgatgttcgcgataacagctatggtcttgccgttcccggcgggaatgttctccaccttggtcgtgtaagtctttgattggtgtatgttattgtaaaattgtccgaacaccttgctcccgtcttgattgaaaacgaacacgtaagcgttgcttattatttgttcatcctcgtcacttgacacggcgcgtgacagcgtgttgtctgaagagttgaaattcaatgttaatgttgcattcccgctattttcatggtccccgagtttatcatcttgacaggcggctaggacaagcatcaaggcatatgcgatgtatatatatcttttcatagttttctgttatttaaattcgggtacgttaattgtttgttgttgccatgactctaccgtgcaggtcaatgttaagtctgccaaagtggaaactagtatatttatcgagtagcgttgcccggcgatcaaagtacttattatccggtttagtgggactgttatcgtttgggtctgaatatttcctgtcacttggtattccacggtgactttaatctcgtccgaatcatcaatcccttgtggcaatagcatcagggatgcgttgtcggtgctgattggctggtaggtggtcgtgatggttttcaagttcacgtcctttagtagtccgttattgatggttagcatataggatttgtccgaggcgtcctcggtcggtgtccaagaaaatgtccccggggtattgccgacgtcgtaagagagtgtcgctttgttcttgaaattcccgagggtgatggaggttactttcaccgggaaatcgcaagcgtctgtcatcttggctttgaacacgatgcacgagagagcgtgtcggaatgttaatggtaacttaccgtcggcgttcctcgatgttttcgtttggttgagtaggggaacggatacgagtaaatctcgttggataatcacgtcatccggtaccgtgtaggttagttggggataccccgccgtggaggaggaggaacttaaagaggtgtacgaatctccttggcttgcgtaaggggaataggcgaaaaatgacagtttcccattattaggccagaacatgagaggctcgtaagtccatgtgccacttgtctttttcacgtgggtgttacacatgaaattcggggtgctagtccccgggataaaagcgtcggccgtgtagtaggcgtatacaccgaaatcttgcatgtcgtcgtttcccgtttcgcttccccgggcttgatcagcctggatgaaggattcgtgaaatggcgtggcaataaaatctattttatcaccgtcgttggcaggttccggggcgtttttgtcgcacgatgtgaacgcgatcaatagggctgccgacagtaaaatgtattcttttcttttcatcgtttgacttttttgaggttttattagtacccgcgggcagacgttcaaccgcccgcgagtgagccgttaggccatgtttagggttgcatgaaacgcgagggctattttacctcgatggtaccaccatcaacaggttgccactcttctactgtcgtttcgaattcgatcggattcaaaatgcctgctgttgcgccgatgtttaagttgtaagtgatcttttgatttcttttccactctccggaaataccgactgttacaggagcatatttactttcgctaccttttagataaatttttataccatctgcaagtttttggtatatcttgcaattgatcgtcaggtaattaccagttcctacattttctgtatttgcctccaaggtttgtggcaatagcatcaatgccttgtctgcgcttccgatcgtggtgaatgcttgagcgccattcgttacttgataacctgcttcattaatggcatcggaggtaaccgtgtagctggctggagtagcctcagtgtttaaagtccatgcttctgtcgaagatgcaaaagttcccgtgtttttcagattgtgaatttgaatcccgttctcctcaacatccacgaacaggtttgtggcacttgtcccgattgcaaaatgcacctgagtcaaggcgtgtttgaatggcatggttacgctgtttccgttatcaggttttgtttggtttgtggcaacagcgtacattaagtccacttgattggcttcttcggctggaacggtatagttcaacgttaaaccggtcgtggcgaaagttttcgccgtgatagctgcattctcgtgcggggaataggcgtaaaaatcaagcaattcgccattcacaggccagtaagcttgatcgcttgcttgggcgtaagtccatttcgccccgtcagatacgatttgaatgccctcggcagtcgttcccatgtaaggactttcatttaggactgcatttatcttgataaatgcagttactccaaaggcgttgtcttttgttaaaaattcgttattgtcatctaccgggtttcccctggagatgttcttgtaagtggagaacccgatcaggttaccctccttattgatttccgaatcaaccacgtcgttttttgcgcaaccggcaagcatggctgccgcagttagcatgtacaatagattctttttcatgatcagtaaattaaaagtgaataattcattatttttaaattggtaattccgtttcaatttcttcccattcttcaacctccgggtggaaaaccccgtcaccgttaccgatggcttccgggagagtcacctcggcccggattttgtggacggtttgtaccccgtcatgtgaagtttcaattaaatctttcacgttaagggaaaccgtgtgggtttctccgttcacgaggatgaaattcatgacgagttggtgatcattgaggcatttcccgtttgctttttccggaccaaacgagatgagttgcttcgtgatcgtggcgagtttatagttgtccgggtctacccgtttgttgttcagcacgaactcgtgtgtgataccatgcccgaactttatcgctttttccatgttttcgctttcacacatggccgtcaggtgggaacgtggggccccggcagctgacgtgatgttcatcacttttacctcaatgtcgattaattctgtttgtcgttccggggtgacttcgatcgtttggctgacctcgtgttctccggtagccggcttttccttgtaatagtgaatatctttcggggtaatctcgatcgccttgacgagtgctctggctaggatgtcgcatgctgtcaagtaggaattattatcttctgcttttgataatagattcgcgtacttcggctctttattggccgaaatgacagcgttgaacgtgtgtaggttttcgataccggtaaagtcaatgcttgctaattcctcttccgtgttgtttatcaccatgatgtcatatttacccgggtaaaggggaatatcaatcgtgttagggtcgctgctgatcaaacattcacagacagcttttccgctttcgttgtcgaacacgtaggctgaggtaccgttcggttctaattgtgagggttcccaattgatattcaggcgtacaaatccttgttcttccgtggcgtaaaacagattgtccctgtcgcatgaagagcaggcaagtgtgaaacaaagagttgcgatataaattatgtttttcatttcacacctccttctttttttactgtttttttatttaataaccaaacgagggaaacttttgcgaacgttggaccaaaccattgtttcctctctactttccacgggaacctgaaaacttttatgtccccgtacatcgtgtcgttcactttatcatactctttcgtgtccctttgtaaataacccacgccgaggctatactccatgtggaaatgcttgccgatcttgtgagcgtaagcggcttgaagacctgcatcaaagaagtcgccttgttccccgtctttatcgaaaagttgtagatcgtatttccccactccgccgtaaaggccaatgttccatcccgtgagaacttcttttgcgtcacgatccccgagccagtatttcacgctggcgtgtcccgatagtaattgcatggtccagtcggcacgtgatgctttccaccacgggaatattccttctgcagccacggaccattgtttaccgatgggaatttctatttctaggttcacggccgaaagcacgtcgtagagaaggttcgttttcatggcgaataacggtttcgagatgattagcgggatgaccggagtctccggttccgatttttgtggagggataatcttctcttctttcttcggttcctccttcttttcttccttgacaggctcccgcttatagtagatcacgcagacagcacccgtgcgtaattgtggtaagaagtttttcctgatataacgccatgattccccgttcgctagagtcttgatcaaccattccttggctccgttctcacgatcggaatttatgatgttaattaatctttcccggtgcgggatgtttttatccgtttcgatcatacgtttgaaatcaacccagttctcaccggtgtatcgtgcatagacaagctcttttttgatctcgggatatttccccgtgatataagctttgacactttcggctcttttcctcgataactccaggttgtatgcttccttgccatcaggagaagaggaggccacgatggtaatggagtcgagattaggtatgattaattcatttttgattaactcatccagtttcttcaaagattcattgtttcccatgtacgtgctatctaaaatagccccgtcaattttaaaatagaggacaatgttgtttgtcgagtctgtcttgtgttgatgttcctgagcccgaacacgcattatgcttccagttaaaagcattattaaaataagaatgattgcatacaccttcatgatttgtaatatttctgatttattgtcaatatcaaaaaatgatcatttaatgatgttaatt

SEQ ID NO: 205 - DNA, 7406 bp, Butyricimonas faecihominis
atattagttattgtttgttcaatctttttgggaacaggatgcaatgagtttcttgacttggtgcccgaagacgatattctaaccattcccaaaatttttgaaacgaggacaggagcagctcgctggaagaatgatgcctgtgccggttttaaaacgtatgccgtagatttgaattggaatcctgcgttagcgggagcggatgaatataccgccggagattatgcccggaaaggacaggggtatatttcaactttgtatatcgcagatgggttacaaacagcgctatcgcccattaatgatatttggacgtatgatggagtttattactatatccgctattgtaatactttcttgcaatatattggggatgtttacaatttacgacccggagagttggaacgttggactgccgaagtgaaggcattgaaagctttttattactttgaacttgtaaaacgttacggtccgatcgtgttagtcccgcagaatattgatgtttatgctcccatggaagaacagagacagtcgagaagttcggttgatagctgttttaaagcaattaccgatcttttggatgaggctattccatatctacaagtgtttgcggagaaagatgcggatcagcgagattttttctctaaagagggtgccatgggattgaaagcaagggtattactttatgctgcttcaccactttttaatggagggttatcgcaataccggaattttaccaataagaatggagagaagcttttttctgaagaagataaagagaagtggagggttgctgctgaatatacagaagaggttatcgagtatttggaaaataatggctataaacttatttccggaaatgaggataaatctactgctttactgaatacgatgcgagatttggaatgttccgtgtgggctcctaactgggccaattcgacggaggccgttatgatggtcgcaggatacaataatttgtatcaacatctgttgcctaaattaggttcgagtacttctgatattcattatagtggtgttttgaagggtacattgggtacgagtattcggatggtgaataaattctatacggcgaatggattaccgattgaggaggataagacgtggacttatggtgatggttatgccatggctcaggaacgcgatccggcttatacgaaagtagttcctttgggtacggatgtgcttgctttgcatttgaaacgagaacctcgtttttatgctacgattgctgctcccggattgtattggcaacggggtgtatatgattcatacaatatgattgtagattcctaccggggaggtgctttcggcttaaaacaggatcgtattaatggtgattacgagcaaaatattaccggatattatataaagaaaggaacacggagtgaatttaatacgagtagttatagcaatgatattatgagttttgctgctaatgtgcatgtggtaatacgattggctgaactttatttgatagcagcagaggcttggaacgagtatgaaggcccgaacggggtgcatcgaacacagatctttgatcgtctgaatgcaattcgtgaacgtgccgggctgtctacagttcaagatagttggggcagatatggtatcaatccgaataaattcaatgagcaggttggtctgagagatattattcgtcgggaacgtacgatcgagttaatgttcgagggacatcgtttttgggatgtacgtcgttggggtacggcaattgacgaaggttggaacgataaacctcaagcttgggttgttactgctcagacatggcaagggttctataataactttcaagggcctgttaccgtgtgggacaaggctgcatttaatccatctcgggattacttgttccccattaagagtgaagaagcaatgatttccggtatagtacaaaatcccggatggtagatgaattttaaattttagattttaaatttaagttacctaaaaaagaaaaagatgagaaatacaatattattgatactattgatgtccgtattgttcgcttgttctgatgatgataatggtggttttgatgtagagataaacgaagatatgttttcttttacaccaacggaggggggagccattatgcgctataatttagcggatcggcgagtgaataaggtaagcgtggaatacacggacgaatttggagaatctgtgtataaaattgcagattattccgtggataccttgttgttggatgggttcaaccaagcgcatacggaaatcccggtaaaggtcgcttttttggataaaaatgagaatgcatctaaggcgttacattttacttttgatacacgcccttcttcgttgtatactttttttgatgaagtggctgttaatccctattggaatggatttcagttggtgtttaacctagaaggacgggcggaaggttctgcctcggtttatttcgtggggactaatcccacgacgaaagagagagatactcttttcttagagaatttccttctggaagcaggacctaacgtaaaggctttctccatgacggattcacagattcaggattcctacacggtagtggtcaccacggaggacaatcgtcaacggattgtacggaaacaggtatggaacgatgtggtgggagcgaaaagggtacttataccgaatgcgaactttgaacttttggatcccttccataaaattattacggaaccttattctacggcagattggagacgaccgggagcattaggtgcggaatatctgtttgatggagatgtgaaggggacccgggctgcagaatattttaaagccggtaatgccactcctcctttcacgtttttggccggtccgaatgccttgaatcgggaaggtaacgaatgttattttgtgttggacattaaggaaccggctattgtcggagagttacgattctatatgcgaatcaaggatggatatgcagtaaattcccaatttgataatgattattttacaaaattgccttgtaatattcaagtgtacgcgtggactggagaaggagattatgatccagtgacgaattctggtaccaacgatgattgggaacatattggtagctttgagcaggatccgaatgctacgttaatagatcgttggtatataaatccgacaaataatcaagtagatgaagtaaaaactattgcagccctgaatgccgtgggaccttattatatatctattgctttacctttcgaggataaagagtatcgctttttcaaactcgaatttcgtgaaacgtatgtagatttatataatccaagttataatcataacaataataataacgtgactttccatgaattggaagtttacggacaaaaataataatgtatgagaggactatttttgaaatatacactgatactcgttttgcttgccggattggtcgcaagttgtggcgagagtcttgaagatacttactcggactatacgggtgatggtcccgaacagtatttaacaaagatttatgatcttcaaggaaagccccgatggatgtcggtagagttgacttggaatttaaaattagatccgggtcggactgctattttagtagaatggacagatgatgagaagacggactccgccgttattgatcggaatagtacgagttatctcgtggaaggattgaaaaattatgaatatgagttcggtgtttatgctatagaacaaacagagaacggtgaaatcattaaacgttcgataggtgatcctgtgtatatacgtccctatacctacgcttctgatgagttgattctttttagtcgagtggtcaaaaagcaattcaatgttgcagataaacaattgtttgtgacgtttgaggagtggacagataatttgatttcatttaaaattggttattatgaaaagaataatcctaccgaacaattttgggaagcgacaccggaggataggatcgatgattacccgaatgggttaccttacgccttaatcggtactgatgtcgatttcagtcaaggagttaaagtgtatagaactggaaagattgcagttgtgggggatatgttgttggagatggagcctattaatctttattttgaacttccttcttttgagagtgattttgccgtggaggtcagaagtaaattagatttgttgggtgaaatcaaaaaagcagatattaccgacgtagaggtgttggatattgattacaatcaggtttctttggttgatgtactccatttcccgaatttgaaagaacttcatttggggcggaatcgaatccttgcagacggtacagaattaacgtatcgttcaactttaacagaacaagttgtttccgaagctgctttacgggtggctaaagaaaacggagtggaaatttatcactatgggaatcattattttaacgtagtaccggatttctttacgggaaaaaatattgtggcagtagaaccggctctcacattcttggaaaccagtagttggaatatttctgtaacaccgagagatttaatggagtataattcaggcttgaataatttattgactgatgatgctagttattggttaccacaatctagtgcttcggttcgggaacatgttattgagatcgattttggaaaagaagagagtatttccggatttaagattacacaggctaatattgctactgcaattcaatgtccggaacaggttaaagtcgaaatgcaaatttcttctggccaatggattgctgttgctttccaagaaaatacgatgctcggaacaggtaaaggcgaaacgaccgttgtctatctggataagaataaaacatccaaaaggtgttcaaagattcgattgagagtatcggatctctttttcgagaaaggatatgattcgtcttggaattatattgatttttataatatagcattgggttcatttatggttatcaaaggggaataacaaatgaagagatgtatgttattaaatgtcttgctttgggttttaggtgtaagtgcctttgcccaaacgcaaggcattgcgtttgaaacctccagatcgtggaagaaggttgtggaaaaggctcgggaggaggggaaattgatctttgtggattgttatgccgattggtgcggtccgtgtaagcaactggcttcgcaggtgttcacgcaaaaaggcgtgggtgagttttttaaccgccattttgttaatgtgcagtttaatgtagagaaagatgccgatggtaaggcgaatgtcgcaaaatggggtgtagcttccttgccgacattggtgtttattgatccgaagacggaacaggttattggaaagcttgtcggggcgggcgatgctgcttggcttgtggagggagcaaaagccctattggatcctgctaaacgattagatgctttggtagcccggtataatgcgggggagcgggagccggcatttcttttggagtttattaaggctctggggggtgcggggatgaatgccgaggtgcagcaagtggtgaaagagtggcttgacgggttatcactcgatcaattggcgacaccgcagatgtggccgatcatcatgcaatttgaaaatgatccgttgtcgaaaacattactgatggtacgggatcatcttgatcgtttttacgctattcctttggagaaccagcaggcgatggtagatgccacgttgatggggcgatggtgcaaacggcaatggagttttccacaaatcctaatcttggcatttatgaacaggagcggtttaatgcttttgtcgattatctggatcaggcaaaagaggggccaggaaaaacgatggctgccgtatggctgaacacgtcacaacttgcccgacaaggggattggaaacggatgttagaggcgatgcgggaggtggagagagaaaatattttcccacctcagttgtatgggccgtatttctcgtttttcatgcaggctctgacgcagatgaaagaacaaaaggcggctgttgaggccggtttgaagtggttggacgagttgattatgaaagctgcaggagaggatattgtttcctaccagacacgtgccatgatgaatgcgggaaaggctgccctgtggcaggctttggggaaatctgccgaaatgaagaaggcgcagaaggagatggagaagtatgtcaatttgttgaaagagggtactgcagcgaatgtgccgaacccgacggtgcagagtcaggtgcagacccctgcttcgttgggtaaagaggtcgtgttaagctacgagtttcgccaaggggcgcccgtggtgaaggtagtgattaacgggcatacttattatttcttgtttgatacttgtgcgggaattacttgcgtgtcagataagctggtaaatacggagaaattggtctaccggcaaaccggacaatccatgcagggtatggatggacaggtagtcatggcggagattcccgagttgtcgctgggggaacttatggtgaaggataagcaagcggcagtgatgagtgagcataacccgatttttgtgcatcttggagtggacggaacgatcggggcgaatatcatcaatgactatgtggtgacgatcgactcgagaaacaagacaatcacgttcgcaggacgggcggatgcttctatcacacgatggaataaactggaactttggaatcatgtcccgttgctttccatcaaggtgcaaggaaaaggcgaaattcacgatgtaccggcattgtttgacacgggtaacggaacgggagccatcggattgccctcggtggagggattcgagcaatggacgcaagcggggattatcggtgacgtggaggaaggagttggttttatcggtacaatggtgggcggcatggtgaaaacggataaactttaccggggacgaatgaccggacttcatctgggtgatgctgttttcgaaaaaatgccgatcattaccggaggtgtcggatatctgttgctttgtttcagaacaacggatttaggggtatttaccttggattatcctaacggacgatatcactttgaaccttacgcggatgcaagcgtgtgggaaggcgacagccgccccgtgatgacgggagcagaaaatggggtattgaaaatcgctgccgtgtggggaaaagaggcacgtaagaaactggctccgcaatggacggtgatcgccttggacggtaagccgttggaaaacgtgacattggaaactcccaatatcgatgaactgatccgccagcatggggctaaaatcgtgacggtgcgggatacggaggggaaggaacatgtattacctgtaaggatattcttgtcatgacagataatgtgctatattgaaatatgttgataagcatctggaatatagttgtttggttatgtggctatctgacgataatcgttaattaaccatattcagtatctactacat

SEQ ID NO: 206 - DNA, 7404 bp, Butyricimonas faecihominis
cattttaatcaaacaattactatcaaccttttaaaaattctccaatagcctctacatgcctcatcccgtgcacatcccccgcataataatcgatcatccccgcatcatgtaacctttccgcaccccgttgtgcctccttcccgtaataccctgcgaacgacagaatattcacctgtaaccgacaattcttgttcttcaactcctccccgtgtcgaacgatatcatccgcccagaaaacgtaccgctctggatgagccaacaccacttcataccccctggtctgtaattcgaacactacctgatcaaaaaaaggtgagggagataaaaagttatgttccaccagtacccgtttctcgtccccggacaggatctctccccgttcgatcaaactcaacatgtactccccgacacgatactcggctcccaaatccaattctatctctattccctccttttgcaaaccagctcgaagatcttccaacaagggataaagattttcccgtccattcatcaaggcaggaaaataaacgtgggaggtgcatgtcactcgtttcacgcccaaactagataagcctttcaacactatgattgactccccataagtcctaaccccgtcatctactccgggtagaacatgcgaatgaatatcatgggtataatcaaaatgtaccttctcccgttttcgaaaccaccacatgactataacttaccctcttatctattttgcttgttgtaataattaccgtaaccgtacttgtaatagtgtattctcctagacacaccgttaaccagcaccccgcaattcgtcacgtgatgctcgctttccagtactcgcaaggaagataacacccctcgcggcaacacgttcaagcgaacgacacacaaacaagcgtccgcttgcttgaccatcgtcaaggcatccgctagaattcccaccgggggagtatctaggataacgcaatcatattcccccttcatctcctccaacaatgtcttgaacctatcacttgaaagcaaagctaccgggttcggcgggacatctcccccaaacaacacgcttaaattttctcctagcgaatgtaccagccgtctccattccggttccattcctgccagataagccgacaagccacgggagtaatccttatgaagatacgagtgtaactgcggatttcgcagatcacaaccgaccaataacgtctttttacccgccctcgcataagccttcgccaagtgagcagccaccagtgtcttcccctccccgggtaccccggaagtcaccaacaatacgggacaggctttctcacccagcatatagttcaatttctcccggatcacttgcatcgattccgacacggaaaaattttcccgtaacagggtaacctcttcttgaggtagctcaggtatatctcccagcacagggaacggtagtgcccgtttcacctcgtcgatagaacgaactttatcgttcagcatatccagcaagaggataatcccgaccgggatgcccacgcccagaaacaaccccacgagcatgatcaacgcctttttaggctctacaggagcactacccgcagacggatcctctataattttagccgtcgccacgtagatcaatttagcgatctccgcctcctcccgtttttgcatcaagaagaggaaaaggttctccttcaattcctgttgccgggcgatatctcgatactgtttctcctgcgtgggaacggaagttaacatctcgttcaccgacgcattctctttctccacgctcttcaacttgatcaacagaccactctccacgttggtaattgtctcttgtatgttcttttttaatccttgcaactgggagtttagcccgatcacgatcggattgctctcgctagcactctgcagcaacttgccccgacgcaacaccatctcgttataacgagtgatccccgcattcaaaccctcgtccgagagacccaagttttccggcaacagcgagaactcttccgcccgtttctgcgtgatcgccgcccggatgcttcgcaacacgtccagctccgtttgcaatttcatcaactccgcctccgactgtttcttgcgttccatcacgaaagcggcatccgaggtgatatccgttaatttattcgtcttcttgaagtcttccgcccgtcgttcgatcgttcccaactcttggttgatcacgtccagccgctcgttgatgaactccaccgtcgcctctgacacgatcctcttgttatcgataccgttctggttataccgcttgacaagagcattaatcaccgcaattcctctcgccggtacggcgtctttcaaggagaccaatacggagttcgtgttctttaccaagatttgcacgttcaagttttttgaaaaaacatctgtcgtttttcgaaaactagacaggtccacccggattttttccttggaagtaactttcctattaggctcgatcgagaggttatagtctcccataggaacactctccgagtagtgaccgctccacattttctccccgtcaaggttcatcaatatcacgaggttcgccgtgtccaacaacacgtgaaaagacgtgtcccggatctccccgggattatccacaagaactttcaccggcgaatcgttataaagttctcggtcacgcaagaaaccttcacggacgtaacggacgttcaagtccagttcctccacgacctcccgcatcaggttcttcgactgtagctccacgatctcgttctccacaaacatatccgccgccgccaagcccagctctttcatcatcacgttcgttcccagttccccctttttcgagtcgctgatcatcaccttacccgtcacgttgtaaataggcactcggctctggcatatcaacaaagcgatgaccaaacacaaaggcaccgacaccgcaaaccaacgccaacgggtgataaacttttcaactaatacttttatatctatactttcggactcacgttccctgttcaagttattctcttccatgtaattccggttctaggttaacgaattgcgatggcaaggattgccaccaacgtggaaatactcgataaaacgtaaggcagaaatgccccggcatttcctcccacaatccgagccttattgggttcgacatagaccacgtcattctgttgcaagtagaaaaaaggcgaatgaatgatattttccgatgtcaaatccagttgggcgaaaactttctcgtccccgtcttctcgcatcaccagcacgttcttacgctttgcattaatttgtaaatctccagccattcccaaagcatcaaaaatggagacccgttcactattcaccttgtaactcccgggagctttcacttctcccaacacggttaccttgaaattcaagtactggatagtcacgatcgggttcttcaggtagttactcaactccttcttcaatttagctgccagttccgtccgggataaaccttccactttaatctttcccaacaccgggaaatcgatcgtcccgtccgtgtccaccagatacccgtaaagttgatcgttacctgttctcgtgttgttctgtcccaacccgatcatcggcgtgttaaaaggcagggccgtctcaatatcatcacaggaaaccacgattgataatagatcatccacatggatcaccgtacgatactgcaaagctgctttcactctagaatttatcttcacatcttgcaggtacaccacgtccttcggggaagcgcaagcccccaacaagcaaaccagcataccgataaaaaacaatcttccagttcccgtcatcacttgtaagtctttattttagttaattatttattttatccagtatttcgaaccgggagttcttcgatttaaactccggcaccacctgtttcatcaaccgcacggtatcctcaatccgtaccgccaatgctaattccgcaagttgatcataagctctcaacacctcgtcccgcttgtacttccggactcttgctacccgaattttagcattccccgtcgggatcgtgttctcttcgttacttaaaacctcctcgtacaatttctctcccggccgcaagccgataaacttgatcttgatatcctcgttcgggacgtaccccgccaaacgaatcatccgttccgccagatcgacgatcttcacgggttctcccatgtcaaaaacgtagatttgattgcccgtactcatcgtggccgcctccatcaccaaccggcaagcctccgggatagtcatgaaaaagcgggtgattcccgggtcagtaaccgtcaccggaccaccccgctcgatctgtttccggaaatagggaatcacgctgccgttacttcccagtacatttccgaaacgagtcgtgacaaaacgagttttacctttcacttccccacgctctattgctaatcctaaactttgcacgtatatctccgccagtcgtttggaagcccccatcacattggtcggattcacggccttgtccgtggaaatcatcaccatcatgtccacattatactccacgcaaaaatccgccaccagccttgaaccgaccacattcacccgaaccgcctcgcaagggttctcttccatcaagggaacatgcttataggcagccgcatggaacactacacggggacgatatttttcaaaaaccatccgtaaccgttctttctgacgaacatcaccgacaaaaggggtgaacttcaagttcgggaaattccgttccaattccaagcgcaactcgtgcatcggggtttccgcattatcaaataacaccagataccccacgccaaaggcagctaactggcggcatagctcgctaccgatactacctgccgcaccagtcaccatcaccaccttacccgcaaaatacgcctcaatctccctcgtgttcaccttgatctcctcccgtcccaacaagtcctctatacggatctcccggataatcgtctttttcaaaccatctcccagcacgtctattggcggggaaaacaagttctttactccaatcccctgacaaaaacgaaccaaccgatccgcctcccgacgagcctcctcacgtgagggatataacacaccgtttatattatattttttcacaaaacgggagaaatgctgttcatcctcaaaatagtaaaccggcaattccgaaagcacgcaagatttcaggtacctatccggattcacgaatcccaccacgtgatagtgcttactagtgtgcattctcgtcttcagagccacgcttttatcaccggttccgtagaccagtaccctcgtcttccctgaaccatacagagagatcgtaaaatcataaaccagcacgagcgttacccgaaaacccaccagaatcaccgatgtcacgagaaaatcaatcacggcacaggcaaaaaggtgttgcccgaacagtcgagaaccggacacgaggatcattcctgccaacaggagttcttttaggaaaattgcaaatcccattttcccaatgctctttatcgtggcgtgccggatgatattccggttcaccctcagtccccagaaaaccaacaaactaaccacgcaagaaccgccaataatcacgccataggttaatcgggagagatcgatgataaaactatcggcaaaaagaagcgtgataaacgaactcatgacggacaaaaaaatatccaccaagagaatcgtgtaagcattcacatacttcttattctcgtgcaaacgattacataccgagtgaaacgagtatttcatttattattggtattttgtaaaagaagcgcctcctccagtatttaatagcttgatccggcgtatgaagtaccgtttaaaggagacgctgttaccgagagttgcatgtcccggtatcgcatttttagtgtgaattggtatatttattctttcttttcatacttcgtgttgcaagctacaaactcccgtttcgccaaaatataaaacaccagccccacatcaacagaggagacctctcccatccgcacaaattgttcaatcatatcatcctccacttgtcgtacccgtacggccaaccggacccgctcttctttcaatcgctcctgttcttcaacgggtaattccatcaagcctaccacgttatcatacaaacaaatcgcatcccaccatcccaacaaatcgtcccggtggtttccccgcatatatcccaaagcttctgtcaccaatttacctgccaattcgccacattccgcatctcccgtaaaataataacaattacacaataaccggcaaatattagaagtacggcacggtaacaccagtttttgacttccccaaggtgtcagtatatcgtaggcagcatccactcctttttccaaaaaatccaaatccgagtacaactggtaaacgtccatcaagtccgcagcgtaaccggcacgaaaatttgccggaagttctttcttctgcaccaatacctcataccaacgggcaatttcttttgccctttcgtgaatatcgtaaagaactccaaactcggcctctaaccacggatatatccgcaccatcgtgtaaaccgtaagataaccgtgaagataagcggacaacttgtcgggagagtacgaacggaaattaacttcacgtaaccgatcgtacaaatcataaaataaacctttctccatcatctttttctactctattcgttccaaaaaggaacccggaatataggaagttgcaattgacacaactccttccaaacggatgactacacgtttgtgtcccatcaaacgaaccaactctccttccaatccttgcaaggggcctttaatcactcgtacccggtctccccgtttcagatttttgtttaacacctctaccccgctcggggaaaaatccaacaaaaacatgaaatcatgcatttgtttatcgggaacaatcaacgagtgacgtccctcaatatctttcaaataaacaatattaagcccatggtcatttattaatgaaaaacttgttgctttatccgtgtgaataaaaatcatcccgtgaatcaagagcacccggatcgtcttacgacccaaaggtgtttcccgcacttgttcttcctgaggtagaaaattctcgatacccaactcatcaagcttcttctttatccacaactcctgattcactcgagtgtgagccacgtaccaatttatattcttattatcaaccatgtacccttttgatttcccctgtcaaggtattaaatcgaattttgaacagctttctccgcttttcctgaccggacgcgcttcgcgcattaaccctcgtaccggccctgatttatttccacgtgtctctatcgtctcactataatacagcgattcaacgaaagaaagctgtccgcattaaaagtttcaaaaaacgatcgattaatgatatgatacttaataataaattgtctaatct

SEQ ID NO: 207 - DNA, 7387 bp, Butyricimonas faecihominis
atataagttatgggaaataaaattaatgatcctattgtccggttgatgggacttaggtacaagtcacatccgtggcatggtttggatattggggaggatgcgccgaacgtggttaccgcgtttatagagatggtaccgacggacacggtgaagtacgagttggataaagtgagtgggtatataaaaatagatcgtccgcagaagtattcgaacgtggttcccgctttatatggttttttgccgcagacctattgcggagatttggtcgccgagtattgtatgtcgcagactgagagaacggatattcacggggatggagacccgcttgatatttgtgtcctgaccgagaaaacgatctctcacggggatattattgcggaagttcgtcctatcgggggattccggatgttggataagaacgaggcggacgataagattattgccgtgttgaaacatgatgccacgtataatatttacaatgatatttctgaattaccgcacgtgatcatcgatcggttgcgacattattttttaacctacaaggatcttcccggtgaagaacgacgcacggaaatcactcatgtctataataaagaagaggctttcgaggtgattcgtagaagtgccgaagattataaaaatcacttccaaggacttgaagatatactaagtcgggtataacggtaaggtaaaagataaaaactaaaagataaaagttgaattctcacttaacttttatcttttagtttttatcttttagttctctcatccaccccatccgtccttgtcgagacttcggtattgtatggcctcggcgatatattgcggggttattttctcgttatggtctagatcggcaatcgttcgtgacaatttgatgatccggtcgtaagcccgggcggaaagtccgaaacgttgcatggcaatctttagtagtgcaacacatttatcgtctagggggcaatacttttttagtagcggcgaggtcatctgggcattacaataaatcccggggtaagattgaaatcgctgggtctggatggcccgggctgcgatcaccctagcccgaacaacagaacttggttcactgtccgaggaatttgtgatcttgtcaagctctacgggaatcacttcaatatgtatgtcaatccggtcgagtaaaggaccggatattttcgataagtatttttgaacggctccgggcggacaattacattccttcgtgggatgattatagtacccacatgggcaaggattcatggatgcgattagcatgatgttagccggatattccacgctgaacttggaacgactgatggtaatcttccgatcttcaagcggttgtctcaatacttccagtactgcccggcgaaattctgggagttcatctaaaaataagatgccatggtgagcaagtgatatttcccccggttgaggccaagatcccccgccaacaagtgcgacatcagatatggtatgatgcggcgaacgaaagggacgtgaagtaattaaggaatgattattttgaatctttcccgcgacggagtggattttcgttgtttccagtgcctcttcgatggtcatgggagggagaatggtcggtaatcttcgggccagcatggtttttccagaaccgggagagccgatcataatcatgttatgtccgcctgcggcggcaacttccattgcgcgtttcacgttttcttgtcccttcacgtctttgaaatcaagcaagtcatcatcgggaaatgctgtcatgacttgctgatcgaaagaaatgggagagaagtctttttcctgtttcagaaaagcgatcacttcactcagatggtggaaaccgtaaacttcaaaatcttgaaccacggcagcctcgttagcattctggtggggcagaagaatacctttaaaaccttcttttttggcgtgtatggcgatgggaagtacccctttgaccgcttgtaggctaccatccaatgacagctcacccatgatcaagtatttatccagttgtgcgttaggtaactggtcattagccgcaaggattccaatggctagcggtaggtcgaaagacgatccttctttcttcacgtcggcaggagccatgttgatgatgactcgtttacccggaatctttagtccgatttcccggagggcggaatcaatccgttgctggctttcttttaccgcgttatcgggtaaaccgacaataataaatttcgctccccaaagaatattaacctcgattgtgatggtcaaagcgttgattccgtacactgcacccccgaaaattttaactaacataccgtctgatcttatgtttcacatacaggcatgtaagttaagattatttcacatgaaaacaatgcaaaataggttatttattgcgatcaagtttttcaagagaaaccttctctccgtcgaatacggcataactgaaatgcgtgatccagtctcccgtgttgatatagtggctgttgggttcgagttcaagattgagaggcaaatggcgatggccaaaaatgaaataatccacgtggtgttctttcaagatattccggcaataaataacgatttcttctttgtcatctcccagatagcccctcgcctcgatttgtccgtttcctttcagtcgggaatgggatgaccatttattggctaaagcgatcccccagtcgggatggataaaccggaaacatctttgtaggaaacgattatggaaagcgttacgcaggaaaagataccctttgtcgttcgggttcaggccgtcaccatgtccgataaggaaagactttccgtttagcgtggtttcaagcatggaagtgtgcaggataacaccacattcttttgccaagtagtcgaaagcccagatgtcgtggttacccgtgaagaaatgtaccttaattccctgatccgtgaaattggccagttcggcaagaaagcgtacgtggcctttgggtacaacgtgtttgtattcgaaccaaaaatcaaacatatcaccaagcaggtaaagttccaagcaatcaggtttgatgctttgcaaaaactccacgagcataatttctctctcccgattatctttcaatagtttggcacccaagtgtgcgtctgaaagaaaataaaccttcttaccctgcatgatgatatgttcgtccaatataattattttttcaacaagtcgttcaaacggtcttccaaacggctgccgtacaaatttttaccgacaatttctttcttttggttaatgatgtagtttgccggaacactcttcacgttccaagtcgaggctgcccgactttgtaatgctccttgatcccatacgcaaatccagttgatcttgttcgtttttatcacgtcttcccaaagaaatttgtttttatccagacaaaccatgtatatttccactccccggtttttgaacttgttgtacacgcttttcatctggtcaatgtactcttggctctctttggccgtgatcagtccgaagtcaagcacgatgagtttcgatttgagggagttcagtgaaacatccttgccattcacatccggcaggttaatatccggcagagatccttccgtgttgttaattacggcagccaattgttgattgcggatagcttgggatatttgtttcaagtgattcatgattgccttcgtgtactgggattcgggataaagggcggtcaaggatgatgccaccactttaaaatagtgaaggtcttcgaactcgtccatcactccgatattatcatcaattttttgataaagggcatagtaagatgccggagaggtggcgtgtttgataatgaagtcacgggtgaaactgatctgtttgttgatggcctcttcccatgccttggcgtattcctgacgttgagcgtcatactcggttccttgtgggagagcttggtaggatctcttcaaagaatctgttgtcgtgatggtacgggtgatttggaaattcaagagtttaatccataacgagttttcagaaccgtccacccaatagttatttttaatgtccttcagcgtaccactgacttcaagtacctcgtccgggctggcgatcaaggtcacttgctcgttgttagaaaatcttaaagaatagaatgtcgggagttcgatgttgagtttaaatttaaactccccgttcttgttaatttttgttgagtcgattgtttttcttgaacttacatctatttgttccagatatactttcgtgttggctgcatctttgatggctcctgtaatttcgacattcgtcttttcactacaggatgcgataagaactacaagtagtccaagtaatagtatttttctcataatttgttggaatgatataaataatctacatcttgatttatgaagttcgaaagtaatactttttttctatttttcacatcatcggatcagattttcggggaaaaaaccgttaattaattgttaatggtgtatttcggggaatcgaaatttgaaaattgttttatttttgcaaacgatgaaacagaaaaaattgaatataccagcactcttgctattgtttacctttttgttaggtacgataggtatgaatgtaagtaaagtgtactgtcagcgttgccaggaaacttacttgcacgtgatggttattcctcaggacatcccgtgtccgtgtacacatggttgttactgctgtcatcatatgtgccacaatgcgcacaaaaagaattgcgataatgcgaaacaagaacatacttattataaagtttccggtgattgggcaatgtcccatttcgaaatacagttctgcgatatggtgcgggagtgtaattttatgatgtctttaccggatgcggttatttctaatgtacaaccctttaattctcctgttgcatacatagacacgtctccgcctttggagttgctatgtattttccgttgttgattaaattttgatccgtgacgaagatgctttaaaagtatctttcgacgagtcgtgtgtatgcgtctgacttgactgaaacgttatttaaaatttaatcaagagagaacgtgtttcgtggcattgggtaaaagaaatatccccggcacgttcctgaaaatcgtggaatctatatgagaaatttgtttattgtaatgtgtttacttgcctctgttggcttacaggcacagaccataaaagggcgtgttatggaagaaacggaaaacggagaggtggcgttacccggggcgaatgtctattgggtagggacctcgaaaggatctgtttcggatgcgaacggggaatttaagatcaagtgggaaaaggttgggaagttggtcgttagttttatcgggtaccgctcggatacgatagaggtaaaatccacggataaattcgtgacctgcacgttgaaatccggggagcaattggatgaggtgagcgtggctgcccgtaaacagagtaccgtgatgtcgactcagggacctttgatcgagcaattgatcacgggcgaagagttgtgtaaggcggcttgctgtaacttgggtgagagtttcgagacgaatgcctcggttgacgtgtcgtatgccgatgccgtgacgggtgcaaagcaaatccagctattgggattaaccggaaagtacgtgcagatgatgacagagaatatgcctaatttccggggattggcctctttgtacggattgacttatattcccggtccttggatgtccgcgatttccgtttcaaaaggaacgggatcggtgattaatggttacgaatcgatggccgggcagatcagcgtggactacaagaaaccccgtgatccggagttactctcggctaatgtcttcacgagtagcgagggaatgtacgaatttaactctaatttcagtatcaagttcaatgacaagtggagtacgatgtttcttttgcatggggactggatggaagagcctcatgacgggaacaaggatggattcttggatatgccggagaaaacgcaatacaacgtgatgaatcgttgggcttataaagatgatacttggtatttgcaattcgggggtaaatttatcgacgaggaacgtatcggtggacaaaccactcatggtggacatgctcatgcagatgagaaatacgggttgtataaaattggaatcgacactcgtcgttacgaggctttcttgaagttaggttacttgatgccccagtatgagaacacgagtatggcgattttggtgaactattccgatcacacgcaggattcttattatgggccgaaaatgtataacgccgggcagaagagtttgttcgtgaactacatctaccagtctatcttcgggacgaatcccagccagatgtactctgccgggttgagtttcaattacgacaaatatgacgaagatttccgtgatccggttttcaattatggagaggatatttctaccgatttcataaatatgaaacgagaagaacgggtgccgggagctttcttccagtacacgggagagttcttggatcagcgttttatcgtgatggcaggtttgcgctacgattatcacaatattttcgggagtatttggactccgcgggctcacatcatgtataaaccggatgaattcaccagcattaaggccacttttggtcgcggtctgcgtactccgaatatcttggccgagaacagttacttgctggcctctgccgcgaacttctacgtgaatggcgagttgttgggtaaaaatccggctttactagatgatctaaaaatggaggattcttggaatttcggggctaacgtgaaccggaagttcgaagtattcgggcgtaccttgaatatcaatttggattattatcatacgaaattcaacgaccaagtggtggtggataacgagacggcatacaacaaggtgaacttttataacttagacggggattcctattcgaattgttaccagatagaggtgaaatacgagttgatccctcgtttggaggccacgttagcttatcgttacaatgatgtgaagacaacgataaacggtgatttgagacgtactcctttaacgagccgttataagggattggtgaatttgtcatatttcacgaatttgaagaaatggcagttcgatttcacaacccagttcaacggttccggacgtttgccggagcagggtgggattgccgatgaatatcgggtcgcctcccgttttgatgatttccagatcatgaatgcgcaggttacgaaatatttccgtttgtggagtatttacgctggatgtgagaatatcggggatttcactcaaaagaacccgatcgtaaattcccataatccttggagcgatacctttgactcgtcgaaagtgtggggacctcttcacggacgtaaattttatatcggtttgagatttgccttagatcgaaaagaataatcaataa

SEQ ID NO: 208 - DNA, 7346 bp, Butyricimonas faecihominis
aatttaatctacctttgtaaagtaccaataagaaggaatatgtgtatcaaaaagctaattggagaaacctctgaatatgagaaaaaagaaatgcttgaaatcaaaaagcccaaaagttggctaaaaagtgtttcagcctttgctaacggtatcggtggaacactcatatttggtatctctgatagcgatacgattataggactttctgatgcaaagagggatgctgaaataattagtgaacaaataaaaacaaagttagacccgatccccgaagtaaatctacgtttccatgcaactgaagatggaaaagaactgataatccttcaagttgcacaaggcaaagaaacgccttactactacataggtgatggtaatagacaaacatttatcagaattggtaatgaaagtgttccggcagatcgttcctctatgaaacgattggtattgaaaggatgcggaagttctttcgatagcatgttatcacaatataaatttcaaaacatgtctttctcaaaagtacgttcggtatataaacaacgaacaggtattgattttgaagattccgactatgcctcttggggtatcatcgatgaacatggtgaactcacgaatgcaggagccttacttgccgatgaaagtccgattaaacattctcgaatattttgtacccgctggaacggattagataaagcccctggtctcatggaggctatagatgataacgaacttaccggaggattagtcaacctattgcaacaagcaactgactttgtcaataaaaactcccggaaagcatggatgaaaacgagtgatggaagaatagaaatgccagattatcctgaacgcgcaacccttgaaacgatcgtaaatgccctaattcatcgagattatttagaatatggtagtgaagtacacatagatatgtttgacgacaggatggaagtctattctccgggaggtatgcctgacgggacaaaagttcaagaaattgatttactaacgattccatccaaacgccgtaatccgatcattgcagacatcttcaatcgcttaaaatacatggatagacgagggagtggattcaaaaaaataattgaagattacaaaacatacgaaagttttagcaatggactcgttccacaatttaaatctgaaacaaattctttctttatcacgctttggaatttaaattatccagcaacaaaagatgtcacaaaagatgtcacaaaagatgtcacaaaagatgtcacaaaagatgtcacaaaagatgtcacaaaagaacagaaacaagttattttgctaataaaagagaacccgataataaccacaagccaaatagccaatcaacttaacctatcacaacgtcaaatattaagacacatcaaagaattgacaactcttggtatcatcaaacgtgaaggaggtcgtaaaaccgggttctgggttatcaaataaatatcaaaatgccctatttataccataacttaaaccgaaccagaacagtcccctgtaacttgatcttctcaaaatccactccggcatcggcacttccccgaccggcatcaagagccacgttcgacatatattgggcagccatccctccccaatgctcttccctgatataaatagcctcttttatactctgaccgatcgccgcggctaagcccgtcgctttttcctttgccacctttatcgcatcctccttaacctcccgacgcaatttctcaatctgtgaatgatccacccgttccacttcggcctccacgccacccatctgttccaatcccgcaaaaacacgatccagcgcattaacatcatgcaacaacaaaacgtactcttttctcaacttcatagccccgcttttcaatttatagcgattcccagccatattcctcacggctaaatccttcttcacatcaatccctactttttgcaacgtttggaacaactttttctcctgttgctccaactccgtcttccccctttgatccttttccctcaatatgattttcacgtaaatttcatccgggaccacttccatcatggccgtccctgttacctcgatataaggctgctccaaaaaatcgttttctttactttgagccatccccaaagccagtgttcctaaaaataacacgagcaacaaaactgtctttttcatcatgcggtaattttaaatgattacttctttttccttttcttctccacagaccacccgaatttaccaattttttctcccaattcaaaatatccaccatgcagatataccaaaggatcagcattcgccaactcaaacttcccgctatccttatccagataacgatcgtccgcctgcacgttcaccacgtcggcaatgaacacgtgatgtgaccccaaaggaatgatctccttcacccggcactcgatcgacaccggcgactcctcaataatcggggccttcaccacctctgcctttcccggcgtcaacttcatctcttcaaatttattataatccttcccggaacgtaccccacaccaatccgtggcatacgccatatccttcgtggtcaagttaatcacgaactccccgttcttctgaagaatcgggtacgaatatcgttccggccgcaccgaaatataacacatcggtggattcgtacacaacgttcccacccatgctaccgtcaacacgttatattcactcggttcactcccgcaactcaccaacacggcgggtaaaggataaatcatatttcccggtttccagttatgtttcatgtcaatcaactttatctggcaaagataaagcaaaacacctttcaaaaaaacttatttcaaacactccgtgatcttttgttttaatctttccatcctccagtttcttgcgatgatccgattattctcatccactaaaatcgtacaaggaattgaagaaacaccatacatcttagcgaccgactcttcaccggaagaaatcattccatgatatttccaaaccaactgatcctctgcaatggccctcatccaatcctttaccctcgtatccgatgaaatactaatcacctcaaaaccttttgaatgaaattcatgataaagagccatcacgtgagcattttcaacccgacatggtccacaataagaggcccaaaaatctattaacttcaatttactcttcactccataaagagaaaaagaatccccttccggagtattcaacatgaaatcaggagcaatctgcccttccgaagtcgcaacagcctgacggatcatccacatctcaccttccaccttagccaatcgctcctcaaagcctctttcttggaaccataccttagcctgacctccaagtaaaccatacctttcttttatcatctcccatccccttatctccaattccaacgaagggatctcagaacccaaagcatagtcaaattggcgtgtacgtagctcataattcacaatacccctgactatagctccggcagaagcattcaaattaggatttgctcctactaattccgtttccttcgcctcgtactcatctataagtttcagaaattgtattcctacagaatcccgttcaacctctgtagcctccaaatacaccttaaacaaaaactctttcccatccaccaactgtttttcattccgataaaattcactcgctaaaatccgagcatccgtattctcaacaatatcacaatggtccttttgaaaactcaaatacgccatgtaatctttattctccaaaataaaatctttacttgttttcacctcatcactccacgctttcaccacctccaaacaaacaacttttgcaccatccactcttcccctcaactcgaaacgtccatttatcacatccgcaaaagctaaagtatccacgctcccgttagttctcgtaaacaacacaatcttacactcttgcgaaccctcataaaagccagcaatacgaaaatctcgtgtacgacaagctatcatactacaaatcaatacaataaacaaagcaacctttttcatctataaatcatttaaaagacacaaaataggagttgaaatcacaattttaaatattgtgtcccaactccatccatcagtcaaaagcacgcattttatttcccttttctacgaatcaatacaacaactccaaacgccaaaatcaatgcaggaagaatccacttcaaagcgattgtcatagctgaagccgcctcataactaagagtgaaattattatctattttccccgggcgcaccgtattcacgggtaactcctcgtacgatagccagtcaaacatggcatcaatcaacactctatttgacgaaggcaaatttcgtcttaaagcggacaactcacccatactgaaacaatcggcatcaccaaccacgataattcgttgatcccgaccatgacattcccggtttaaggccagcatgattgtttttacccctacctgctctcccatacatggatccaaacaaggaacttcattcacgaaatcaatcgtctgtctctcgttccaacaagcggaatcccgacttattaacactggtatcgttttaaaccctttattttcaacaaccttcaatgcggcagctccgggcatcgtaaaattatcatctatctcacacgaccgcttaaagaaacgagatatttttccagcctccagtgtcgcacgacacgataataaattgacgggataatcatcttttggatgttgtaccaaaattccttcttcgaagtgtactcccaacatatccataaccggttgtaaatacatatccgttttcggttttccggcaacaatcaaatttcggccactctcgatatatcgtttcaatgcatctaactctacttcagaaaatggttctaaaggctctgcaacaaccaacacgtccagactatccaatccacgctcgttccttccaagataaaccttctctatatcaaacccttgattaatcaatgcctgtcgattcgttttctctgccatcatataagagtaatcccgattacgatctccggaaacagaacgggctccatgatcagaaacaaacccgacccggggtaatttcatggcaacacgtttcaaggctgccgaaatctcaatttcagacgggagtttccgggagtcataaaatgtccgtaaaaaagtcttttccccattctcccgctcaatcaaactgacaaaacgatacccctcgtccgaaagatcaatctccttttgaacttcatcgattgtcaaaaaacgtcctaatctcgcatttcgaagttttgcttgatcttccaccgcatccttccacgttttaccacgaaaataataattaaatgcccgacttgtcgtgtccatgtaataataaaatacatatttcaacttcatttccggcttaaaacgaacaaatcgttcgtaacgggccatatccctcgtaatccgtttatgattgatactataattcatatccatcagattaacatacgtcgtgatggtcaacccgccatccaacttggaaacaatatcctgacttgcttgagtcagcgtgtttatcttgttaaacgtggaatcatgataaaactttaacaccgggcgagaagtgaaatagcccaacaacatagcaatcataaaaacacccaaataacgcactgtcttattgagaaatgaacaacgttccctcttcaactgcatcttcaaaatggcaaattcaaggaacatacaactcaatatgacaaaataaagtacatcctcgctaccaatcaaccccttgataaaattattcgtccggtttccaatggccaaccaataagtaacttcccgcacgaaagcatactcctgtcccacctcagatataactcccaaaaatgcaagcatcaccaacataccaagtgccgccacgatttgataagttgtcaaggtcgacataaaaagtccgagagccgcgtaaaatcccaacaacaaaaacaatcccagtaacccggtcaaaacagcctgccattcaaaagaatccaccaacccccacgcaatcaacacgtaaaacatcaaaacgcccattatagtcaagccgtaaagcatcattccgagatatttaccgagaatgatctgtcgactcgaaataggagaagaaaaaagtaacttgatagatcccctgttaaactcctgactaatcattcccatcgtcaacaaaggcatgataaaaaataacattaatttcaccgttttccaaataccttcatctccataaaagatctgttccgacatggcataaaacatggcatccccgtcaagttccttgtattgggcaaccccttcgaaaaacttcgtgaacatagaccccatcataaataccaaaataacaattaacaaccacgccacgggtgaataaaaaagattggacaactctaaccgggctattttatatattgctctcatgattattctgatttaattatttactcttacctgataacttggcgaaaacctcctccatggaactcttttctgaacgaatttccgttaattcccatccgtgtgccacgctctcccgaactaccgttttcacgacatcccgatcaccattataccacattcgtaacccgtgtgcccccacgacctccacgtttcgaattccctcaatcctcgtcacctcttccggtaatggcggaaaatcaaacgtggcaaataaagaggatggctcgatgcaactatcaaactcttccacgctcccggaaaaaacaatacgcccatgttcgatcataataattgaattacaggttgcctgtatctcggaaaggatatgagtagacaacatcacggtacgttcctccgcaataccgcgaatcaaatgacgcacctccaaaatctggttaggatccaatccattcgtcggttcatcaagaaccacgaacttcggatcatgaataattgcttgagcaatacttacccgttgttggtatcccccagacaaatttcgtaacaaacgccccttaaaatgcgaaataccacaacgttcctcggtttcctccactgcccgattaatttttttcggatccaccaaacgcatttccgcacaaaaacgcaaatactcatccaccgtcagatccggataaagaggaggtttctgtggtaaaaaaccgatattcttccgagctgcaatcggatcctttaacgaattgactccgtttatatacacttccccacttgtctgctttaacaccccgcaaataatattcatcgtggttgacttcccggccccgttcgatcccagcaacccgacaaccccgacgtgatcaatctcgaaactaatatcctcgattgcccattgtgtcgcataacgatggtacaaatgttctaccttaacaattggattttccatac

SEQ ID NO: 209 - DNA, 7319 bp, Butyricimonas faecihominis
cgtcaagacttagacgatctctttttgttagtaaaataatacattttttatatgtatttcatgtaactttaccttgtaagttcccgtaacaacactcgaaattgaatttaacacggagaattgtatgagaacttatagatgcgaagacgtcactttatcagatagaggaattgatagtaaaggctggttgtgtaatccgcaagaaaaaggtaaaaaaccggcaatacttgttttaggccccaaagatgcctcgaataacacggtattattacaatatgccacgcgattggcaaactatggttttgttgttttaggaatggaggaaactcagaatgtgaaagcagccattgattatttgagcttgaaagatgaagttgacccgaataaaatgtacgccatgggaatatgtaacggaacgaatgaagttctggccagtacagaagtggaaaaacgactgaaagcgatcgctttagtggcaggatgctacaaacgcaaagaggcatcccgggtaaaaatcccgacaatcgttattcacggaagagaaaacgaaaaggagtatcaatctgctcaacgcgtgtacgacacgatctgcgcggaggaaaaattagctatatgggaaggttccgttactcatgcacaatattttgaagatcctcttgttctggataaaacggtacggaatgtcttccgttggtttaaaacacattgacaatcacactatattaggaaaaaagccgtctctaactgatagaggcggctttattgttagatttacccttatctatgggttataacaaagttatactagggttttacctataaacgagcatacttgaacggctcaccaccacttgtaaaaatgatgaatggctccatgtccatgccctatttggtacccggctgccgtttcaatggccccatgcagataattcaaggctttttccacggcgatgttcaagggaaaatcatgggctaaataggaggccacggaggatgataaagagcatccggtaccgtgcgtgttcggggtgattattttcttcgctggataacgatattccaaatcattctcacaatcaattaaaacatctgttatctcttcacattccaagtgtccggcttttaataagacattgcgagcgccgatatttttcaatgcaggaatggaaagatataaatcttcctgagagcgtattttctttccggagagaatctctatctcgtaaagattgggagtgatcacggtagccaacgggaataattccttttgcatcacggcaatggcctcttgctgcacaagcagatcgccagaggttgccaccattaccgggtccacgacaatgtgcttgatcgggtaatcggctaatactctcgtgacggcttgaatcacttccacggaatgtaacataccaatttttaccgcatccacgccaatatcgtctaaacaagccctaatctgggcctctatgacattcacaggaagagattcaatggctcttacacctaatgtattttgagctgtcacggctgtaatggcagtcatggcgaaacacccgcaggcggagatcgcttttaagtctgcttgaactccggctccaccaccgctatcggaaccggctatagataatactctcttgtaggttttcatgacaaataaaaggtttagaatgatcgggcatataacacgaaaatcgtcggacgtttatttatatccggtttcacgtgtttccaatcctttattaacatggtttttatgtattcattttctgtcgtaatatcacaggctatcgtgaggcgtgtcgtgggggacaaggtggctatcatatcctcgaataattgcacgttccgatagggggtctctataaacaattgtgtccggttctctgcggcagattgtttctcgtaagctttcaatgttttaatgcgttccggcttagcaatgggtaaataaccattaaacgagaagttttgcccgttagccccggaggctattagagccaataaaatagaagaggggcccactaaaggaattacctgataatcgtgtttatgggctaatgccaccaattcagctcccggatctgcaataccggggcatccggcctcggagataatccccatatcttgattggccagataggggagataggtttcaatatcttttatatccgaatgttcattgaggtctaaaaaaacgagttcatcaatatttatcgctttatctattttctttaaataacgacgggtatttttcacgttttcagttgcaaaaactttgatattcttaatgatatgaattacatcatcaggaataacccgctctatcggtgtctccccaagtaaattggggatcaaatataattttcccataataaaatgtttggggcaaatatacaggattattccgaatcttattatttttgcatgacacaataaaacgttctgtatggaattttcgatgtcagaatataattatttttcagtcttcaacagatgagagtaacaattttaggaagtggaacttcacaaggggttcccgttattgcttgcgaatgtcctgtttgtcaatctacggatgagaatgacaagcgtttaaggagttctgccatgattgatattggggataaaaaactaattatagacgcgggacctgatttccggacacagatgctacgggcgggtgtaaaggacgtgaccgctttgctgctgacacatgaacacaaagaccatatcgggggactggacgatattcgggcttttaactgggtcaaaaatggcgaggtcgacatctactgtaaccagagaacgaaagacgttatcagtaaggattatgactacgctttcgcagcattccgttatcccggtgtacctgagatgaatattcacgtgatagatgaagaaccattctggattggggagattaaaatagaacctattacggtgatgcactacaagctccccgtgacggcatttcgtattgataacttcgcttatatcacagatgcgaatttcatatcggaggcaagtatgaaaaaactggaaggcgtcgaatatatggtgattaatgctttgcgtaaagaagttcacctttctcattttacactggatcaggctattgatgtggtgaaaaccttacacgtgaaacaggcctacatcacgcatatcggtcatcagatgggattgcacgaagaggtctcgcgggaattacctgaaaatatacaactggctcatgatatgttatcatttgagttctaaaatcttattgcccgctccgttttcctttttgttaaatgcttgctgaaaggcaagagtgaatgtgaataaaaaaggacttaaaatttccgttaatccactgtttttattacatttgtgggattttagtaatataggggtgaaatttagaataataccctataaaacaatgcgttaatagtgtaatttaatattataaatggaaaacgtcggagaaaaaattatcaagatcaacatcgaggaggagatgaaatcttcgtacattgactattcaatgtcggtgattgtgtcgcgtgcattacctgatgttagggacggtttgaaaccggtacagagaagggtattatatggaatgagcgaattgggtgttacgtctggtaaaccattcaaaaagtcagcgagaattgtcggagaggtactcggaaagtaccaccctcatggtgatagctcggtttacatggcgatggtacgtatggcccaaagttggtctttgcgttatccgttggttgacggacaaggaaacttcggttccgtggatggagatagccccgcagcaatgcgttatacagaggctcgtttgatgaaggtaaccgaggacacattggtggatttggataaggataccgtggacatgattccgaacttcgacgaatcattaaaagaacccagcgttctacccaccagaattcctttgttactcgtgaatggtgcgtctggtatcgcggttggtatggctactaatatgcctcctcacaatctgcgtgacacgatcgatgctatttgtgcttatattgatgaccgggatattgaaatagatgacttgatccggatcataaaagcaccggatttccccacgggaggaacaatttacgggtatgccggggtgaaagaggcatatcacacgggaagaggccgtgtggttgttcgttcgaaaacatccgtggagacaactcctcatggccgggaaaaactgatcgtccacgaaattccttatatggtcaacaaagcagaattgatttctcgcattgctgatctggtgaacgagaaaaaaatagatggaatctctaatattaatgacgagtccgaccgtagcggtatgcgtatcgttattgatttgaaaaaagatgccattgccaatgtcgttctgaatacattattaaaacatacggctcttcaaacttcttttggggtgaacaacatcgcgctcgtgggaggtagaccccgtttgttgaatttgaaggacttgatccggttattcgtggaacatcgtcatgatgtcattacacggcgtactcaatttgaattaaagcaagcggaagatcgggctcacattctggaaggtttgatcattgccagtgatcatattgacgaagtgatccggattatccgggcatctaaaactccggaggaagcaaagaataatttgattgaacgtttctccttgacggaggtacaagctcgtgctatcgttgaaatgagattgcgtcaactaacaggtctggagcaagataagctaagagccgagtatgacgacatcatgaaattgatcgagcatttgaaagaaattctagctagtttaaaattgagaatgcaaattattaaagatgaactgcttcaagtgaaagctcaatataacgatgagcgtaaaacagacatcgtttatgcctctgaagaattcaacccggaagatttttatgccgatgaagaaatggtaatcactatttctcacatgggatatatcaaacggactccgctatccgaatacaaggttcaaaatcgcgggggagtaggttcgaaaggatctgccacgagagatgaagattttcttgaacatatgattatggccacgatgcataacaccatgttgttcttcactgaaaaaggaaaatgtttctggctgaaagtatgggaaatcccggaaggaactaaacaatctaagggtagagctatccagaatttattgaatatcgagccggatgataaggtgaaggcttatatcaacatcctcaatttgaaagatgaagagtatatcaataataactatattgtattatgctcgaaacaaggtattgtgaaaaaaacaaccttggaggcctactctcgtccgagagcgaatggagtgaatgcaattacaattaaagacggggatcaattgctggatgcaaaaatgaccaatggtaaatgtgacatcatgatagcggtcaaatccggtaaagccatccgtttcccggaagaaaaagttcgtccgatgggtagaactgcatccggggtaaagggtatctcgctggataacgaaggagacgaggtaatcggtatgatttgcattgaatccggtaaatccgacgtgttggttgtgtctgaaaatggatatggaaaacgttccagtatcgaggattatcgtatcactaatagaggtggtaagggtgttaagaccatcaacatgacggaaaaaacaggtaacctgatcgccttgcttgacgttacggatgaagataacttgatgattattaacaagtcaggattgacgataagactggatgttagtaccttgagagttatgggacgtaacacacagggtgtgagattaattaatttgcgaaatgatgatgctattgcagcagtagcgaaagtatccgcttcgaaagaagagaatcttccggaagaagggcaggagggaacagaagtagcagagtcgaatgatgaagaataattatttacacatgatatctaattggaacacaaatttttaacgtatgaaaaaactatcttttatcattgcccttctgctttgcgtgaatatatctttcgcgcaaaaggggaaagtaacatcggctgttagctttttcacgcagggaaagctggataaagcgaaagaactgatagatgaagctattggccatgagaattgcgtgaactgggcgaaagcttatatggttagaggacaaatctatcaagccatcttcgaaactcaggatgagaattacaaaaaactctccaaagatccgttaagtgtagcttgggactcttatcaaaaagttatccaactggacgataagaataaatttgagaaagatttaaagacccagtatgctaatttggttatagactttactaaccaaggtgttgtttgttacaatcaaggaatgaaaacagatgataccaaagattttaaagatgctgtaaacaattttaaacgagtattggaaatcaacgaatccccgctaggaacacaaaaagtagacacgaccgttatctataacgccggagtagctgcacacaaagccggagatctggatgaagcaattaagttctacaaaaaatctttggaattgaattatgaagctggaaagatttacgcgatggtggcaaatatccttttaggacaaagccgtgccgctaatgaggccggagattctgttacaggaaaagcaaagcaggaagaagctgttaatttcttacatgaaggacacaaattgtatccggatgataactatatgctggttgagttgatcaactattacttgatgggtgatactccagctaaagctgaagaattcctggatgctgccattaaacaagagccgaataaagctgaatattacagagcgaaaggatctttatacgaaaaattaaatcaaccggaaaaggctgaggcaatgtatatcaagactttggaactgaatccgagtgatttcttcgcacaatataatttgggtaacattcatttgaaccgggttattgaagatcataaagttgtacaggatatcgttgatgcaaaggaatataacgctgccttggataaggttatggagaaatacgaagctgtaattccttatttcgaaaaagcattggaattaaatcctaatgacaagaatacgttgactacgttgaaagaattatatttccgcttgagaacaaaaaataaagtttatcaagagaagtatgacaagacaatggaggctttgaatagcttgtaaatatcacaagaagaaggagatatacatttttccttcttcttttttgtgcttatttattatcataatatcaactaagccacaacatatatg

SEQ ID NO: 210 - DNA, 7319 bp, Butyricimonas faecihominis
aaatagaggcgaatctcacgattcgcctctatttttattagtgtgcccattcggcaaagaagtcatttcccttgtcatccacgatgatgaatgcggggaagttttccacccgtattttacggatagcttccattcccaattcttcaaaggcaacgatttctactgatttaatactttctttggccaagatcgctgccggtccgccgatagatcccaagtagaatccaccgtgtttcttacaagcatctgtaacagtttgagagcggttacccttggcaaccatgatcatagaaccaccgtgatcttggaaaaggtcaacatagggatccatacgtcctgccgtggtaggtccgaagcttccggaggccattcctttcggggttttagccggtcctgcgtagtaaatcggatgattcttaaaatattccggcatgggcttgccttcatccagcatggctttgatgcgggcatgtgcgatatcgcgggcaacgataagtgttccggacaagttcagacgggttttaaccggatattttcttagttctttcaatacttcttccatcggttggtcgaggtcaatgtttacggcgggggctaatgccgggttctctgccggtaagaaacgagccgggttcttttccagttgttccagaaagataccgtcttccgtgattttagccttgatgttccggtcggcactacaacttacaccgatacccacggggcaggatgccgcgtgacgaggcatacggatgacccgcacgtcgtgtacccagtatttaccaccaaattgggccccgatgcccatgtcttggcagattttctgaattttggcttcccattccagatcacggaatgcctgaccgccatcatttccttcggtcggaagattgtcataataccccgcggaagctttcttcacggttgttaagcaagcttcggcagaggttccgccaatgactactgccagatggtagggtggacaggctgatgttcccaagtctttcactttgtccttgatgaacttggtcagtgcttcctcggtcaacaaggctttggtctgttggtacaggaacgtcttgtttgcagaaccaccgcctttggtgatgaacaggaactcgtatttatttccttgagtggcatacaggtcgatttgggccggtaggttcgtaccgctgtttttctcatcgaacatggtgtagggaactacttgagaataacgcaggttacgatcccgataggtttcgaatactcctttgctgatggcttccgcgtcattgccgtcagtccacacgttttcgcctttcttaccgatagcgatggctgtacccgtgtcctgacaggtgggaagttcgccttcagcggaaaccacttggttcatcaacatggtatgggccacgaatttatcattgtcgctggcttctggatctttcagtatattagctaatttctgcaagtgagaggcacgcaggtaaaaagaaacatctgcataggcttcacgggcgagtaattcaagcccttctttttggattttcaatattttacgtccttcaacttcaatcgttttcacgtagtcttttgtcagtaagcgatattccgtactatctttttgaatcggaaatggttcttgatacttgaattctgccataattctatcttgttttagtgttgtaaatatttttattcctataacggaaaaatttctttaatatgtcgcaacgaaattagaattaataaatgagaagtccaataaaaaagccggacaaatttggtccggcttttatagatattagactaatgattagtctttgaataacttgtcaatagtcatgatttggtaatcgtagaatgcgcgggtagcggcatttccggttccccgtttttctttgtaaagagcttgtactttcttcaacaatgataacatggcaggacgtcctactgatgctggaagtgtggcagctttcatggtcaaacggaagtagtcgtattctcccaagttgcattctgcatggctacacagcttatgctggctattcacgctgttttccaagctagctaaagcttgcgccggatcaatagaggcaaaacctctttttggagctgatgcggaggctgcagtttgaagaccgctcatttggctggcaatcgttaccaaggcggtttgtaggttcatttcctcgtgtgaaagtgaacgggacgcgatggtcggagccataagtaacttgtaagcgtcattcacgtatacatcaagcttgtaagcgtccttctgaccggaacgttctccttcatatacactaccaagagaacctgcgctgaagattttacctaccacggcgtattgcagttggtcgtacatgttcgggtctaattccaatttttctctcaggtctttcgtgatcaaccattttggacaagtggttacttcgtttactaaccatttgattgcttcttgctgtttggctttcgggatgtattttttagctacaccacctttgccgtcttgtaccaagtccgtgaattcaacaccaccggggtaagccaacacgtggctaagcattctttggtactggctcaagattccattgtagtacatttttatgtctttatacgaggctcccggtttgctgcaccattgttccaagttgttcatgatgatcttgaggttcttgatacaaagtgaattggctttcacgtgatcatctcctaaatcttctgtttggtctgtcgggtcgagagtttgcgggaattgctgtgccccgaaacgatacatcggatcgtcagatttttcttcgatccagctatttaatgttgcgacttcggcttccggggtattagcgttcgggataatccggtaaccccagttgatagcgtaaatgtcgtatactcctagcacgggcggaacgaggtttacaccgcgttcgtagtctccgggttgagccacgtagttattacgggcatagtccatgatactcggggtggttccgtattttttcgtgaatgacgggctgcgtaatgagtccacggggaaagagtaacttgcacccatgttgtgcatcagacctaacgtgtgtccgatttcgtgtgatgccacgtagcgtaaagattcgttcatcacgtcgtcactaaatacttccgtacgaacgcgaggatcaacggctcccgtctgaacgaaccgccagtcgtgtacaagagaaatcacgttgtgataccagatcacgtcagccacgagaatctcaccgctacgaggatccacgtaactcggtcccatggcgttagcggtaggggttacggcataacgtacacagttgtaacgaatatcgtccgggtcaaagttaggatcatcggtcgggtagtctttggcgatgattgcgtttttgaaaccggctttctcgaaagcgatgttccaatcttcaataccttgtttaacagcacctctccatttttcagggaatgcgttatccacgtagaacacgatcggttttaccggctccacgagttctccgcgcaagtaagcggccatatctttgggctcgattctccaacggtggatgaattcgaaatcttccacgcggtctttatcgctcgtgtagaagttccggggagtactgaaataaccgacacgtctgtctttgtaacgcatgggcatgggatctttgtccagttcgacaacagaacgacgaacaacaagggtaagaggaccgttttgtccgttatagttcatttgagaggagatttccatgtttcgagggaagttctttacctctttcacgcgagatgcggatgggtcgaacatggcgctcggttttttacctgtcatcgggctggagcccatcggggtaatacatttttcatcccgtccgaagaatgcggtcatgtcgatcaacaacgtgtcacccttggtggctttcacctcgaaagtcttcatgatcgggtcattgaagttccgtttgaaagatggggcgataggatcaccttctcttaacacgtcctcgcaaagcacggagtgcatgtacacgttcgtggaatccgttgagaaacgaaccatgaacgggtcattaatcatctggcctgccacgaaatcggtcggggcgctggtttcagaaagacgattggcaatcaagtagatcttgtccaagttacgagcttggatggcccacattaaggttcctttcggggtgtagtaagcatcaataactcccggcaagtgtttagctcctttcacttgcttgtcaaaagcggattctttaggagcaggaggtgttgcggtctgttcggtttttgcttttttcttctttttcttgaaagggaaagcttgtgccgtgggccctgcaagtaatgacagggcgacaaccgcgagtaaaattttcctcatagttctcttcgtttaatcaattaattatatctcgtttattagatttgtgtgcatacattcttgtgcaatgctttcaacaacgggcgaagatatgtaaaaaagaatcgaatttatcttaccgttttgttaaagtttcatctgaaagacgattattattgtacctttgcaagcaatgaatcttaaaaacagataaaatgagttccgaaaccatattttttatcattgttgttttcctgtgcttggatttcgtgttggagagaatattggaatctttgaattctaaacatatgtctcccgtgttacccgatagtctaaagggaatttatgacgagaaggagtatagtcgttttcaatcctacaagcgggaaaacggacggttggatagctggagttccggagtcgggtttgttgtgatgatcgtgtttctcgtggcaggaggtttcgggtggtataatagttgggtggtttctctgacggatagtgtggtctggcagaccatccttttcgtggtggggctttccgtggcttcttccgtgttggatataccttttgattattacgcgactttccggatagaggaaaagtatgggtttaataagactacgaggcgggtctactggctggatacggtgaaagagttggtcctttcgttggtgttgggaggggtgttgttggcgcttgtggtgtggttctacacgtgggcggggacttatttttggttgtacgcttggggtgctgttaccctgttttccgtgtttatggccatgttctactcgcaattgatcgtgcctttgtttaataagcagacgcctttacaagaaggttcgttgagggataagatacaggcttttgcggggaaagtcgggttcaaattggataatatatacgtgattgacggttcgaaacgctccacgaaagcaaatgcttatttcacggggctggggcctaaaaagcgggtcgtgttgtatgacacgttgattgacgagttgacggaagaggagattgtggccgtgctggctcatgagatcgggcattacaagaaacgacacacgttacgttctatggtggtttccgtgatacagatgggggtgcttttctggttgttttccctgtgcgtgaataacgcggctttgtcagaggcgctgggtggggaccgggcatatttccagttgggattaatcgcttttgccatattgtattctcccgtgaatttgattttgggaatcgggatgaacgtgtggtcccggagtaacgagtatgaagcagatgcttttgcggcccggtattacgagggtgattacttggtatccggtttgaagaaaatatcggtgaagtcgttaagtaacttgacgccccatcctttgtacgagtatatctattattctcatccgtcgttattgaaacggatagatgctataaaacgtattcacgaataaaaatataaacgaatgaaagctattattattactatcggggacgagattctgttaggacagattctggacacgaattcacaatatatttcgaggcagttgacccgtttgggggccgaggtggcggatatattgtctattgccgatcaacgggaggagatttggcagtgggtggattacgcgatgaaacaagcggaactgatcatcgtgactggggggttgggaccgacaaaggatgacatgacgaaaaaggtgctggcagaatatttcgatactcgcttggtgatgaatgaagaagtgttgagatggatcgagaagttgctggagaacgggggaatgagaatgaacgagggaaatcgtagtcaggctatcttaccggaatcggccaaaattctttacaatcggaaaggaacggcttctgggatgtggtttgaacgggacggaaaggtattggtgtctttgccgggtgttcctttcgagatggaggatttgatgatccagagcgtgatcccggaattgcagcgcttgtatccgcacttgcatctggattacaggatgttgaaagtgtatgacatcccggaatcagagttggctcttttgttggagaaatgggaagaacatttgccggaagggttcagcttggcttacctgccgtcgccgggatttgtgaagttgcgcctgacggctaagggggatcaggtttttaacttggatgcccgttacgatagcttgaaagagactcttgaaggacagcattacacggagggggagaatggaggaacggaacgggaacttggggaattactgatgttgaagggaaagacgattgccacggcagagagttgcacgggtggaaatatcgcggctcagctcacgtcgatagccggttcttccgcctactttagagggagtgtggtggcgtatgccaatgacgtgaaggaacgggtgctgggagttcgtcctgaaagtttggaacaattcggggcagtcagtgaacccgtggtacggcagatggcagaaggagcccgccgtttgatcgggacggattatgccgtttctacttccggaattgccgggccgactggcggtacggcggagaaaccggtgggaaccgtgtggatcggggttgccgggccggaaagaacgattgcccgcaagttcgtgttctcgtttacccgtgaaagaaatatcggtaaggccacgatgaaggcgattgaaatggttatcgaagaagtgcgtaacggggcagtaaatagatgaattatttataaagtgaatccgtcgtgaatcatagtaaaaaggcgggtctcggtaaacttttttgtatttcatgttcctatttcgaaaatataaattacatttgcacatctcactcagaaaataatacaacgtgtagcgacgctgaaggtattataaagcctccggtgcgtggctatgcgtagtgttaaattttgggtgagatcttaatttacagtccggaggcttttatgttttgtatgtaatgtaaataatac

SEQ ID NO: 211 - DNA, 7297 bp, Butyricimonas faecihominis
ggtgaaagtaccgtgatgggaaatcatcctttttttgtatttcttcactttaagaaaaatttaaaacgtttgagttttgcaaccatgaagattcgtcttatatttgttaacgaaaaatagtgcgtgatctttcaatgatcttttattattcacatgattaaaacaattacacatgagaaaaacagtattggttatttttagttgctttctctccctgttgtttgttccgaagacttacgggcaaggacaggataagttgctgggacttctgaaagaagagttggcacaacagatgaaagaactaaagggtgaagaatttcccccgtatcacatgaattacagggtgattgatgtgacctcttccgtggtatcggcttctttcggggcgctgatgaacagtcagcaatatcgttcccggacgttagttccgcagattcggttaggggatgagaaactcgataattttagatttaatcaaatgggatcggccatgtcccgtttccaaggaccttccgtggctcgtttaccattggatgaagaaaataatgaagatgccgttcgtcaggctatctgggacgaggtaaacaatcgttacaagtttgccgtggatatgtaccagaaaacgaaggctgaaagctctgtaaacgtggaagaggaagataaggctccttatttttcggaagcgaaggtggaaaaatattacgaggctccgctcccggctgaaaagatgacgattgatatggaccaatgggcagcccggatgaaagagatttcagccgtgttcaaaaatcaaccgggaattatgaaaggggatgcgatcatgatctacacggtggagagacgttatttcgtgaataacgaggggacggaagtcgtgcagaatctaccgtacgcccgcatcatggtgttcggggaaacaaaagccgatgatgggatggaattgccgttgaacttgtcttattttgcttatgatccggcagatcttcccgccaatgataagattattgctgatgccaaggaaatggtgaaaacattggaggctttgcgtgtggctccggtggttgatccctacacgggaccggccttgttatccggtcctgccagtggtgtcttctttcacgagattttcggtcaccggatcgagggacaacgtatgaagagtgagaatgacgggcagacgttcaagaaaatgatcggccaattcgtgttgccggaggggatgcacgtgtatgatgatccgacacttcggcaatatgcgggagaggatttgaacggattttataaatatgatgatcagggtgtgaaagccgaacgggtggatgtcgtggtgaacggtaagttgaatgacttcctgatgactcgtaccccgatcgacggccatcctcgcacgaacggacacgcccgtgccagcgatgggtttgaccctgtttcgcgccagtctaacttggtgatcgagacttctaacccgaaaactcccgaagaattacgccagttattgattgaagaggtaaagaaacaaggtaaagaatacggttatttcttcaaggaggtgacgagtggatttaccttcaccggtaaaggtggtaccaattccttcaacgtgaccccgctggaggtgtacaaagtatttgctgacggtcgtccggaccagttggttcgtggcgtggatttgattggaaccccgctttccatgttctctaatattatatatgccggaaatgatgcccgcgtgttcacgggaatgtgtggtgctgaatcgggttcaattcctgtaacggctatttccccgactatcttggtgaataaggtagagacgcaaagaaaagcgaaatctcaagatattttaccgattttaccggctccgggaacgaaataaagatgtggaaattataaaattagaaagatgagatatatattatcactattaatatttttcctgctggtagggccagtggtggcacagaatgagcaagatcaagtgatcttcaaggcgatgcaggatgaattacaaagaaataaagctgaattggcattgccgggaatggataaaccgttttatttgtcgtattctttaggtcggttccgtcagtttgaagttgtcggggagctaggagcgatcacgaattcactggaattgccgtggagaggggtaggctcgtctcagttgttgttgggtgattataataacacgaacgatactcgtttcgtgggacaattcatgaaggtagggatgccggccgaggcggattatgatatgattcgtcgtaatttttggctagtatctgatgctgcttacaagatggcgttgcgtgaagctgctgccaaagaagcggccttgaagtcaaacccgcaaactcaggaggaggctcaattgccggacttggtgaaggcagaaccgatcacgaagatcgtggaaagcaaggttccctatgaaattgatataaagaaatgggaaaacacgattcgtgaactttccgcgatattcaagaattacaaggaaatttacaactcatccgtgggtattagcggtttggatatggaagtttacaaacagacgagcgaggacgtgaccatgaaacaaccggttacctatgcgaatctgtttgcacagggatatgtaaccacggaagacggggtacggatcggggatgcgctttctattttggttgctcgcccgcaggatatgccttctttggaagatttgaaaaagaaagtaacagcttttgctgaaaatctgatgaagttgagaaatgccccggtggttgaagaattctattccgggccggttctttttgaagacggggcttcttccagtatcttcgtgaacaacctgttgaatcaagggggattatttgcttatcgtaagccgattggtcaggcgggaggcagaacgttggaaggtcgtatcgggagaaagattattgacaaccgtttgaccgtgaaaaattacactagcttggagaaatacgatgggaccccgttgttaggtgcttacgagattgacgcggaaggtgttattccagaaaaggagatgacgctggttgacaaggggatcttgcgtcaaatgttgaatggtcgggtaccttctttgaaaactcagcactccacgggtagctctcgtttcgtgatgaccggaagtgatatagtttatgccacggccccgggaactattcatatccaagtagataagggaacgaaacaggacaagatgaaaaaagcattaatcaaggctgccaaggatgaaggattggattatgcttacatcgtgcgcagtattgccggaccggcatcccgtatttacaaggttgacgtgaaagatggtagtgaaacgcaggttcgtttcggtgatgtttctgccattaatctggcgaagatcaaacgggtactggacatttcaagtaaagaaaacgtgtctaactacatcctgaatcgtcaagtgctttcttctttgatttatccggcctcggttttgatcgaggacgtggaaatcaacaagtctgaaccgaagaaagagaaagaaccggtgttgaaattcccgttgcagagataatgtagccgagtggctaattttataaactttacaaactaggggtatgtcgagaaagacatacccctttttattgtaatgttcactgggaatgaatacctttgttcagtaggttggttgttacttttttaagataataggtatgacatttgaaaatatacgtctggtggcccgttacgagcgaaacctgatcataagaaataagttgttttggatattcgcttgttgtgtagttgtgggaatttctctttcgcactggctatggcaaggcgattcattaggtgggcttaggtggttaaacagggctttgccttcgtttattcctttttggaatgcttggttttataatttggtgcaagggattatcgtgatttttatcggtatcgatttcgtgtggcgggatcgacgtttggagacaaatgccgtgttctctgcccgtccggtgactaatttggcttatcaaacgggaaaggtgttggggatcgtggaggtttgcctcgtgctgaacttgataacgatgggattagggatgattttccatatcttgttcggggaaccggaaacttttcagttgaagatttattttgtttacctgttcgtgatgaccttgcccacgctgtttttcgtgttgggagtagctttaatcgtggctaatcgggtaaagaatcatgctttggcagtattggtattgttggctgtatttgctgccttttatttcgggaccacggatttattgtggggtaccgttgacccatgggggcgtgcattgccgcttttgttctcggatgtgacgggaatgacccgtccggagtgggttgttttacaacggggaatgtttgttcttctggggttgggacttgttgtgctggctatgggaatgatgccgcgtttatcggaacgggcaggtgttacatggaaagttagggccgggggatggacgttcttgctgatcggcatcttgttcggaggggcttattacagtatatttcacgagctaaataatcgaagagacttgtaccgggaggtattcgaaaagtacgccgaagtgaaagggggacacgttaaggtgcataatatctattttcgtcaagaaggggataaaataacgggggaaagtgatctggtggtggcaaacgtgggaggacgacccttagttcgcccggtgctttacttgaatccgggattagaggtaacggccttgacaggcgggcaaggggagaacttgccttatacccgggaatcccaagccatccttttggagagagcgttacaacccggtgaagaaatccttttacacgtggtttacgagggaaagattgatgaggcgatttgtttcccggatttcacggacgaggagtttcatgatacccgcttgatgagctttttccggacgtatcattcgatgttccgtcatgggaggtgttttgctcgtgtcggggatgattacacgttgcttttcccggaatgtttgtggtatccggttgccgttcccccggtaaacgtgaacgccccgttggctcgtcagtatgattttacccgttatcgattaaaagtcggggatgtcgggaaacgagtggctatctcgcaaggagagatggagatgagcggggatactacggtctttagaaatcgggagccattgccttctctaagtctgactatcggggagtacgaacggaggagtatcgtgttggattccttgacgttcgagttgtatcatttttccggacatgactttttcatgcgggattacacgagtctgaaagattctgccgacttccttgtggaagagccgataagtacaatactagcgataaaagggggtgattatccgtttgacaaattgaccgtggtagaggctccggtgaatttcgttcctcgtctatataaaggatttgcgggaagtcaatttgtacagccggaactcttgttttatccggagcggatgtatttggggtattatgcgcacgtgggattctggccgggagatgacgatgaaaggacacgttttgagttagaggtggatgcatttcgtaatatgttggaggtaaacctgctcacgggtatttttgattgttcggccctgttcggtgatttcggtggggttctgcaatcggaagaatacccgggttttggtggtatcgtgaatgatttggccaaggttgacttttctaacgggccgatgatttacttgggggatgagctgggctattccgaaatcgttacttattggaatggaaaatccatgcgagaagctttcgtggacaaggagacgaaaggcaatcagttgcaggagttactaaagagaaaatataccttgatagagaaacatttgcaggcactggtcggggaaagggaattattccaatttatgaaacaattcaagcaacgttatttgtttatggctcctgatttcgaggtgcttgagcgggagtttaacgctcgttttcacgtgaatcttcgggagatactggattattattacgaggggaaagagttgccggcattgtttgttcaagatttgaaagtggagttgtatgaaaaggacgaggaagctaggcatatcggtagctgtaaaatatataatcctacttccgcgccggcagtcgtgacgttgagcgtggcgacgtattccatgggagataacgagatgggatccgggcgacgtagctatttaatcccgggacatagttgtaaggagattcgggccgatctcggtacgcttgaggctttttcattggaaatgagcctaagccagaatcttcccggtgagcgtttattggaatggacttcatcaaaagacttgacacgaacgaaagatgggaaaacgggtatttgggatgtggatagcaccatttttacccggaaggttccgggaatgatcgtgaatgccgaggaccccggttttgtgattcatgagaaaaagcggaaagggaaattggccgcttatttctcaacaggtgagaacgggaaaaagtatagttacgtgtatgaccacgagcattggactttgaccacggatagccattgttacggggatatcgtgaagagtgcttattataaaattgccggaacagggaaatctaaggtggagtggaaagtgaacgtggaaaatcccgggaagtacgaggttttggtttatgttccggacgtggaggcgacttcagcccgtaaggtttttatcgggggagcgagacttttttatcaggtgacttccgcgggggacgtcacggacgtggaagtgttgttggataacgaggaaccgggatggatctctttggggaaatattattttgagcgtggtgagtatagcgtgtttttgagtgaccggggtggtgattctttgacgtgggagaatgatggcacttacgcgtgggaacgtgacgccgtgcagttgatttttgccaatgcagtgaaatggataccggttaatgagtagaattttatttgaagtgtattttttgggcaaatagttttatgtgataaaacttttattagatttgtatttcataaatttaatgagtatgaaatgattgtttatttttatgcaagaagagactgtttccgaattaaaagcactaatagaaggggatgccatcgtttttgaaaatgtatttcgcaaatattatcaccttctatgtaaatattgtcaaggaattattcctgaaccggaaaaagttgaagatattgttcaagatgtttttgtttatttgtggaacaatcataaaacgattcatattaatgcttcac

SEQ ID NO: 212 - DNA, 7296 bp, Butyricimonas faecihominis
atgagaaaattatttgtaatgttattcatttctttactggcatttgcttgtcaggaagaaaagagtgtgtctgtaaatataaccgtgaaagataagaacattgatgagggggtatattttggactagtgaaactggatacgatgttgcagatgaatgctgaagggaaagcctccgtagttttgcctgtggatgaaccgcagtatggtatcgtgaaatataagtggaaaacaaaggctatttacttggaaccggggaaaggtttggacgtgacttgggatatgagaccgtctggattggagattgagtttgcgggagatggtgccgagaagaataactttattaacgggaaagaaactcaagttccggtaatgggggatttcgggttgaaggaagacgagtttctggaaaaaatagatcaatacattgctgataataataaagtagtggaaagtaaagggtttgacaaggttttccaagaaaaggagaaaactcggttgctgtatgacgtgtgtggcatcttatggcaatatgcccaaaatcgcgattgctcggaagagtatattgcaaaaatgagatctttgatggtagaagaggattggttgttacaattggattcttacacgaatttcatggaaggggctgtggcttattttgctggtaagatgttggaaaaacaagagaatgcttctgtgaaagagaagacattgaatgttttgaattatatattgagtaatatcaagagtcagaccgtaaaggagtatttggtgacaagtttctccctctcttatattgatggtgagggtgttgacgatgctgcagaagttaaagctatctttgacaaagaggtgacgaacccagtaatgcaagcggctttcaatagtctttacgccgagggggcctctgtggccaagggaagcaaggcacatggctttaaatatttggatataaatggtaaagaagtgagccttgatgatttcaaagggaggtatgtttatattgatatttgggctacgtggtgtactccctgcagagaagaacttccgcatttgcagacgttggaagaagcttttcagggaacgaatatctgttttgtaagcatctctaccgatcgagataaagcaaagtgggaacaaactgtgaaagatgaaaaaatgggggggatacagttacataccggtggcgatgaagagtttctgaatgcattccgtgtaaaaggaatacctcgttttatattgatcaatccggaaggacgcattgataatgctaatatgacccgtccgtcagatccggcgacgattgaatatttgggaatgttagcagaaccgttggaagagtagtttttcgtgattatagtgtgtatttaagggtatttcatttatagatacgccctcttttttgataacttcctgtaaatcaggaggtggattttggtagaggccctaaaatgtacatgtaggggtacatggacggggttaatactaaaaaaatctgtccggcaaaggtagcactaaaatatggaattttggtgcggagaaaggcgttttttgaggaatgccgtatatacagagaaaaatgccggatggggtgactgcccggaagactacaccggaactcaaaccatgtatttggttggggttccggtgtgtttttttgtcggggggccgggctgaaaagagacggcgggaagagcggacaacggttaagggttgccggggtcttcatcggtgccggggttttcaggggtggcagtgaaacggaaacctttgtgcggggtgaactggacaagtttcttgtcgggagccgtttctttctgaccggtattgatgttgtagaaacgggcgccttttttgtgtttgatggagaagcgaccgaatttgttgaggtgcacttcttcgtcccgtgccaatgcctctatgatgacttcgaaggcagggtctatgatggataatagttcccacttgggataacggatattctggttttccagttgtattgtctcttttgcaccaaagaatcccgcaatgcctttcttcttgcgggttacggtacggaagttttttgtctgttcggcaatggccggttcttgttcctgtaacagactgtcctgccattggaatgcctgcatcgtattgaacaggtgtttttccttgttttccaatacaaggcggagggtgtcgattggagctgacggagtatattccgcataatttccctgcaaaaacaacaaaaggctatcgacttttttccgccgcaactgatacttttggtaatcttcatcatcccatgtaatggctgattcccccaatgtggcaagaaccgtaatatgccgatgggcggcatttatcgtttggtttgcctcccggatttcggttatttcgtcctcaatgtcatggactctgtttcgttcatggaacatgatagcagccatactgccgatgactactatcaatatgatgtaacctaaaagtatcctgtgttgcagtaataatttcatttgaatcctatgtcgtttttatccttattcgttttacaatcaaaatactcacttcatataatatccacatggggagtgctacaagtgaaagcgtgaatacatccgaagttggcataataatagccgacactgcaagtatcattactatggcgtgtttgcgatatttacgcataaactcggctgacagaaaccctaatttggcaaacagccatgagagtatcggtatctcgaaaacgatgcccatcgcaaggcacatcatcaccagcatcgagatatatgtagctaacatataatattttcttgctctttattgtctatatctgattaaagtttgatgtgaatctttattgatagttatattcctccacccaccgcatgatacgcattgataacgccttgtatctcatcgaaccggttctgcgattggacttgctgcgcatcgagcagcgactgctgtgcggtcaacacctccaagtaattggtcggagaatggcgcatcagcagttcggttttgcgcacagcttcctgcaatgcggcgatgcgctgttcaccgatggcgatttgcttgcgggcggtctgccattgcgcaagcgcatcatttacctccttgcctgcatcgagtaacgattgctggaacagcaaagtcgcctcttcctgtttaatcttggctattttgaggttggcgatgttcgtgcctcggttgaagaggggttgtgtcagcgaaccaatggcattcagaagccactgtccgggattcacgaccacaccgccaccgttgttagtccagccgaatgttcccgaaagcgtaaggcttggataaaatgcggcacgggcggcattggtggcataaaatgcctgagcaagatttcgttctgcttgccgcacgtcgggacggttggcaagcaactgtacgggaataccgacagacatggtttcggggaatacggcatcttccaatgtaccacgttcgatggtttgcgacggcaatgcgatcaatgccgataaagcgttctccgtttccgaaatgtttttgcgaatggagagtaccgatgattcaagtgccatccggttggcttgtgcctgcaacacggcagcatcattcgattgcccggcccgtttcagggcttcaagtgtgcggatgcttttctcccaactttccaacgtctgctggccgatagtcaactgtctgtcgagcatcagaagtgtatagtaactgtcagcgatagtggctatcaaccgggttcggacggcttgggtataatcgcggctaccttccaaagcctcacttgcgcctcgtttggcattggtgttcttcccgaatatatcgagttcccaacttgccgaggcattcagactgtaagttctggaagtcataccgtcgtatcggccgatacctgcttcgggattcagcgtaagcgacggcaggtaagaaagccgggcattcatcagcacggcttccgcttcctctactttcagatgcgcaatcctcaaatcggtattttgctgtaagccctgttctatgagtacttgcagtcgaatatccgtaaacagttcacgccaagagagtgaggcgatggttgtcgtatccgctgtttctacattacggtatcgctctttgacctccatgtccgggcgtgagtagttggggtatatcccgcaacccgccaacaggcaagctgtcattgaaagaattatcaattgcttcatttttcccaacgtattgtttttaaccactcttcaatcaaagcattgcattgattggtgcgtgaacgcaatatccacaaagacggattaaggtactttcctttcggaacaagccgttttacatcggcttcaacgccttctatactactttctccactcgacacaatcagtccgatgtgtttgccttcgaggatgtaaattaaactgtgtcagcaaagaataaaatattaactttgctaacacagttttttttatgaaagaagaatttgattttgagagcatcaagaacaaggctattgaacagttaaaagcaggtaagcctttattaggtaaagacggcgcttttgcgcctttattggaaagtatcctaaatgcagctttggaaggtgagatggatgcacatcttacagaagaagaacgtcagacgggtaaccgtcgtaacgggaaaatgcaaaaacaggtccaaactccattgggcgaggtaaccgtgtctactccccgtgaccgtaattcaagttttgatccacaattcatcaagaagcgtgagacaattcttgcagaaggtgttgcagaccgtataatcggcctttacgctcttggtaacagcacacgtgagattagtgattggatggaagagaatcttgggaatcgagtatctgccgatacaatcagtgccattacagaccgtgtacttccggaaataaaggcatggaaatcacgtatgcttgattctgtttatcccatagtctggatggatgccatccattataaagtaacggatgaacgtggctgcgcggttacacgtgcaatctataatgtgctgggtattaacaaggaaggacataaggaactgctcggaatgtatatatcaaggaatgagggagcaaacttctggctcggtgttctgacagaccttcaaaatcgtggagtcgaagatattcttattgcctgtatagacggcttgaaaggttttcctgacgctatccaaagcgtttatcccaatacagttgtacagctttgtgtcgtgcatcagatacgtaattccatcaagtatgttggctccaaaaatcaaaaggagttcctgaaggatttgaaatgtgtctatcaggctgtaaataaagaatctgcagaaaatgaactccttaagttggaaaagaaatggggagaacagtatcctatcgtcatcaggtcatggcaggacaactgggacaaactgtccgagtacttccagtatactccggctatccgtaagcttatatatactacaaataccgttgaaggatatcatcgccagatccgtaaggtaacaaagaacaaaggcgtgttcccgtcggatacggcccttgaaaaactggtttatcttgcatatcgcaacatacggaagaagtggactatgccacttgccaattgggctacaatctcacagcaactggctataaagtttggagaacgatttaaattattgtaattttacgctcgtcgggacgggtggtcccgccccttggcgctggccgttccccgaccgatgagttttatagagaaaaataatgcgtgacacagtttattttacactacctattatcaaacgtcatctttagggcaaggtttcaacctatctgtataagcataaaacaagtgttttgatgctttactatttttgaatgttttattacatttgtcgcataccgggtataagaataccttacctttcaaagtttcaacatgccctacaacaaaatcttgtttttctttcatgcaagatgtacacactttatcaaatggaattatttcttcctcaaattcctttttccaatattcacttggagatgcgtaacctccgtcatgattataaatagaagaacctataacatgtctaacaagagtcatcccattaattttgattcggaattttgcagctataaaataaagcttgttgaattgctttgaagctatatgaatcacttttcctgtcattgctaaacttatttcaatacaaaaataggcagaaatcttgattaaaacaagcatgtcgtaggtataatagcaagtactcatctgagtaaatatctgtcctcaaacgagtacctgttaggtgaaaaactacgagttggtgtaaactcgtatatagttacctttttttattttaaacgtgggagacgtttttttctcctccatcgaagactcctcacccgccatatccaacaaaagctggatatactacaagttcaaggagctgttatttgagcattaccgcggccaacacaagatacgtttttacgcggaacgcctgtccgtctctggcatttacctgtcgagaattgtcaaagaagagacgggtgagaccatacatggacatatcacaagattactctacgtggaagctaaaaaaatgctctcctgttcaaaaaacgacatccagaaaataaccgatgccctcggttttacagaccaggcgtccttcagcaagtttttcaagcgattcgccggagtttctcccacggaatacagaaacaacataaaaaacaataagaactcctgtttagaaaaatatcctaaatagagatttcagcaaatatcaaagagtttttttgagatccaaaatattcataaataatcattcatggttaaatagcaaagacactaaaagataaaaaaagtgatatataaaactcaagacggaccggcatattaaaggccggttcgtcattgtattcgaaaggtggggatataaccactacaacctatcgtcgggacgttcattctcattcatgcaaacatccgtcccgccttccaaggtccgatgccttccggcaaaagggaaaagcgccacccttgcctgacaaggacttatctgaccttagctaccccgaatctttgtgtccatatttatccttttttgattttatatatgtaaatatcttgcagataaaaaaactatagaacccctttttttcagaatcactccaagcacgggagcgtatggcagccttcttggcaagacctccaaaactataagataagctatccataaatatatccattacatcggagaactattaccattcataatataaaaatttatgcaaacttattatgc

SEQ ID NO: 213 - DNA, 7288 bp, Butyricimonas faecihominis
atattaaaaagatatatctttgcaccacgttagatacaaatccaagaacaatgaaaaagagaacatgaaagaagaaaagattccctgccggataatccggtacagggagttccccgatctgcttttcggaacgttacgggaagacggaccggtctatttcgacgcgacacgcttcatccaggccaaaggagatgcacgccggcataatgtccgtgatttccgtgtcgctttccatcactgggcaacggcgttggcagacgcctacggaatagacagggaaaagatgatcatccgtgacgaggcgtcgggacacctgttaattgatgaatgtctggctctattatttgtcgtttacatcgatcccgcgttcggtgtctaccttctggagcgcgtggacgaactgctgtccggtggatttacggtttcagacacttggctggtacaggctgccggtcttagatttacaaaggaggaattaacgcaaattttagaacaacatgagacgcagcacatttaaacgacccaagatggtgctcatcttcaacggggcacaggttcttgtagcggtcacgcgctcgctgcacagcgcggcggaattgacaaaaggcaacttgcaggctatctcattctgttgcacgggcaagtatgtatgcagcggcggactctatttcaggcatctgcatccggatgtggaaatcgagctggccgacctcggcacactgatgctgaaagattatgacgccctttgcggcgagaaacgcacgtactatccggtgcgcaagatggcacataagagagccttgcttgaaaacaaacgtaagtctgataaccaaaagaaaggaggaaatacctatgagggaaaataggaatgttccgttccgggactggaacataagggtttcccggaaccataacggccagctccatatctgcgccgtggatatatgcgatatactcaagcgggacgaactgcttgaaaacggcgccatcgcccgtgtttgcccgacggcattgaaaatcagtttccggaaaaacggcagggaacagtggggtttccgtcccatcgatatgcgccggcttttacaactggtacgcaaggagactattataccccgtgacctgcttgatgaattggaagtgtggggcaacaagcttctggaactggaagccggggagctgcacgccgtcccgcaggacgacatcgtcatgcacttcgaggaagggttccccgtcacgttccggcgtgtcggcgacaagctgatggtcaacgccacgcagatcacgatgcacttcgggaaaatcccgtctgaatggctacgcatcgcttccacggatatgctccgcagggaaatggccggcaacggacataccgggaaatacgagtcgcaagtcttcaccacacgggggcgggggcacggtgcgacctggttggaatcaccgcttgtcataccgttggccagatggatcgcccctgacctgtctttggcggaatggttgggcgaggctatcggcaaactctccgtgaaacgagggaagacaatcgtacgcgaacgccccagggtggcggcacccggtctgccctgtatggattgtcccatgccgcaggatatggaatcggcgacgagactgattctggaactgcggaaggtggtgagtgaatccctgccgaaaatcgtattctacgaggagtttatcgagaacagggactggttcaagagcacgcgcatcgctgacgaactcggcatatcgccgcgacagttgcaccagttccttgccgaagagggcatctgcaagtacgagaagcggcaatgggtggtctttccttcctgccgggcctggcaatgcgatgtgccttacacgtgggagaacagccggggcaaggtatatactttcggatccaccaaacgatggacacaggccggacgggagtgtatcatagaactgtggcgcaagaggaaccctgaatactgcccaccgggtgcatagcgatggaaacggcattacagcggatcatccgcaagacaggaagacggccggtagagtgccgttgccgtctgtgcaggcagcaatgccggataccgtgcctcggtacgccggaagacatcctccggttgctgaaagccggatacagggagcgtcttgcacccactcggtgggcggtaggcctgctgttaggaaaaatcccgtatatcgtgccgatggtacaggcgaaacaggaagcaggcgggtgcacattctttcaggacggactgtgtgaactgcatgcggcagggctcaagcccactgaaggcaggttgtcgcaccataccatcaccatggagaacctgaagttcggaatgtcgctctcgtggaacgtggccaaagaatggctggacgagcggaacttcgacacgatacgggagattgtccggataatgggaaaatagatgagggacggtttcatgaatgaagtatcagtataaccggttgattcctcctttgccgatttcatggaaccgcctcttattaattcataccatttgcaaacagttcgtattagtcgcggctatcctttatcaggaaaacatttaaacgcgaatgatatgaaactgaaaagcagaatgaccgtcggggagatgtcggaacacctgacggaacataccggcaagttcgccaaccgcgtatccgtggggcgttacgccaaaaaactgggatacgccgtgtataaaccgatgataaacggcaggatatgccagttctatgtcaatccgtcgattaaggatgacggggaagcggaaacattacggacgaacgaacgcgaaaacggacatgaaagggaatgacgacaaaaggcaacacgtgataccgtttatgaaatgcttcaccgggctggtcggcgcgttcaccccggaagaggtcatcttcatgctgtacatggcagaccgtacacgcctgcgtgaaaaaggttacgacaccttgcgcagcaagcggtactacatggagaacatggagatgggttcgcggattttcgacaagtgcgtggaaaagacaacgcgtatgggattgcttgaacggatgccggtcagcgggatgtacgattacctgtggcacatggattcctacaaccggcttgtagggatattggcggaacttggaaatcctttttctaccagggcattctgtcatcggatgttcgatgtggaaaaaaggaccgtggcatccgtctctgacgaagaggtcagccaatggaaagagagacaccgaaaagtttgagcgtatctgtccacggaacgtaaatgaataaaaacagacggcatcgttgtgatttgccgtctgtttttgtgtttttgcgacataaaatccgataaaaccggaaggaggtggtagccgggtacaatattatccgggcaaacgacagaatatgctaaatatacttattcagttcttccacaagaagatgcaccgttgtcgaagattccgcctgtgccggcggtattccctccattcggcgcaatacggcttttgcgttcgtgatggcctgagcctgtttaccgcccagctccctgaaaacacgaccgcctgtaccggcttccttgttgtaggagaagcccaacaagccggatagctttgtttcatattgatttctgtgcatcgggccttgtaccaggttatagtgcagcaagaaccaatactcgaaagcctggttgctgtatgccaccctcatgccaccggcttccgccataccgatagcccggttgaaatcccgatcgggaaagtcatccttgtcaaataccacccagcactggtcatactcgcgtcctttcttccgctcttcttctttcatccgtaaagccttttggacaagacctaccgtattgagtccctggcctaccgctttaatattggcggaagtcaggcgaaatgcattgaaataatccggttccgtatttaccccctcgcagatgatcaggaaggattgtttgacctcacggacaaaactgatacgcctgagtgtccgtgccgcgcgtggatcacgcttgttcgtccgtgctgccatattcttcctccctcaggtcaaataaccgttcaaactggccgatgacagggataccgccatatttccccatcaggtactccttttcgaaaggtgcactgttgcgaaccttgtattccgccaacgaatagagttccgaggctccaaacgaatctttctgtgtaaaccagatctgatccctgcggaacaggcttgcattaagcaggttggtgtcatgtgtcgtgaaaatcaactgtgcattcctgggatttgtcactctggaattgaacagcccgatgatgcgacttgtcaacagagggtgcattttcgagtcgaactcgtcgacaaccagccttttgccatgatccaacgcgtcgattataggataagccagcgagaagtatttgatcgtaccctccgactcgtttacgcggaacgggaaagtgaccgtcttcgtggcgttgccctcctcgtcatattgctggtgtgaactgatgactgtattgtcaaccttgcgtatgtcgtcgattccgaagtctgcaaaccgggcaaactccacaatacgccttttcatggacggatcatcgatctgggctatcgccatttcccaaatccgctcgtcgctgctgccaagaacaatcgtggtgttggccaaccatcccatgatttccaccgagacgctttcgttgaactgtgctgccacggaaagaagcagcgcattgtcgcgcaccatttttttggcgacaacctctttgccgaccgaaaatttgggatgcagttcatactcatcgccgtcacgcaggaacagttccacctcctttgccttgcgcttgttgcccttttgataaagccactcccggtgtacacgtttttcatcgacttcgaacccatagcggtattggaccgtttcgtcggcaaagaccgcctcaaaataactgggctcctgttccgtcctccggttgagacggaaactttccacccgtatgctttcgccggactgcacgcctttggaggaattgatgacaaaccatttgaagaaatcgagtgctttgaccagattcgatttcccgctggcattggccccgtagatgaccgcactcttcagcaaagagaggttcgtaccttcaagctcaaaaacaatctcatcggaccgggtctgtttttctttcagcgcggaagcagccaaagacaaggtcgccggctccttgaacgaaaggaaattttcgactgtgaactgaataatcatattatatcgcagttatatgtaaattttatgcaaatataggggatatttttcatatatagatgttttatcggatctctttttgcggttattttcctgcacgtgaaaatcagaccgttttcgttcttgcaatgctgccctgcaaaaggcgactgcaattttccgaagcggcaacatcggcttgcgattcatgctcccgatagtggaatttgggtggaaagacgcgaaattcgccacatctttcccctcaatgtggtacaaatgtaccgtgtatctgacaggaggggtgttacaaatgtagcaacaatactataagtagtattatacaagaagaaagaagaaagatgtacttttttctttgacgcaaagaaaaaagataccaaaaaagaaacaaatcatgacagacggcacgccgtctgtttttttgtttttttgaatcggaaagtgttgaaaacggataagatgaggattaaaggaccacttcctccccagatacaagagagagaaacagaacgaataccttataccgtcaccctcttaccgtctggcatccttgtcgcggttcagccttacgacagagcgcacgcagtcacgtaccagttcggcatccctccgctccatgaaatagttcccgcattccaaccgtttcctgtccgccggcctgttgttgtccctgcattcacggatttccagtatgtcattcaggtaatagtacttgtcaccgcgtctgacacgtgttgccagccgttcgagttccttcagccgtccgttccatgcaagccctttctggcgtagagcatcggaaagcctgctacggccactggttccgataggcagtatctggagattcaccgcgtacccgactgtttcatgcagggaatagcgcaggctcccgtcttcgtccagcaggcaatacagcacaacacgtccttttgcgtcgatttccttgaaagcccccagtattacatgctcatccaggatactgagttttaccaactgtccgtctttgggagcatagagagattccgaacatacaccccggcgcttgtcccatgcaagatggccttcgttcagcaggcgttggagggcaatcttttgctctgcgctcgcttcccggcaatcattcagaaacatgaccgcgtcatcggtaacgagttctctgcccgcagtcatccttaccggaaccgacacgcaattacccgtgacatctcccacaagtccggtttccgatgtcccaccgttgaagacgaccattcccttgcgaatggacgacccacccgtgctgtctttcggaatactcccgattttcttcttatgatatgattccattctttcgattctttatccagatatttcctgtaacagcaaaatgccatacttcatacataagtggatacaatacggcaaatatacgtataattcaccaaaaaggcaggtgactgaaccccatttcttctgcatttccacggtttcctgtataaagtcacaaaaaccgtacaaataagtcggaatccatgtggatagcttcgttctgtatattctatatgattaaggaacaaaacattacaagattgtccgattgtgaaaagcatatccgaacatactgaatgacaggaatacacatcctccttttccgtcgtccaatccggttaagaacagtcaatataccgacgtgtctctatatattttttgatgcgttttcagcgtatctaaaaaaaaacttcaagccggaacccggaaatcgtgcagaaagtctgtacacccgtgaaaattgaaaggacaggcatccacaaatgagaatatttcaaaaatatgggacatggtgaacaccagcaccttaagcaaccatgataaatacaagtactttactgtatattttttgatacctgcttacagtttcaatccgaaagccgcattttgagccattttggaaaaccggacttgaaaaaacggcccgaggacagagaccgaatccgcacccgagggtacaccctccctaatctttttatttttattacaccattgaatatcaa

SEQ ID NO: 214 - DNA, 7244 bp, Butyricimonas faecihominis
ctacttttttcttatttgtatttgtttgtcagttatttatagtttaaggttatttcttgttttctcgcaaaatgtaatgtcaacaatcgaaggaataatgagtgatttgataccaaaattagatatttcttacttgattgtaaaagctctaaatggagaacttgaggggacagaaaaacagaaattgaaagaatggcttgatgaaagtgaggaaaataaagtatcgtatttgagagttcagaatcgaaagaatcaagctcaacgtttggaggtaattcgaaagttgaataagcgggaggcttggaaaaggatagatcatgggacgagggaacataagtattttatatttaaatggatttatagaggcattgcagttacaatacccatgatactattgtttaacctgtattataataagctagatcgaattgatcgggaattggtgaaacaagaacatcgggaaattcatccgggagaagtaaaggcagaattgattctggctaatgggcaacgcttggccctcgatgcggaaaaggagaattccgtggagttagatttggatggggtaaagatattaaaggagaaccggggaatacgttacgaatgtgaggatttggatggagatatcccgtatcatgaattaagggttccacgaggaggagaatacccgattacgttggaagatgggacagaagtgtatttcaattcggaaacaagatttcgttatcccgtgaagtttggtgatcgggagcgtaaagtgtttctcgtgggggaggcctattttaaggtgaaacgggaggttgaccgaccttttatcgtggagataggagagaatcgtatagaagtgcttggaacggaatttaatgctcgttattatccggaagagaataagcaaatgaccacgcttgtttcggggaaagtgaaatttatttcaaaagatgataaaagtcttgtgcttgctccgggagaacaggcggttctgacggatgagggtgttttgtcctgtgaaactgttgatgtgaccctgtacacggcttggaaggacgggaatttcgtatttcgcaaacagcgattggaagaagtactaaacacattggcacgttggtatgatgtggatgttttctatgaagatgtttctcgcaaggatattgaatttaccgggaatattcagcgattcgagcgttttgaagagatcgtcgggcttttgcagatggcaggtgatacggaatttgaagtaaaagggaaaagtattttcgtgaggcgtaaataaaggacgaggtatttgcactacctcgtccctaaatccggcaaaagccgggattgttatattttaaaactttacaaatgtatgaaaaaaacaggtaattgtgtccatcttcggattagatggttgttaaaaatgtggttagctatgaggtttttaatgttttttctactcttgagtgtagtgccggtttcggcgtctgtattcggtcaggatgctaaagtgtctttgcaggtagaaaaggcatctctcgaaaaggtcatgagcattttggagaaatccacggattacaggtttgtttaccaaaacagtcaggtggaatccgtgggtaatttgaccttgaattttaaggattccgacatccgggatgtgatgacggagtgtttaaaggggtccggtttgacttttagtgtggtaggcgtgaatgtggtgattgttccgttgggagagaaaccacaggtgccaaaggaggataagaaagaaaaacaagtgaaaggacgggttacggatcaggaaggtcttcctttaccgggtgtttccgtgttgattgatagtaccacgttgggtgtggtgacggatatcgagggaaattacgtgttgacctatccggaaatgagtaatgtacgtttacgtttttcttttatcgggatgcaaacgaagtacgtaacagtgggtaacaacacggttatcaatgtggttttggaagaggaagtgaatcgtttggaagaggttgtggcagttgggtatggcaccacgaaagcaaaggatatgaccggggcggtatctcgtttagggaagaaagagatcgaaacggcaccgatgggggcttctattcaatccatgttgcagggacgggccccgggggtgaacgtgatgatcagttcggcatctccgacttcgcctgtatcggttataatccgaggttcctcttctttgtccggagattctcagcccttgtgggtaattgatggggtacctgaatattcggctgggacttccggtaatatttccaacacgttgtataatttgaacttgtcagatgtggagacaatagatatcttaaaagatgcatctgccacggcgatttatggttcgagggctgcaaacggggttgtattggtgacaactaaacgaggaaaaaaaggcatgactccgacactggaattttctgcccgttacgggattcagacaatgaatgcgaatgatttcggggtgttgaatgccaaagaatatattgccttgtcaaaagctgccgtgcgggctagtttctttacaagaggtacattggattattttacccgacaatatattgatgaggcgaaatttaatgctgccacgaataatagccaatttgatttggaaacactggaggatgatttcttcctgaaggatgcttattatgatggtgatacggattggtgggatttgatgacacataatgccgcgacgcaggattatagtttgggaatccgcggaggatcgaaagaatcgtcttataatgcttctttcttctataaagatcagaaaggaatcgtgaaaggtggtagttctaaattgttaggtggtagtttcaattttgatgcctctgttcgggaggtgattcgtttcaaattgggcttgcgggcgacatcccgtgtgacgaatgacaaggatgatatgatcagtacaattttggatatgcgcccggattacccggcttacttggaagacggatcgattaatatgatcagtttttacgtggagaatcctcttttttcgttgaagaacacgaaagaagggaaaggaaaagatttcacgggatcattgggattggaatgggatattattcccggtcttaccttacggacgaacgggacattgaagtatggtattaataagaatttgacctacgaccgtaaatattatgatgacgggacaagttcttcaacggtttccaaaaatgagtcgtatacttatgtgtgggataacacgttgaattatcttaacacgtttggagatcataatttggtcggtttgttgggattctccattgaaaagtacgagtcagacggattgtcggcatcaggctcgaattttccggatgatgaggtattgacgaatttggggagtgcggcaacgaaaaactcgataagttcaagttattcttctaacacgttggtttctacttttgcccgtgtggaatataaatttaaaaatcgttatctcgccacgtttactttccgtgcggatggttcttctaaattcggtccggataaacgttggggatatttcccgtcgggagctttggcttggattatttctgacgagagtttcttgaaagattattctcatattgtttcttacttgaaattgagagcctctatcggaaagaccggatcacagaatttgggtaattatgactggagaacgttgatgggatcagcgacgtacaataacgctccgggaataaaaccctcttcgctggggaatgatattttacagtgggaatctcaggtacaaaaagaaattggtttggattacggattctgggatgatcgtatccggggatctatcggttactaccagaaaaaggtcgataacttgttgtatagtgatccagtaccttattcatcttctttctcttcagttacccagaatattggttctttgaagaataaaggtttcgagtttgatgttaaagtggatattatcaagaatgctcagaaggatttgacttgggattttgatttcaacgtggcaagaaatgttacgacgctggaaaaattgaatagtgaggatgagtattttggtggtggtgcatatcaatattttaaaattgatgtcggaggaaaaaccggaatcttgtatggttacaaatatggcggtcgattgatccggacaaatgaggagttagtagccttgaagacggtgaatccagaaacggggcaacagcaatattaccgggataataataattatgagcgtccgggagacttgtatatcatggatttggatggtgacgggcagatcacggctgacggtgatcggacagaaataggtaatgcgaatcccgatttcttcggaggattcggtacgacggtttattggaaaggattgatggtgaacgccacctttacttattcggtcggggctgatcgtttctatgatgaagaaaagaatagtgccggagacatgaacgtgtacaatacctccaagaacgtgttgaagtcttggacgatgaatccgggtgtggatcggggttatccgagagccatgtattatggttggggatcgaattccattatcacggatcgctatgttcacgatgcatctttcatgagattatccgctttgaatattagttatcgtttgcctcgtcgtttattcggttccagtatcgtgaatgcgattgacgtgacattccaagcaacgaatttgtttacttggacgaaatatccgggtatggacccgcagggaaactttagcacgtcttacagtgcattttataatatgggtattgattacagctcttacccgtcagccagaacctacaatttgggaataaaaataactttaaaataagatatgatgaagagattaagttattatatcatgttgttggggatcgtgttctttacttcatgtgaggattttttggatcaggttcccaagcataatttgacactggataatgccgtcacggattatagtggggcaaaaaatattctgaacgggatgtactcgatcgtggcttccaattctgcattcgggggtgcgacttggtgccgcctgtcttcacaaggaggattttactcttcatatacggctaattttaatatggtttataaagaagggtctaatgacatggatgggacttggcaggctttatactctttggtgaactctgcaaatgcggcaatagaagcgatttcgaatctggccgagaataaatttccgactccggaacgtaaaaaggaaatgttggctgaagctcggtgtatgcggggttgggcttacacgaatttgttctggttgttcgggagatggtgggatacggatgattcggcttacgggatattgtaccgggataagatggcaaatttgagtaatttgcaggtgcctcgtagcagcgtcggggaatcgtacacgaagatctttgaagatttggatgatgcaatcgccaatatgccggacttcacgacttcccgtagtttgtcccgccagatggcacaggtgttgaaagcaaaaatcttactttatcgcggggttatgcgtggttctacgcaagatttgaaggatgcgttgatgctagtggagaccgtaaaacgggatgctccttccaattggcaaatggaatcggatatagaagctatgtatgaagtgggttgggattcgaaagaggttctgtgggcgaggtatttgggggattttgccagcacgacgaattacgagtttgactattcgtataacatcggttataataatacctattcggatattgcaaccgggtggttgaaggaagatcctcgctatgaggtggtcatggattctgcccgggctcctgagacttgggatacaaagatggtgtttactccggtgaaattatatcatggaggacgctatgatacgaaagatgctccatacgcaacctattatttccgctatgccgagttgtatcttatggaatcggagttgaaagcccgtttggatgattattctttggaagaagcattgaagcctttaaatgatatgcgggcatgccggacaaaccctgtgttaccggctttatctcccggaagtaagaaagatttgttgagagcgatattccgggaaatctgggtagaacagttcttggaaaatggaagcgagtattttgcctctttgcgatttataaatgacacggatgccagtgctgcccagaataaaccttggatatacacgctgaaaccggatgtgaatttcacggaaaatcagtattgttggccgattccagagaacgaacggttaaaaaatcctctggcagtacagaacccggaacttggtaattgatgtttgacaaaacaagtaaatatatgagatttatgagaaatttgtggtttatattcattctgattatagcttttatggcatgttccgatgataaggatgtgctagcacctgtaccgaatgatgtaacgctgaatgagctggagttggggcgttttacccatgcgattccagacggaggctttacttcgaaagcggctcacaagaattctgtaacgtttaatacaaagaaaaatagtgacgggacgtatgccgggtttgcttattcaaaccggaataaccgttcctttacgtggacggctactcaagaggctttggattcaaatatttatagtgtgtacacgagatttcccaatgcgaatgaagtatatgctgttggacgggttgagggagatgatacttattttacgctgggaactccggccgtggtagaacatattctagtggctaatacgacttatacctatttggcattggtgtatggggatcaatacgggacagaagaggaaccggttgctaatcccaatattccgggtagtgcgaataaaaaaggggtatggttcacgaatgttccgggaggtgtgaagaaaatggtggatgccgataaggatttttacaaattgatcgttaccggatataacggggagacagaaactggtcaagtagagttttatctgtgtacccggaagggagatccgagtcatccggcttggagcttggtgattaacgattggtataaggtggatttaagttccttgggagaagtgtcgaaagttgtattccatgtggcatcatcggatatagaggccggaaccggtcggatgaggactccaccgtatttctgtcttgacgggattaggattaaagaataaattcaatgaacagggactgatttttcaatcagcccctgtataatatgaataaaaattactgtatgaaaagaattgtatgttta

SEQ ID NO: 215 - DNA, 7217 bp, Butyricimonas faecihominis
gaatataagatattagtggtggatgatgttcagtcgaatgtgttgctgttgaaggctttacttgggcgagaagggtttggtatcgtgtacgcaatgaacgggacggaagctttggaaaaagtgaaaagtgaacatccggatttgattttgttggatgttatgatgcccgatatggacgggtttgaggtggcaggacgcttgaaggtggagccggaacaggctgaaattccaattatatttttgactgctttgaacgattcggcaagtgtcgtgaaaggttttcaactcggtgcgaatgattttatatcgaaaccttttcgtcgggaagagttgttgatccgggtggagcatcaactttctttggtggatgccagacggattattttacgtcagaccgaggaattgagaaagacaatagccggtagggataaactttattccgtgattgctcatgatttgcgatccccgatggcctccatcaagatgtttgtaacacgattatgatgagcatcgatcagcaaaccgttccgggggacgtgttcgagatgttggaaatgaccaataaaacggcagaggaagtattttctttgctggataatctgttgaaatggaccaagagccagttgggtaagttgtccaatgttccgcaaccgatagatatggtcgggttggttgacggggttatcgaggtgtttaagccgatcgctcaaagtaagtcgatttcgttagaattgaattccgagatcgagttcgtcaatgtcatcattgacatcgagatgataaaatctgtcgtgcgtaacttgatttcgaatgcgattaaattcagtcataaagataccgtcgttatggtacacgtgaaggtgcaagatataaccaacgagaacgcgacaggggaggggaatggtaaagaagtacttgtcaccgtgtcagataaaggatgtgggatcaagaaagaagatcaagggaaactgttaaatgaggccacgcatttcacgaccttcggtacggatagcgaggaaggctccggcttgggcctgttattatgcaaagatttcgtgagcaaaaatcacgggcgcttgtggtttacctctgaagaaggtgtcggttcaaactttaatttcacaattccgataaagtgattttgtctgggacaagatcagttgcaggttacaggttagcaagttacaggttggtatcgtatgaacttgtaacctgttaacttgtaacttgtaactaacataaaaggcggtcaatcgaccgccttttatgtttcttattcaaattcctttagaattttctccacttctccgggggtaacccgtccgtaaactttttcaccgatcagtacaactggggcaagtccgcaggctcccacgcatcgtaagctggttaaagagaacttcccgtctggggtggtctctccgacatttacctttaggatacgtttgaattcgtccagaactttctctgcaccccgaacgtagcaagcggttcccatgcacacggagatcgggtgttcccctttcggggtcattgaaaagaaagaatagaaggttactaccccgtacactttggatacgggtatatctagttgacgggcgatcacttcctgcacctctctgggcaggtagccgatcaagccttgtgctttgtgcaagatgttaattaactctcccggttggttcccgaattcttcacacagttttaccagttggtcaactttgcacttcgctaatgttatttgtgtcataatgataacttcgaatattattgttcaataatctcttttcctctgttaaagtagcacgtatgcagcaaatgatgggctctttcgctcatgggtttgcccaagaactcttcgtacaacgagatgatgtacgggttctggtgggatttccggagcgatttttcgctgtcttccgtgtagagagcccgtgtacgtgctttcaacaaagaagaatctccatggtgcaagggctgacctccaccaccgatacatccaccggggcaggccataatctcgatagcatggtatttggatttgccggctctgatttcgttcatgagcttgcgggcatttcctaaaccgtgtgccacggctactttcaattcgaatccgtcgacatcgatcgtggcttctttcagattctcgatacctctgacaccttcaaagttcacgttatccaaggttttacccgtgtggatttcgtaagccgtacgtaaggcggcttccatcacgcctccggttgccccaaagatcacggcagcacccgtggattctcccagcggtgcgtcgaagtcttcgtcttccagttgcatgaaattgatattggtctgtttgatcaacgcggccaactcacgggtggagatggagtaatttacatccgggtccccgttggtcttgaactcgtctctttcgcactcgaattttttggccagacaaggcatcacggataccacgatgaggttttcacgtttgatacccattttctctgcccaatatgtcttggcgattgacccgaacatctgttgtggagaacgggcgcttgacggcatatccagtaagtccgggaattgtttctcgaagaaattcacccaacccgggcagcaagaggtgatgatcggtaatttcaccgatttgtcaccattcaggaatgctcccaaacgacccagtaattcggtgccttcctccatgatggtcaagtcggctgcgaagtcggtgtcgaataccttggcaaaacccagtttgcgtaaagcggccaccattttcccggtaacggaagtacctgccggaagagcgaactcttcacccaaggcggcacgaacggccggggcggtttgcacgatcacggtcttgtctggatcggctaaatctttgatcaggcggttcgtgtgatccagttccgtcaaggctcccacgggacatacggcaacgcactgtccgcagaaagtacattcggaatcctgcaatgactggtcgaacgcgggcattacgacagagctgaatccccggttaatggcactcaacgcacccacagtctgcacttcattacacatcatttcgcaacgacggcaataaatacatttcgtggcatcccggcggatagaaggggacaggtcaactctgaattctgttttctctccctcgaaaggaatttcccggatacccagtttgatggctacggattgcaattcgcaattaccggatttggcgcacaccagacagtctgacgggtggtcggacaacatgagttccaacacggtcctgcgggcgttcagtacccgaatcgtgttcgtgtgtacattcataccgttctcgcagcgagtggcacatgagggagccaggttcttcctgccttcaacctcaaccacgcagagacggcaggatgccggggcgtttttgatgcacaaatccttcaggttcatgtagcaaagggtaggtatgtcgatacccatgtcccgggctgcttcaagaatcgtggttcccttgggaacgctgatctctcggttatctatttttagtgtaatattctcgttcataataaaaacttcctcaactgccgaagcaattctaaattttaaattctaaattttaaattatctcgtgcttactgctttgaacttacatttctccatacaagctccacacttgatacattttgccgtgttgatgaaatgcggttctttacgttctccgacgatagcgtctaccgggcagttgcgggcgcagagtccgcatccgatacagagttccggatcaatgtggtacatcagtaatgctttacatttccctgccggacacttcttgtccttgatatgcgctaggtactcgtcgtagaagttgtctatcgttgacaatatcgggttaggggaagtttgtcctaaaccacaaagagcggtatctttgatcacgcgactcaggtttttcaacatatccaggtcttccatggttcccttaccttgggtgattttttccagaatgtcgtgcaggcgtttattaccgatacgacaaggtgtacatttaccgcaggattcttccaccgtgaattcgagatagaatttggcaacggataccatacagtcgtcctcgtccatcacgatcataccaccggaacccatcatggaaccggatgccagaaggttatcgaaatcgatcggtacatccaagtgtttctcggtcaagcaaccgccggaaggtcccccggtttgcaccgctttgaattttttaccgttcttgataccgccaccgatctcgtaaattacttcacgaagggtagttcccatgggaacctcgatcaggcccacgttattgatttttccggcaagggcgaataccttggttcccttggagcgttcggttccgattttgttgaaccagttagcccccttcatgatgatagccgggatattagctagggtttccacgttgttcacgttggtcgggcgattcaggtaacctgattctgccggaaaggggggtttcatcgtgggttctccgcggtgtccttccatggagtggatcaatgctgtttcctcgccgcaaacgaaagctccagccccgtagcgtagttcgatattgaaagaaaaatcggttccgaagatattttcacccagtaaaccgaattcttcggcttggtggatggctgttttcaggcgttgaatggcaagcgggtattcggcacggatgtaaaccaaccctttggttgccccgatactgtacccgcagatggccatggcctcaatcactgaatgcgggtcgccttccatgatggaacggtccatgaatgctcccgggtctccctcgtcggcattacaaaccacgtatttctgatctgcttggtatttactcgcgaattcccattttaagccggtagggaatccaccgcctccacgaccgcgaagtccggataatttgatctcgttgatcacttcttccggtttcatctcggtgatacatttcgctagtgcggaatatccttcacgtgcgatgtattcttcaatattttccgggtcgatgaatccgcagttacgcaaagcgatccgcagttgtttcttgtagaaacccatgtgtttagagtcgcttaccgcttctttcttttccggatctttatataataatctttcgactttccgtcctttgataacatgttcgtttacaatttcctcggcgtcatccggcttaacctgtacgtagaaggtgttgtcaggcatgattttcacgatcggtcctttttcacagaaaccgaaacaaccggttgcgatgacctgaacttcgtcttctaggtttttctcttttaaacattcttccagtctggtaataatctggtgactggcagatgctctacatcccgttccaccacaaacgaggatatgcattttataactcatagattcaaggttttgattagttgttctagctgtccttttttgttttagattgtttcaaaatttaccggaatgatgtcggccacgagctcgtcattcttcaggtatttctgaatgatttcttcggctctttcggtcgttacatgtccgaacacgatcgggtctttccccggttttgtgatttccacggtcggttccgcgtaacagtaccccatgcatcccgtttgtgtaaccacggcagcaatcccgtttttctcaagattttcgataaagtagttcatggtgtccttactacccgcggcgattccgcaagttgccatagccactttaatctggatcaggctttcaacctgttcacttttctcccgaagatcaatcttcgtctgcacgttttctttgatgcgtttgaggtccgcgagtgatttgattttttccatataaaatgattaaggttattttgttttaacttgtttgtgtaatctcttttatgttttcccggatcatttgtctcaatgccataacgatttccgggtcattgagaggtacaccctccagtatttctttcacttcgttagtatcgaatgtgtattcccctttttccgtcgaatgacggtaaataaagtcaatttcgggatttgccgatacgagaatgacgatacttccggcaatatcacccatgggtggtctgtcccagtgggaaaggccgaatttcgcctcaataatggttccttctcccgtttttgattctattttcaagtttccccctgttgcttctgcattctgtttgaatagaggaatgcccagcccgactttacgcacggttctactcgtgaaaaaaggatcggtcactttgacgacggtggcttcgtccatgccacatccgttatctttgatcgtgatgacaagagaatcttcggttgcattctcttgcagatcaatctcaacacgagaggcttgggctcgtatcgagttttgggcgatatctaggatatggtccgataacgtttgcattcaatacctgtattaattactctattttttcttgaatgagaagcacacattcttatagtttttatcttttcccgatgatttaatttcaatcgcatgaaaaaacgttccaaatataattaatttatcaatagaaacaagagatttattatcaacttggtattatatagattgtttctaatgtagaaattattctgtattgtaattcgttgatttttgtgattcgtatatcgaaaaatagatctatttcgtgcgaattttgtttcctttttaggaaaggtatttctttagagtttcttttaataaacgagcgtcgattggtttcgtaagatagtctgtgcaaccggctgcgcttgcctcttgcttgtcactgtcgaaggcgaaagcgctcacgacgatgatggggatacaagtgtttaacttccggatttcacgggtggcttccaacccatccatgtttggcattttaagatccataaggatggcgtccgggctgtactgccggtatttttgaatggcctccaagccgtcgagggcatgaatgatttggtagtctctttttagaatagtcatgactaaaagaaaattactttcgttgtcttcggcaacgagtaatttattgattggcaatgtgttctgactatccataggagtttgttcttcgtgtcaaaaaatgaacgttttattatattgaaatgctgaccatcaataaaatggagaatgtcaatgttcgatttgctttctatctgatcgatagaatattaaaaaataagcaatattgatttgatttagtaaaaaatacctatatttgtgatgttaataaa

SEQ ID NO: 216 - DNA, 7199 bp, Butyricimonas faecihominis
attgtatattatataataatcaatccccgtacacggccgggttgattgtcccgaataaaatggcgttacgggagtatatcgagaaacaggatgttgaaccggattccatggatgcttaccgggttatgttgaaaaagatccagagtgagctgatggcttaccgggtaggtgggaaacacgctcatttatttccggaaaggtggctgcctgccgtcgtggccgtgttgccggaggcgctgaacgaacagaatggcatgataaattcgaccatgaaagtcgtaagagctaaagtttatgaccgatttaaagaagaaatcgattatctttacaccccggaaggaaaagaaattacgaataaacgtaaccttcagaatttaaagcaattaatatcttgaattggaagtctgaaagtgtcatcattttcaattttcaattttcaattttcaattattatgaagcgtcgatctacgaaacaagttaagattggagaaatatatattggatcggagtatccggttttggtacaatccatgttaaataccgatacgatgaacacggaagcttgtgtggaacaagctatacggattatcgaggcgggaggaaagttggtgaggatcacggctcccgggataaaggaggctaaaaatctggaaaatattcacgtggagctacgtcggagaggttacacgactccgctttccgcggatattcattttaacccggaggcggcgattgaggctgccagacacgtggagaaagtacgtatcaatccggggaattttgtggataaacgggctactttcaaaacattgacttatacggacgaggaatatgccgcggagttagagcgtttgcgtgaaaagttcacggcatttctggacgtgtgccgggaatacgggacggcggtgcggataggtacgaatcatggatctttgtctgaccggattatgagccgttacgggaatacacctgccgggatggtggaggcaaccatggaatacctgcgggtgtgccgggatgagaaatttgatgatgttgtgatttccttgaaatcgagtgattgccgggtgatggttgaggctgtgcgtttgcttgtgaaggagatggagaaagaggggatggattacccgttgcatctgggagtgacggaagccggagaaggagaggacggaagaattcgttctgccgtgggtattggtactttattaaatgaaggattaggcgatacgatccgggtatccttgactgaggaaccggaacaggagattcccgtggcgaatcttttaaatgagatttgttgtttacaggatttgaaaacggaaccgattcatttggtagggcgttactctcatcccgtgattgtagcggatatttctaaggtagaatgtcttgacgaggctgtgatggccggtctggattttcacgtggcgacagagaatgatcccgtgtatggcgatatgttgcaaggtgggatgcggtctccggagatgatctacacggaggcattgggaccggagttgacgaaattgccggattccgtgaccgtggtggttccttttgatagtctggatattgcccacgtgtataatcgtaaggcggtcgccttgattgatgccaaagatttcgttcggctatcgaaacccgtggaaggagatagtattttcgtggaaatccgtaacggggaagtcataaatactgagcttgctggaaagttggaacgggagaaaaatgcgatcgtggtgttgaatcctgagcgtccttctagtgctttgtatcgtttgtacttgggagagttgaaacgtttagggataatgaaccgggtaattgtacgggccatgcttgacgagtcggattccaacaggttgagtttgtggatggctgctcatctaggaggtttattccttgacaggctggtttatggcttgtggttgtcatgtctcggtattccggatatgttctacggggtacatttgagtcaggatatattgcaatcggcaggagtgcgtcgttataaaacagagtttatcagttgtcccggatgtggacgaacattatataatttgcaggagtccgtggcgaaagtaaagaaagcatttgctcatctgagtcgtttgaagattgccgtgatgggttgtatcgtgaacgggcccggagaaatgggggatgcggactacggttatgtgggtgccggaaacgggaaagtgaatctattccggggaaaagagatggtgcgtgtggccgtgccggaggaagaagccattgaggcattgaaacaattaataaaagagaacggagattggaatgactgatacaagagataccgcacctttagttttaggaaccgagaagatcggaaaattattgatgcaatatgctatcccggcaattattgctatgacggcctcttcactttataacatggtagatagtatatttatcggtcatggagtgggaccattggcgattgcgggattggctattacattcccgtttatgaatctggcagcggctttcgggtcgttggtgggggtaggagcatcgacgttggttgctattaaattgggacagaaagacaaggagagtgctactcatgttttggggaacgtggtgatgctgaacgggattatcggcttggtatttatgaccgtggcattgcttttccttgatccgatattgctctttttcggggcgagtccggacacgttaccttatgcaagggaatatatgcaggtgattctggcgggaaatcttgtcacgcatatttatatggggttgaacgaggttttaagagcttcgggttatccacaaaaagcgatggctgctacattgacggctgttattgtgaattgtgggttggatgctttgtttattttaggtttcggctggggaatccggggtgcagctttggctactatcgcagcacagattatcgctttgggatttgaattgcaccatttttcaaggaaaaagagttttttacatttccaacgtggaatcttcgggttgaaacgccagatcgtgggagggatgttggccatcgggctatcccctttcttgatgaatctttgtgcttgtttcgtcgtgatcttgatcaacaagagtttgaaaacgtatggaggggatttggctatcggggcgtatggtattgtaaacaggatcgtctttttgttcatcatgatcgtgatgggatttaaccaaggaatgcagcctatcgcggggtataatttcggagcccggcagttcgaccgtttgattcaagtattgaaatataccgtcttttgtggcgtgactgttacgacagtcggttttctggcgggacagatttttccccggccattgatttaccttttcacatcggacgaaactttaactaatattgccgtggaaggtctgcgtatcgtgttgatatgctttccggttgttggtttccagatggtgacatccagtttcttccaatctatcgggatggccaagaaggcgatctttttgtcgttgacacgacagttgctatttttgatcccgtcattattggtgtttccatccatttggggaacggtcggagtctggatgagtatgccggttgcggatgccattgcgacgatcgttgcggcctgtatgttaagatggcaattgaaacatctgaaagcgtgaagaaatttatattgtagcgggttacaggttcaaaaaaaatcgatagctttgtagaagaatagatttaaaagatcaaaatatggataataaatttgttattacaataggccgccaattcggaagttgtggtaaagagatcggacaagagttggcaaaacgtttcgggattaccttctatgacaaggaattaatttctctcgcatcgaaagaaagcggtttgtgtcaggagtttttcgagaaggcggatgaaaagaattccggaaacttgttacaggcttttgctgccggatttaccttcgggcccttccagtacaatgattttctttctaatgataagctttttcaaatccagtcggacgtgattcgtaaggtggcaggcgaacattcctgcgtgatcgtgggacgttgtgccgattacattttgcgtgacaataaacgttgtatcaacgtgtttgttcatgcagatatagaagaacgcgtgaagaccgtgatgaatcgtcaacatatatcggaacaggaagcccgtgagttgattcgcaagatggataaaactcgtccgaattattataatttctactcggacaaagagtggggcgtggcatcatcttaccatttgtctgttgattcaggtctattgggagtacacaaaacggtggactttatccagaaatttgtggaagaagcactgaaagactgaatgatttttgatttatgatttatgattgaaattagccaatcataaatcgtaaatcaagaaatattttaacgagtacagtagaaaagttccggttcttttctctcatggaagttcttgaagagaaattctgaaaaaggagtgttgaaaactctggctccgttaggacattccttcacgcaagcacaacatttaatacaaatttcgggatcgctcacgatctcttcttttaattcgattgtttcaacaggacagatttcgatgcaatattgacattgtgtacacaattcgtcaatggtgatcggggttgccggagttttaggtttattctctttatacgggaaattccctttcacttccaaagcgggtaattcttttatatctgcatattgatttagtagctttataatattttttccgaattcagaggctatttgtatgtcggatacatcggggcgtccggctgccgtggggaattgttctgtactatacgagtgttccccgataaaggctccaccggcaacagggacaaaacccagttgtttcacagagtcccgtaattcaagtagggcatcctcgtaatcccgatttccataaagaacaacaatgatagccggggtgttatctccttttattttttgtagcctttccaatgccgttggggcaactctccccgcataggttggaacaccgataattgccaacgaatctgttgatatgactttttgatccgcacatggataggttaaatcaatttctttatttactatgatatcagttccttctgctattgccgtgacaatctttgcagaggtatgagtcggtgaaaaatatacaggttgaatattctttactcgcataatgttctttgttgctagattattgttttcagcaaaggtaaggattatttaggatattcgatttttatcactaattttcacgttttatatgtgatttgtaaaaaaaaataatcgtattctaaaaaaaaagtcgtatttgcctcaccccttttctatcgttttggtgctttaggggaaaaaggcactaatagttgaataatggttttggaaaaaattcaaatagagacatctgaaatagacttgaaagatactcagattttcaaggctatttttaatatgttctatcctcgggcctatactttcacgctaaagttactccgggatgaggtcattagtgcggatattactcaagaagcttttctctatatgtgggagaaagcatatcgttttccggatatgatgtcgtttaaatcttatttatacagttgtttgaaaaataagacgttgaactatattcgggatcacaaggtggaacggaacatggaagaattgaaggatgttttcgtggatgatatcttagttgatcatttgattatcgaacatgaactaaaggctagaatattggaagagatcaacaaattatcggatgtgaagcgggatatcatgttgttgcgaatggagggatatagctatgatgagatctcggaagagttatccttgagtattaacacggtaaaaacgcataaaaagcaagcctataaagatttgaagcttcatttgtcggattataaccagtgtcttttggtgttaatctcgttgttagtcacttgtttttgttaatagataaaaggtagatattcatgaaaaggatacggaaggatatagaaatcagtaatttaatttacaaatctctacggggagaaacctctaaggatgaggacgagttgttggaggcgtggtgtctggagtcgaggaatcgaaaattattcctagagtttcaggaagcggatcatctttacgaggggataacagatatgtataacgtggatacgaatgtgcctttaaaaaaggtgaatgataaaatcaagaaaaagaagcacgtgcgtgttctgaaatacatttcaggaattgccgccgtactattggttggagtgatatttatgctttctatggaggacaagactgaaccgacaaggcaggtgttactttcttctgtgtcaaaagaacggatggaacctttcgcgacgttagtaacaacgacggggaaagtggtttacttggaagactctgtaaagcaagaatctttgaaagcgagcaataaagagtctttaaaacaggaagaaagcgggaatggagaggtgttaccacaagaaattaagcaagaggtagaatataacgtgttgacgacctcgaaacagggaaatataaaagtcgtcttgtatgacggcagtcacgtgtggttgaatgctggaagtgaactgagatacccgaactctttcgtggagaatcaaagagtggtatacttgaaaggagaagcctattttgacgtgacaaaagacgagtctcatccttttatcgtgaagacaattgcatctgaaatcagtgtactgggaacgagttttaacgtgaatgcccgtgaaaactcatgtgttacgactttagtggaaggcctcgtgcggatgaagcacgggctgcaggatagcgtggagttacatgcgggacaacaggcttgtgtgtccgggatcgggaaaattcatgtgcaggaggtagatacgagatattacacgagttggatgaataatatgtttgctttccgggaaactccattgcgggagattgccaacgtgttggaggagtggtatgggtgtgaatgtcgttttgagacctctaccttggagaatattccttacacgacaatggtggaaaggtattcagatatagatagcgtgttacaaatactagcgggaacgggagatttccggtacacgagaataggtgatatgatcattataaaagaaaaataggcaaagagccttcactccctttacctattg

SEQ ID NO: 217 - DNA, 7180 bp, Butyricimonas faecihominis
aacttattatgccaggtacaccggtttgaataatatctgaaacaggttttcataatttacttaccacctatcaggatttctgataaatcctgtacggaatgctcaactgctgcctgtaccctccaatcccgaacgtagtcgtgaccagctccactatatacacgccattcttggaggggttacggaaatcgatcagttccaccagtacggcagaagacagcccgaaatccccgaatatggtcacattaccggtgattccatttaggttgtaattccggaagtattcagttgtctcttccacaagccggtctgaattgatgcctacgtgcggagacatatacggtacgatggtataggtggacaaatccacctttgttttggttcttgcccccgaagccgtcgagtttccggtcatcttatgtgtcttttttgaaatttgggtggcatttaccgtttggaactccttgctacccggtaccgccggatcgtattccggattcatgcgtaccgtcacttcaaagaacttctcgtccgttccaagcaccttgcccgtctccgcaaggaacttcgggtcggtcttgacctatttcaggttgctctgcgccacatgttcgcaaaaatatatcttgaacgatccggccggaccatcttccggaaataccggctgcgccttgcaggacgaataaggacgcccgacagcgatggaaggcatgacgctttcgtcctcagcatcatattttaaaaaacaataaatctcatatttcgaccattcggaaagaatgtccgctaccgtaaagttatctgtcaccttgatcttgccgatatggatatcaagccgttttgtatcggaatgtatcttgaagccggtatctttcaagatattgtatttcccatccagcacatcatttacggttgtcccttttgccggagtttcgaaatgaggcgcctgtttcaatttaagtttgtagaccatattctcacattgtatttccaatgtactggaattgtagccgataatgtaaccgtcaaacatatttttcaatacaccgttatatcccagcttgatattgatgcgttgccctattgtccggcaatgaacacctgtcctttgacaggaaagcgcatatttccatatagcccaggcttgtaatgctcctgatataccagacggcctgtccgccggaattacgtttccgacagacaggcctttccagtatacctgaccaaggaatgatcataaaaatcggggagctaccaattttccttcgataccgcacattttcaaggcgacggtatttttcctgttaaaggagatcaggcaggatggtacaccccggcagagccgccctgctctctggtaacatgatagaacctgagccgccccctgatgaaaagtattgtgtccgcataagggaatatcagttcatgaaacaaccgggtgtccgtgcgggcaaaagtgagtgcaatagcattccgatgctccacgcatttacggatgaagcggagaatctgtggcgtgtcatagggtggattacaaaacacccgtccaaaccatggctgccgtaacccgtcatccccgatggtgtagtgatgcctcgccgtatcccatggacggtttaccggtgagcacggatcaaatcgaattctcccaacctgtcaagcaaataaggaggtgtaagccattcatttttcccggtggaagattttccctcaaaggtcatattcatgacaagtcagattgtaccgctgttacctatctggatatcaaacggattcaagtcgaactcatgtgtgatgttggtatcatcctgctgcgattcaagacagtcctcccaaaaggcacacccttttttcggacataacgttcgtaaataatataaagatttgattgatatcgagttagacgatgatgcacgtacggatttatttgtataaacattatttcgctaaggaaacgactcttttcatgtaggttaattaataccaattgattcctactaatgcgaattaataataagccattaactaactcgttatcaatctatgtatacgattaacattaggggtaagcagaacccgaaagacaccaagatggtcaaactggagatgattttcttcaagaccggttacgcccgtgtgccgaaggttataaacattacagggctattaaaagacggggatgtcaagtctcagagtttccgtgtagggaaagcggaagccactaccaagaacaaactgcttttcgatttgcgacccaaatatctgcatgtcgccgatacctgggagatggaaggcagaaaccggtctcccgtccagttgtcacattgcttcgatgaaatcagggcggcaagacccgaggtcaaagtaaagagcgtccagcagatgatcgattatcttgaagagacatttaaaaataagaaacgcatcaagaacgggctgatcgtcgatagcacgaccaatgccaaacggtatgtctatctcaagcgtgaactgcaggtgtttacaaaagaaaaatatgaaaaagccttttcctcttatttctttgctgacattacagaagagtttcttcttgactttgcgttttggcttaaagaaagaggtatcagaaacggcaataaggccggactcacgcacaaattgaggttgctccgtgccgtacgtaggcaggcggaaaagaaagagatgtacggggtgaatatggagaacttcctctgtttcggtgatgatattaattggccggaaaccacttcaagagcagttccggaaacagtcatagcaaaaattgcaaatgttgaccgtaccctgtttacgaagaaagagcagttgcatcttgatttgttcctgttcagctactataccggaggtatggcgaatgtcgatgtctgcaacctgacatgggatttggtccaggaagaccgcatcgtctatgaacgtatcaagtttcccaaaacagccaaaccggagcttctcagtaaagcaaaagccatcatgaataaatactgtgtttaagggaaaaataacatacagtatgaggccgctgaagatgcacgacaggatgaaaaaattcatggaccttcttgcgtgttacatcggagacggagttaactgcatccattttcacaagttgaaattgagggagttgttttggcttttccgtttttatcaccccaagatggagctagcttcttttttttacactgtcatcagtgatgaccatgattttaaaaaccgagtgctgaaaaattacagggacaatataagcataaaagaattggcaatcaactatctccacgttcaagcgtaaatttcacatggaattcgggcaatcggtttcttcttggttacagaaacaaatgctggggagaatcaggtacaggctcgcagataccgatctgacgttgggcgaaattgccgatcagttgaatttctcgtcgttgtcccagttttcccgctattgcaaaaggttcctggacgcctcaccgctggaattaagaaagaatattcaggaaacggagtaaaaatgtatctgactacgatctgtactccctttccccgtgtcccgggaaaacaaatactcgtttcccgcggcggaaatgctacccgaaaaccgatctgattgcaggttgttgggtggagttcacgttgtcggtccgtactgttcttcgtgcagtctcatccgttcccgtaaagattctttaagattgtctcctttttgcaagcccatttttgcccggatatttgcccgctggctggtgatgttgccgctgctcctgtgcagctcttcacatatctggctgacggtcttatcttgtaggatcaggcggcagatggataattcggagggggagagttccgggtatatttttctgatgatttcaagcctgctcttttcttctttgagatggacgtcgagggccgtgaaaagtgtttttcttgccttttctccgataatacccagcaacaagtttacattctctgccgggttatccttgcttataagttgggcaaaagcgaacaactcttccctgtttatctgaagtgattttatcaacatggtctcctccttttttagcatgtcgttttcctgctgcaggcaacagatgtttttgtgcagcaatttaccgaacaaggatttcaccgtgaatatgataacaatgatagggaggtagtttataaggaagggaccattggtgataaacacgcatacggtgtatgacaagacagagataagcgatatctggacggtggtcttgctcatgtaagcgcacacggaaaacatagtaaacaagacggataaaatgatattacccataatcagcaatctttgataggggtatccgtcgatcgtggaacaatagataatctctatgccgatttcgacatgtattgaaatcagaataaaatagaaagcggtgttcagcttcattttttttgtaaaataagcggtggtgaacagggctgctaaaataaacagcgctccgttaaaatagtaatatagtttgttaggaaaagagatcatgcaggtgtatgctggtatgcacaaaaccatcagtatcagaaaaacatgaaatactcgtttttgctgatactccatcagtgttccctgctcgatagtgtttgaaatcagatagttatcccatttaatcatgtaagtgatttttagtgaaaacaataaatttaattgcggccaagcatgcttttgtacttactaagtggatttaagtattttaattcagtacaaatataatgaattttgcataaacaagcattatgcggatacatttaaagcatatttaagttttgcgatattcattttcaagtatttataagccttaaatatcttgctggatattttttgcaaatataaaacagcgatatttttgtaaataaaaggtaaagatgacgcgtggtttctcctgaaatcggctcttgatttaaatatactatataatatgaataaaaaactattcctcttttttctcctgtcgcttccgggagtcggttgtctggcaagacaggagactgtatccagagactcggcacgggtggaattttattttcgccagggatatgcgactctttctccctccttccggaataatggtgtccgctttgattctctactgcaccacgtggtacaactttgcaaggactcgacttgccacgtgcgcttgatccgcattgtttcgggagcctctcccgaaggggcttcgggaatcaacaggaacctttccgaccgccggggcatggcagtggggacatatttgaaagaacggctggcaccggacacctgcttttttgagatggagtccaagggggtggactggattgggctagcggggctggttgccgtgtccgacatgccccaccgttcagaagtattggatatcttgtataacactcccgagtgggttatccgtgacggggctattgttgatagccgcaaaaaacgtttacagcgtctgtatggaggacgggcttggcaatatatggaaagtttcttttttcctgaactgcgcaagacagagatcttttttatctacgaaccctgtccggccggaaggccggaacctagtaaggttattcccatttctaaatcacttcttaatgatttgccaagcccagactccgccaccctttcgatatcgtttcagccggttgagtctctgggaggtcaacctgtttatatcgggttgaagaccaacctgctctattgcgctgcccttgtcccgaatctgggtgtggagttttatctgggaaaaggttggtctgtaggtggcagttggatgtatgcctggtggaaaaatgatcaacgtcatcattattggcgtatttacggaggagagttggtatttaggaggtatttcggttcgcgtgctagcccaaaaccattaacgggacatcatctcggtctttacggacagatattcacttatgacattgagacaggaggtaagggatacatcggtgggatgccgggaggcacgctttgggataagatgaattatacagctggagtggaatatggctattcgcttcctgtcggtcgtcgtttgaacatcgattttaccatcggggcaggctactggggtggggagtaccagaaatactaccctgaagagaggcactacgtttggagagaaactgcccggcgtcaccggttcgtccccacaaaagcggaagtttcgctcgtgtggctggtggggaggggcaattttaacgataaaagagatagaaaatgaaaaagatcgtatttgtaattatttcagtggtgatgctttccgccacgttttcctgcgaacacaaggagctttgcagcgatcacccgcacgtggtggaggtaagggtggtgttcgactggcgggaggctcccgacgccaacccggcatccatgtcactctacctgttcccggtcggcgggggcgaggtgttgcgttacgatttcacaaaccggagcgggggaataatccgggttcccggcggggtgtatggcgcattgtgcctgaacagcgacacggaaaatatccgctactggaacacggaacgaagggagacttttcgggtgacgacccgggaggctacactctcctcgggttttgccttccccgtcgcgggaagggaggatatgtcccgggcggataacgagcctgtcatgttgccgacggatatgatttggggcgatcacatggtacgtgccgagctgtatcggcggccggcgctgaccatcacgcttgagccgaaggtgttggcctgtcgctacacggttgagattcgcaacgccgagaatttgaaatacgtgtcgggaataagcggtgtgctgtcggggttagcggacggactgtttgccggtaaggccgagacgacggacgagcgggttacaataccttttgatggcgtcatctccggcgataaaacggttgttacaggagagctgctcaccttcgggcaatgccactcgaaacgtggaacgcatcatctgacggtctgtaccgttttgtccgacgggagcaagtggaaacacacctacgatgtgacgaaccaggtccacacggccccggatccccgcaacgtgcatatccttgtggacggccttcccgtgccgaaacccatcaccaacggcggtggctttcgcccaagcgtcagcgagtgggaaacggaggaggaaaatatagagatgtaa

SEQ ID NO: 218 - DNA, 7170 bp, Butyricimonas faecihominis
gccattatatccccggtaaagggctgggagaagggatgcatctcctgatatatttatttgaataatattgatatcgtgataaaagtagccttgttttgattatatcgaattcacattaaatcgtacatagtttcgcgtgataagaaaaattattaggctttgtggcgtgataaatcattttactttgtaaatttgtaatccggtacgattttttactcgtgctgggtaacaacctgtaatagattatcatggagaattttattgtttcggcgcgtaaatatagacctgcaagtttcgacacggtgatcgggcagcactcgattacatccacgttgaggaatgcgattcttaataaacaattggctcaggcttatttgttctgtggaccccgtggggtgggcaaaacaacctgtgcccgtatatttgccaagacgattaattgcatgaatctacaaccgaatgccgagccttgtaatgagtgtgagtcgtgcaaggcgtttaatagcgggcgttcgttgaacattcacgagttggatgctgcctctaacaatagcgtggatgatattcgaggtttggttgatcaggtgcggatattaccgcaggtggggaaatacagcgtgtatattattgatgaggtgcatatgttgagtgcctcggctttcaacgctttcttgaaaacgttggaagagccgcctgcccatgccatttttattctggcaacgaccgaaaagcataagatattaccgacgattttgtcacgttgtcagatttacgattttaaccggataaaagtacccgacacgatcgagcatctgaaacgaattgcaactaaagaaggtgtacaggccgaggaagaggcgttgaacgtgatcgcgcagaaggccgacggggccatgcgtgacgccttgtcgatcttcgatcaagtggtgagtttttgcgggaaggatttgacctatgataaggtgatcgagaatctgaacgtgttggattacgattactattttaagttgacagatttattccacgatggtaaagtggccgaaacgttcttgctttttaacgagatcatggagaaaggttttgatgccggtaacttggtttccgggttgggacgtcatttccgtgatttattggttgctaaagaagaaatcaccgtgcaattgctggaggtgagtgcgtccatcaaggaacgttacctgaaacaagcgaaaactgtaactcccgaattcatatttgatgccttgaaagtgatcgagcaatgtgagatgcagtataaaatgcgtgtggagaaacgtttatgcgtggaactcaccttgatcaagttatgccaaattaatgaactaaaaaaaaaagtcttagcatagaggaatttaccgggctattaaagatagctgattttaatgggaaattccaacaaacggacggtgggacaacggctccggtttccggggaaaagccttctgtgcctgccgggaaaacgaatacttataaggcagaaccgccacattcatttaaattgaaaatggcaatggcggagacccgggagagcttgcaggtccggcaggaagaaggaagtgcaaaagttgaggataaccgggtaaaagcacaaagcgaatttactgtggcggatgtaatttccgcgttggaaacttacgtcgcaacttcgcaggaagatacgaccgttaagattgccttgacttctcacactccaaaagtgcaagggtttgttatcacgcttgaggttgataatgactttttattatccaaggtgacggatatacatccttacttgctctccttccttaccaaaagattgaataatggttttattaccctgaatgttcaagtttacacggaaccggaaaatggcgaggagaaaaaacggcttttcacggctaaggataaattcgatcattttgtcgagatcaatccagccgtgagtgagttgaaagccttgttcgggttggagatagaatgatgtaattttcaattctccattttcaattttcaattattaaatagtttctcctgcggcgagatggagcaatttgtctttttcaccgacgatccaaaccacgtcaccggcctcgaaggttgtgtccggggtggggttcatggtggaggtgccgttgcgttcgatgccgatgacgagacaggcggctttatcacggatgccggattcccggatggtgcgtcccacgagtggtgtgtcggcctcaatggtgaattgttccaagctgacttccgggggacgctgttgttcaagttcatgtttccgtttttccacgcggttttcgacaaactcacggaagacgttaatttctttgtccgtggcggccacgatgatgtggtcgaaaggatacaggcgttcttccccaccgggaatgtttatgcgttcttctccccggatgattgttaccacgctgaccccgcaggtctggcggaaattcaattcctttagcgttttgccgacgctgggagaggattgcgacacttcgaagtcggcgaggtggagatcccggtcaagtaaatgtttgacaaaacgttgcttgatgggagacttgcgttcttgttccttttggcgggccgtgaagttacgcaggaaacggcgttccagttgtatggagtatttttttaaccgtttggaatagatgaagaataggatgaccgcagtggcgatcaccagcaggagaccggcagcgacgttcacgaggctggatatgacgaacatcacgatcccgatgcagagcgctacccgtagaacgatgagagatacgagtggtccccggttgtatttactatcactccataattgttggaattcttccgaatggttctttttcatcatgatcgcccgtaggaagggggagataagtagcaggatggcaacggcactaacaaggccgccctgtatgccgggaagttctttgcggattagcggggtcaggtattgtaggaaaagagctatggtgaagaccgacaggatggtgtaggtgatcactatgcggcataacgctttcagtagttggtgccatgtgcttttatggcggatcgtgttcgttcccgtgctatacctgtcgaggaaatgaatccaaggggccggtaggtgtttggtcacgaactggtaggcggggtctgccaagcgaatcatgtagggggtgaaaaaggtggtgatgacggagacggtaaccactatggggtagagaaatttgtccgtcacgtgcagggtcatacctagacttgcgataataaaagcaaattctccaatctgtgctaacgagaatcccgattggatggcaatccggaggctttgcccggacaggagtataccggatgcggcaaacgtgatttgtccagccatgacgactgcggtgatcagtaatatcgggaaccagtactcgacgagcatggcgggatcgatcatcattccgaccgagacgaaaaagatcgccccgaagagatctttcacgggtttaatgaggtgttcgatgttttcggcctcgatggtttccgctaggatggaccccatgacaaaagcccccaaggcggaggaaaaaccggctttcacggcaagtagaaccatgccgagacagagtccgagtgacacgactaataaagtttccccgttgagccattgtttcgtttttttcaggaaggtcgggatgaggaatatcccggtaatagaccagaaaacgaggaaggcaatgagtttaaggatgctatcgaccatttccattccttcaaaatgtttactgacggccagtgtggaaagtaataccatgaggactacggcgaagagatcttccacgacaagaattccgaagacgactcctgcgaaacgctgattacggagccccatatcgtcaaacgctttgaaaatgatggtggtggatgacatcgagagcattcccccgagaaagaggctattcatgtgtccccatccgagtgacagtccggtgatgtaacccagcatcatcatggcgcccacgatggtgagggcgctgatcatggcggttcccccgatgttcatgagtttcttgaaactaaagtcaagtcccaaggcaaacaggaggaaaatgaccccgatgtcagcccagatatgaatattctcggcatccatgatcatggggccgccaaacgtgtaggggcccgcgataatacctgccatgatataacccagcacgacaggttgttttagccatttaaagaggatggttatcaatccggcggaaaataagataatcgccaaatccgatattaggacaggaatgtctgacatgatgtttatttttgcgggagcaaagttaatgatttttgatttggatgaataaatatcaattatctttgtgtggatatgagaaaaaaaatcaacattcaaaaaggggccgtgttgggggcgatactcacgacgattgttgcgggaatgttgctttccgtggtacaggttgtcgtgaaaccaccgttgctgttgggggagagattgttgccgggcggaggatgggttcaaattgtgctggcagctcttttcggtggatggctatatttgcagatgttcgaccggaaacgacgaggcgtgtggcggagacgtatctggctgctcttctcgatcgtgttctttagtcagttatttttgggaattttcgtggatagtgtgtttctgatgtcgggaaaactccattttcccatacccggactgatcccggcaggggtattttaccggggagaggtgtcattcatgccgttcctatttctagtgacgattctattgtccgggggagcgtggtgtagccaactctgttatttcggggcgtgggatagtctggcagcgggaaaaaatggaaaacgggaagttccttcttctaaaatgaggtcccgaatgcgttggactgtattgtttgtatttataggtgtcgcttccgcgttgagaggtttcggggttccggtgatttattccacggggattgctgtttttgccgggtgcgtggggatcatgattatttggttcgtgtctaaaaggcgtcatgttgccatgcattgctcttcctattgtccggcggggacgttggtcatgtacttgaaatacgtgtctccatggcgattgcatctgaacgatcgttgccggcattgcatggcttgtacgcgggtgtgtcggtatggggctctgtcgaaagcagacgtgctgaaagggcgtccggcaatcaactgtaccttgtgtggggattgccttgcggggtgccgtcacgatgccttagagtatcatttctggggaatttctcctatattggcggaacgtctttggttagggactacactggtacttttcacgtgtttcctttctattgcccgggtttaaatatgtggaaaaaaagattgtatattttgttttttttaacgtacatatccgcgtagggatactacatttgtgtgctaatcaataaaaaatatgaaaatagaccgatttcttcaattatttgtggtaaaggaaaaaaagttttaccctttgtatatcgagcaagccgctaatatagaggctgcagccaaacttttggtggagttattacaagagcaagaccctgaaaaacagaaagcgctgtacaaggacatcaaggagtacgagcatagtggagatatgatcaccgctaagttgtacgaggaattgaacaagacgtttgttacccctttcgatcgcgaggacatcaatctgttgagtggacgtatggatacgttcctcgattttattcacgatgcagcgaaacgaatgttgatgtaccgtccgaagagtgtgaaccagttgttgattgcaatgggacaatgtatagtggaagatgctcgtatcttgaaggatattatgaatggattggagtatatccagaaaaaaccgcaggagattaacgagaaatgtgttcgaatcaaacagatcgagcatgacgtggatgatttgtatgaacaatttatgagtgatgttttcgcgaacgagaaggacgctatcgaactcgtgaaactgaagaatatcggtcaggtgttggaagatgctaccgaccgggcaaaggacgtgggggatattgtgcgaggtattattattaaatttgcctgatcgctatgttgacaatcgttcttttagctattgtgatcgctcttcttttcgactttttgaacggaatgaatgatgcggccaattcgatcgctacgatcgtggcgacacgtgtattttctcccacgatggctgtttgctgggcagcattctggaactttgccgctatctttatttttggggtgagcgtggctcacacgatgggcgaaggaatcgtggatccctcgaaaatcaatgaatatcttattttggcagctttgatcggttcggtgatctgggtttggttgtgtactcatttcggtatgccgatcagtgtgtcccacgctttgatcgggggattgatcggtccggtatggttcacgttcgggggcgacgctctggttgcttccgggatattcaagattgccatctttatcgtgctgtcccctttgatcggtatgatactgggattcttcatgatgtgtctcacgatgctcgtgtttcataaaaaacacccgatgaaagtggaagggctgtttaagggattgcagttgttttcttccgctatattcagtttgggccatggtgctaacgacgcgcagaaaacgatgggtatcattgccatcctgttatatagtgttgcaggaagtaatactttcgtgagtgattacttgtacgagaatacaggagagtttcatgttcccgcttggttgattgttacttgttattcggtgatcgctttaggtacgattatcgggggaaagaaggtgatcaagactttgggtgacgggttggcccggttgaaaccggtgcagggattctgcgccgagacgtccggagccttgacattgatgggaacggccgtgctgggaatacccgtgagtacgactcacacgattaccggctctattatcggggttggaatcacgaaaggggttgcttctgttcggtgggctacggccacgaatatcgtggctgcttggattcttacgattccggcaaccatcgtgatgtccggtcttgtttactgggtgatggggttgttcctgaccttgccggaataagtatataaagtttgtaaagtctataaagttcataag

SEQ ID NO: 219 - DNA, 7161 bp, Butyricimonas faecihominis
gtatataaattaatcttctcataatttcttatttttaaagtaattctgaaatatcaggaatctcaatccattcacccgtattttcatctatcaagggtgcattatcaggatctgctttatactcttcaaaatccatgtagaaaccattcgagtaaagaacatcataaaattgattcgtcatagtccattcattcaataccgtacctccgtatttcgtgatcaaataacgagctttcgtctcgctataatctccaaaaaacatcgcgtaatatccatcccattcttcttgagaagatccccacaattccaaattaacagaattttctaccctcaattcaaaagtttgtctttcggcagtccccgctttaaaatccgatttctcgtaatcaaaagtcagataggcagaatattccgtatttcgtttttccggacgttttatcaaaactttaaacacggcaacacccgtgtctgccgggacataatactcctccggacatacaatctccaatgtattatcgcctaactttttcgtggtaaacgcaacctttcgaggatgatctgcgggaactccacttattttaacccctaccagaagagtatccaataacaaagaatctccacgaggattaatcccaaaatttgtctcataatgcaaatattctgtttcatccacccaatacggtttcttatctttacctaaataataatcagccataaaattaatctcgtttccctctccatattgcaccatctcgtattcctcacaactctgaaaaaaaaataacgtgattaaaacctgtaatataattgccaaatttttcataaatctctcattttatcagtaaatacaacattcacgatgtcttaatttgttttaccaaataaagtttcattatccggccaagagaacatataattactttcagccatttggttcacagggcaatgcagaaatgtcgtgtaagcatgacgcttatagaagaaaaacaattgcccctccccgtaaaattccttgcggtactctttttcaatctcatccaatctgttagcttccgtacaaacaaccggatctaccccgcgtatatttcgtactttattcaaaaactcagccgcttcacccggagttgccgcacattccgccaaaatgtaatacatttcagataaacgtattaaaacaacggttccttccgtggatgcccacaagttttcttgcttatatttccgcattttgattccgtttgttccgtaatcaaatccaactccctctctgattctcaaatcatttgtcccatcattagccacatcaaacatttcattcaagaaactctccttgacaatcaaataagaagtaccattggttatatccgtcacttgttggtcaaacttatccacgtaaacagagaacacgatctcttttgaacgtaaaacatctgttgcatcccctatcagatcgaaatatttcccgtcaataacttgattcgcataattaaccgcctcggtcttgtttcctgcatacaagtagactctcgccaacatcgctttcaccgcatacaagttcatccgtttgtgacgatactccaaaaagccatcttttcccgttccactattcccatcttctgtttttggaaattcaaaattcaacggatctatattggtcaataaaatttcagctcttttcaaatcagcaataatactatccaccaccacgttagaaggttgcatctccttcggttcctgattaaactccgtccgataagcaattcgtttcgcagttgggttgtctttatatatcggtccgaacatccgtaacaaatcaaaatgcaaaaacgctctcaaacccaaagcctcccctttaataatttcgtaataatgctccgtggtaaacacatctctgtttttatcacagtaatacaacaaattattcaaattagcgatcacgttatacatcttcgaccaaatcgcttccgtgtaactttccgtgtatgtagatgggaatgtataccacagggggttctcataatttgccactgcattaatctggtaacgttgtcccaatatatccaagaaaccataactcaaatttttggcatacaaatcagttgacgccatctttatatacgctccggttaaagcttctttaaaacctaattcccggctaaaaacctcttcttcttccaccgtcgttttcggttttacatctaaccaattcgaacaggaggaaaacaagaacattcctaaacaaatgctaactatatactttttcatcgttcatcaatttaaaaagttacattcaacgacatggacacttggcgagagaaaggataatcaattcctcgttccatcttaatcgacgagaaccgacaaatatcttccatatacactccaattgtcgcagcactaatccctacccgtttaagccaatcacatttctgtccatccaaccgataagataaatttatagttgaaaaataaaattcattatcatccatcacgaaacgagaactctccttcgtatccatcttagcaatatttccatctattgccttaaaaaacacctgatctccaggatttttccatcggctatacagagctctccgatccgcattcattcgcaagttagcattttccaccttatctatcagcgtctggttaaaagtctgtccaccccaatgatattggccggcaagcgttaaactaaaccctttataggtaaatgtcgttgaaacagaaccctgaaatttaggctcagtatctccaaccgggacttgatcgattgcagaatattcatttgtcagttgaccgtctctagtcaaaaatacctccctaccggattgaggatctatacccatcgagcgaactgcccaaatcgtagtttgagaataaccgttctcataacggggtaagggacgttttttacgtttatcttctaaaccggtaacatacgggtcttcaacctcatccgcaatttccatttgtttctcgttcatcactttcaaagcattagaaatttcctctatccgtgatttattatgagaaccggtaaaaatcacgttccaataagcttgtcttgcaggatcactatatggcattaaacgtaatgtcacctcgtatcccttattagaaattcttcccagattctctttcattgttggaaatccgacagacggagccatcgtgtaatccaacaacgtatttttcgtatatttctcgtagtactcgaatcttgcactcagaatattattaaacatggtaaaatccaatgatgcattataattttctgtctgttgccattttaaatccggatttcccaaaccgtatatctccgtccccaccacatccgaactcttgtaagttttcatcaaattagaatacgtgtacatctgtagagattgataaggagtaaacccttgagaccccgtaataccgtaagttcccctcaccaccaattcatcaaaaatacctaagttattaataaaaggttccttttccgcattccaacgtactccggcagaccagaacggggcataacggttatttttcccaaactcagaagatgcattgacactcatactataatcaaaagcataacgttgtttataagcataattcaaggtcatcacgaaagctaaagatctagcaacactctcgcttcctgatgtgttcttgtattccgttcccatgtacacttcactcaacttatcattcggaaatcccttcatggacaatgtagtcgattttgtagaattttcattcacactatatcgcaaataagctgtcaacaaatgatcacccaaccctttagtatacgctccagacaaacttaatctatattgagttccctctgttttagtccattcatacaatccttttttagccgggtcttcctcaagaaagaaatcattatgctgggcagagttaaacacctctaccgttccatccttccgggttagcgtaaaatccaaacttaaacggaaattctcaagcggtaagtactccacttttaaagcctcccgaagttcaaaattccggctttcattctttgaatcaaactgtgcattccacaaaggatttaaagttggcgtaccataataagcaacaaattcataattatcaccaatactatgatcatccaatacttgcttaatatttccatgctcatcagtcttacgataataaggatttattttcgtgtaatcttgaaaacttccataaggagaaaccctagtaccatttgaataatccacagtcaattgattattaatcaaaattttattattccggtaattcaaatcaatctttcctgttttagtatttaaatccgtttctttcataataccgggtgcccatttggctcccagataaattttataacgcaacgtatggtctcccccctccacggtcaagccatgtctatgagaaaaggctgtcttcactggttctgccaaccaataggtattcacaccccgcatcacctcttggcgaagattattataataattcatcaaccccaaattatccttttcatcataataccccgccaactcctctatttccagcttctctttcgcattcatcatgtcataaacactcaaatccggccattccagttcgtaattaccattatacgtgaaacgtagttttcccggtagcggggctcttgtttccacgactaccactccattggcagcctctgaaccataaataaccgtcgctgccgcatccttcaacaatgtaattgattccacttgttccggatcaagatccatgatcgtagttgcatccacgccaatcactccatccaacacgaacaacggttgattcggacgagtatttacatctccacgcaacacaaccacgtcatcactctggtaattacccatgctagcttgtcctcgcatttgaaaatccggtattgcatttggattcgaaccggccagattactcgcattcatcctaaaaccgggatctaacatctctaacgccttcaagacattaccggaagtcattcgtttaatctcatccctagaaacccgtgttgctgatcccgtaaacccttctttcttacgagtaaagatacccgtcaccaccacgtcttccagattttcagtttgttcctccatcacaaccttcaaatccttcttaccagctagaatctctttatccttaatatcagccagtttcaccttttgcgtctccattccgacaaaacggaaaacaaccaccacatccttcagctctttaggcaaaggaagactaaacttcccatcaatatccgtggcacatcccaccgttgtcccctcgataagaacggttaccccgggtagaggggccccacctttatccaccacctgccctttcatcagaatcgttttctcttcctccttggctacaaccgctttcggggtaatcacgatcagattgtcaaccaaccgataaccgaaactctctccaaaaatcactcgtaccagctcgtccagcgttgcttggttcaaattcacggaaatctttcttgtcacatccacctctttcttactaaaaaagaaatcctgttttaactgtttttcgacctccagaatcacttgttcaatcgtagcatctttcagcttcagactaaccgatgcattctggctgcgaacctctgccgaaaggtgcgtcagccctatcagcataaataaaatcacaattttcatcactcgcaataggttaaaaagttccctgaatgtgcaattcatgcacatacttcgttttttttcatagctttgtaattgaattaatacttgaattctcttcggagaatgaacacgggggttgttagcggcaatccccgtatttctttcctaacgttttataatagttatcacttttccttttacctcgaaatcaacatttgtcgttaccttgatcacggacaacactttatccagatccatatcccttttgatcacgccccggaactcgtagtctttcaattccggattctggtagaacacctcgaaatcataccagcgctgcaactggcgcatgatcaaatccagcgtcatcgcccggaacacgaaccgcccttccctccatgccacgtaaggctccacgtccacctctctcaccgtcaattgtcccgactgcacgtccatcacgctctgcattcccggtttcagcacctctgcctgcccgttcttcacggaagacacccggaccgccccgttcaccagcgtcgtgtagatctgcccgtcatccccgtaagtgttcacgttaaacgatgttcccagaacagtcacttccgccccgttcacccgaacaacaaaaggacgcaaactatctttgtgaacctcgaaataggcctcacctttcaaatcaacgattcgtttcccatcactgaattctaccggatattttaattcggaatccgcgttcaaaaataccttggtaccatccgataataccaatgaatactctcccccgataggcgttgtcaacttattatactcttctgtcaccacccctttcccatgttcctcgtacacgattccccgattgctggtagccacccgtactcgttcattcaacaaaatattcaaattctgcccttgttccaacaccacctctttcccgtcagccatcattaaaatagcctttgacgttccgggttgcatcacattctttgccaactcttgttcctcatgcatatcccgaaccccgtttatcgtacgccccacgaataaaccgaccaacaaaataatcgaggcggcaatcgaccagcgcaaagtcatccggcgactcttctgatcataaatactcttctccaaatgcaggaattcttcttcaccattctctccatagctttgtccggacaacttttgccggatcgccgcaatctcgtccaatagctcaacatgatttttctctttcaaccatgcagtcacctcctcgtcattcaactcctcccgccgagtaagtaacctattggcaaattctatatcgtcatccttataactcatttttgctattttttacaataacacaacaagccccctcaaatgggtgacaaaaaattgaatatttttttatctaacggaaaataatcggatttgtatgggtaatcccatctcaaaaataaattttaattaatattttttcgtaattatattataccaactcctattc

SEQ ID NO: 220 - DNA, 7150 bp, Butyricimonas faecihominis
atattactgttaggaatattactcgtttccgcactatattcctgcaacaacgaggatgacttggatatctccgagaaaaaagacaatcggttcgatcttccacaaggagatcacgatttcgacgaccagatcgtggaatggaataacaattacggaacttccgtcctctacaggttctccaacgcagacctcaattaccatttcacctccagtagtaatgatgttgtctatgacgtgaaagtggaagccgaagaggaaggtattcgtgcagccgtacagtttttgaaggaagacttctttgacctatactcggacgaagtaaagaaggaactattccccgcaaagattcttatggccagaatgctataccaaaacaacaattatgtgccgttatgggacacgatcagtcaaggcggtatggactttaagagaggatatatggtgagagggatcgaccatattacgttaccccacgtggataaggatttcgcacaacgtatacaaaaaccggaataccgggaaagattaaaagttgctttgaatcgcacgtttattcaattcttgatgaatccatacaatgatattatcgccaaaatagagtataacaatattttaaacacatttgcctcctattctctcatatccgaagacgccaaaaatggtacaacaaatccctactcttccggaaatcaatggtatgatgaagaggttatgtatcaattaggattcttagaatacggcacatactggaatttttgggaaccttattattggacagcgccagataaagacgacgatttttattctttcttggaattcatttttacccaaacaaaaagtgaattacaggcaaatcccctttataccaattacccgcaaattcaaaagaaatgcgactacctaatagaggtatttgcagaatacggcatagatctacattgtgtcggggggaaagaatagaacgaaaaaggagcctttaaccgggctccttgtttcatcaatacaagctcttcgctacttttataacgtcttctgccaattgattggcagcagcctcgtctttagattcggaataaatccgaataatcggttcggtgttggatttccgcagatgtacccacccgtccttgaaatcaattttcacaccatcaatatcggtaatttcttccgaggcatatttctttttcaatccctccaatatcttatcaacatccatatcgggagaaagtgttaacttattctttgagataaaatattgcggataagttgcttttaaagcggtcatactctttccttctgccacgaaatgagaaaggaacaaaccgacacctaccaaggcatcacgcccgtaatggctttccggatagatgactccaccgtttccttcaccgccaatcaccgtgttggtctctttcatcttagtcaccacgttcacctctcccacggccgcagcattatattgttgtccgtgagccaacgttacgtcccgcaaagcacgagaagaagaaagattagaaacggtatttcccggagtatgtttcaacacgtagtcggcaaccgctaccagcgtgtactcttccacgaacatctcaccgttctcgcaaactaatgccaaacggtcaacatccgggtcaaccacgatacccaagtctgccccacactccttgatcttctctgaaatctgggtcaggttctccggaatgggttccgggttatgagcaaagcgtcccgtaggctcgcaattcaactcgacaacctcttttacacctaaagctttcaacaaagcgggaatcacggttcctcccacggagttcaccgcatccacgacaactttcaaattcgccttggcaatagcctcccggttcacgagttttagatccaacacgtgctgaatatggtaatccgtgtaatccttgtgggtaatcgaacccaattcgtccacttccgcatattcaaacgactcctgttctgccatctgaaggacttttgcaccatcctcggcagagaggaattccccccggttatttaataattttaaagcattccactgtttcgggttatggctggctgttaggataattcccccgtcagcctgttctgcggtaacggcaatctccgtggttggggtagttgccaaaccgatattcaccacgtcatgccccagaccggacaaagtagcctccactaatttagcatacatctccccggaaattcgggcatcccggcctagtacgattttagctcttgttttcccggccccggtcttcaaccaagtggcgtaagccgaaacaaatttaacaatatccaagggagttaggttatcacccggacgtccaccgacagttccccggataccggatatagattttattaatgtcataacaattgagaattgaaaattgaaaattgaaaatgacgatcattcaattttgcaaccatgaaataaaaataaagggactgtatccgttacccctttatcgagataacacgtacagtcccctttatcaataaaattagatagatgccttgtaagcgtcagcgcttaacaatccgtctaattgtgcttcgtcttcaacttttaccttgataatccagccttttccataaggatctttgtttaccaagtcgggttgatcttccaattctgagttgaattccaatacctctccggaaatcggcatatacaaatcagaaaccgtctttacagcctcgatactaccgaaagtatctccagcctctaggttatcaccttcggtctcaacctcaacaaacacgatgtcacctaattgactttgtgcatagtcagtgataccaacatatgcttcttcaccctcaacacgaatccattcgtgttctttagtgtactttaattctgcaggtacgttcattatcttataagttaaattaaatttgacaactattatgtggcacaaatataaggaaaaatttaaactccaaaactgttaattgaaattttagcctacactttattacttttattaataacccgttcatcctcaacataaatcatctgtatccctttgttttcgggcgctcaagaatatttttctttgtaagaaaaacgcaattttttccattttttcgatctagaaatattgcataataagaaaaactatctatctttgcaccgcaattgagaacaacagcggttgttcgatgcaaaaaaggttcggtagttcagctggttagaatacatgcctgtcacgcatggggtcgcgggttcgagtcccgtccgaaccgccttttttgaaaacattttggtctggtagttcagctggttagaatacatgcctgtcacgcatggggtcgcgggttcgagtcccgtccagaccgccaagaaaaagagtttcgagtaaatattcggaactcttttttatttccatgctttttaaagcacatatcgggcagatatactatccacaatcgaccccatgagtatattgaagagacaacacaataaaaagagagatgcctgttaatcgatcgactaacaggcatctctgcggttcggacgggactcgaacccgcgaccccatgcgtgacaggcatgtattctaaccagctgaactaccgaaccagatttaaaaacaacctctgttgtttctgattgcgggtgcaaatatagcctttgtttttaattctacaatgatttttatacaaaaaattcacgataaaccatttttctcccgtcactttaatatatcaaggttaaaaactatatttgcaataaataacattcatactatgcagcagccaaaagaatactatcaagcacaaatatcacgccttacgatcctcttaaaaaaacacagacaacggcgtaacggtatcaccctcacaaaagtcttcttattcctgttagccatatattttatatataccttcgccaacacagggtacacgccttatctcatcgcttttattgctgccatagcactattcattatcacgaatatattcgaaaccaaattattaaaagagatacaattcctgcacaaacttgaagaatgttcccgtgtggaactggaatatcttgccggaaactttaaaaatctcccgacaggcgaagagtacaaagatccgtctcacccttacgctcacgatctcgacgtattcggggaagattcccttttccaatccgtcaaccgtacggtcacgccccacggaagagagaagctacgggaatggttgctccacccgttaaaatccgggccacccatcatcgagcgccaacaagccatcgaagaatttgcccgcgagccggaatggtgtcacgttttccgggccaagggcaacagccagtgtattacccacatggccatgcaacaaatcgaacaatggcagcgggaacaagtcgggctaccacgctggactcgccctttcctgtatattcttccggtactgacggtctccgcttggatattatacattgcctccgtactcacgttaaatattccattactcctttcctgcgtgtcccttttttgtagctatctaccggctcaaaaaacattacgaactcatatgcgtctggatgaattcacccgctcgttcagtaaccttcacgaactgatcggacacttttctacatttacctgttcttccgccaaattaaaaacattgcgtcaacaactattcaacgaaacgtacaatgcggacgaggctctacgttccctgcataaaatacaggaaagtttcgaccagcgctccaatgcagtggttgccatgttcatgaacgggcttttcatgcgggaattgcaccttatccagcgccttgttgcttggaaacgccgctatgccgcggccatcccgacttgggtggaaatcacgggagaacttgacgttctggtcagtctggccaactacaagtataaccatcccgattttatccatcctactcccggagacaatcaacttttacggggtacagccatcggtcaccccctcctacccgccaatgaatgtgtaaccaatgatttcgaagtagcccaattacacgaattctatatcatcacgggagcgaacatggccgggaaatccaccttcctacgtgcgataggggtgaatcttgtacttgcttgttgcggagctgtcgttcgggctgaaagttttgaattccagcctatggccctctttaccagtatgcgcaccgttgataacctggcgaaaggaacctcttatttccatgccgaattactccgtttacaacaacttgtcaatatggcacaacacgaagaacgtttgtttatcattttggatgaaatcctaaaagggactaactcccgggacaagttgaacggctcccgtcgtttccttcaaaaattactcacgttacctgttgccggacttgttgccacgcatgacctcgaactcggagaacttgccaacacgataccggacaacttctttaaccgatgtttcgagatcacacacacggatgatgacattgcctatgattataaactgaaacccggtatcagtcaaaacatgaatgcatccatcttacttgaaaaaatgaaactcgtgtaagaatcatccaatccgaacattcctctgtcgtttccgtttaacacggtaaaaacaggagaatatgaaaacaatgattttgatcacgctacttttacccatggtacttctcaatggatgtaaggacaaaactcaagataaagtttccaacataccggacagcacgtttgccgcaacacctgccattaccaataactattacttcgtcggagaataccagtatcaaacagataaagcaaccttaaaagatcaaaccacaggtgccacgttcaccatcaataacggggaaatagcgacccaattggcagaacaatatttagcgctaaagctacctaccggaaagggcgtcagcgttcaattactcggacatctctccccggcgaacgacgttgaacacacttccatgaacggccttaccgttactcaaatcatcagcttacaccccggaacaaatccacgtggcacacgactcacgggagactacataacctatgtacccaacaatatcaagccaacagaacggttcacgttctcattacatcccgactacacctacacgttcagtatttataatctaagtgcaaactcctcccgtgatgctaccggaaagtggtttcttttaaacaagaacgaaattcaattcaccaataatcccctcacgagtttcacgaacgaggccttcatccatgatgacgggaggcaattaaccttcaagctcagtaaaagggtttattataaacaagaataagaaatttccctgtaacatattgcttgtgcatcaccatgactcacgccataacaatataataagcaataccttaccgggaaatcatcaaaatacaaccagaaactcgaattctaccggacaaatagtctacagtttcacaacaggtaatacttccaccgagactaaaggcaacgtgacaacatcattctccgacaaaacagatgaattctcgtgatcacgaactttagtctttttaggatcttgaacctcggataaagcaacattctttccttgcttttctcctacttttaccagtaaacgtacggtcacgacctcacgtgtattttccaacaacgtggagtgggtatgcaccacaaagcaacgatctgttaaccttctacgccaagcaatagcttttttcacttcgttagcacgaagtaacgctaaattcagattttcctcatcagttgaaagagatgtactgtaactatccaactgcaacatgatacgccccgcctcaatatcttcctgatagcgttttgccatagagagaatactatccaactctacattgttggatccaaaatgcacgtaaaacgttgctctacaaggaacaaaacgaaatacacgtacactatccgatacttcttcgacgggaaaatatctcgtcacctctactcctgggatagacaggagagaaaagaataataaaaatacctttacactcatttattcctaattatacacgttcgttccttttatccccccacatcctctttaggaatagcaaagaacgatcatttattgatatacgttcaaatgagtttaattgttttgggtgctataactataattaattgttaatcaggtttgtta

SEQ ID NO: 221 - DNA, 7148 bp, Butyricimonas faecihominis
attataaatctattattaggtggtaatgtatcttctattcttggaacgatgctgatgcaatatatttgttatccggatggcgtttggactgatgaaaaaccaatagtgtatgatgaaatgccagaaaaggaggaagattacatttacttgtttgaaaatggaatttggtatcttaaaagtaacaggtacccagaatgggtagatttggaaatggttttgagagcggaaagagataaattgttgaacgagtgattcttttttcagactcatttgaaaatacttttgagtcaattgatgccttgattggttatgcaggtcgtgtagaaaacaaaagaaattgtgctggaaatatgtgcggaggtctctttgtgggtagagaacttaaggccttgcgcaggaataaatcctgtttaattttttcaacttgttcctgttttagggctaactttacattctttatcagtctataaactttatccactatatagggttttgtttgttggaaagaatgttttatatttgtccgtgatcatttggacgaaagggttttaatttggtacgggaagatatttatcaagagttgtatttagctattacggaattacctgaagattgcagggagatattttggttatactttcaaggtaggaataacaaggaaattgcagaaattctttctcttccggaaaaagacgtgcgagcttgtaaaagggaggctatttatagattaaagagtcgcctaggtggtttatttttctggttgcagatcatgagaatcgtgtgagatgaatgaagtcgtaccgatgaaagtacgacttcatttattttctaaggtaagtactgataacttagtttctcgctgatttccatattatttttgatcggtagaatggtgaaactccagtggtaatctttgtttgtcgggagcttgtatttggggtaaggttgagaaccccagctatcgtccccggcaacacccatcatacggtgatccaagcatacttccacgaaattgcgggggaaaatgtcattgacgtgcgtttgtttgggtttccggtttttcgccatgagcgggtcatgggattctccttgcgtgaagttttgccattggtacgggcgattggattcttccccgtcgaaatcttcaatccggttgcgggaaacgttaaactccatgaagttcgagtcggcaataaacaggaggcccttcccggttttatccgtgagtgccagccagcgggtttctgtcttgtggccgttttcttgtggccgtacgtatggaacgtattgttgctcggccgtacttttgtaatggccgataagcgttccgttattccggtcacaatagttttcctcgggaccccgtccgagatattccagttgatttatgtccgtggggattctgaaacgtactccgattcggggaagttcgggggcatccggttgtgtttctagatggcaggccacgtggatcatgcctgacgggtatagcgtgtaagacacgtggtatttgctattggtttcttgaagtctgtacgtgatggttaggttcgtgtttgtcgcggaagtagaggttctgatcccggcaatcttaaaattcttgcttgcttgtttccagccttgctgacgactcggcatcccgttgccataatcgttgtccgtgggtccccgccagaagttgggttggaacccgaaatcttcggcaatgtattgaatgccattggtccggtaggaagtcacgtatcctttctgtttgttaaacacgaagtcgatattcgtgccggatatatggatttccggtccgttctcttccatggctagtgttttttcaggggtagggcggaacacgggcgccggggtataatccggtaacctgaattgttccgaggccacgatgtagctggcaggaatagagagattcgcttgtttggacttcacgtagaggttcaggaaatactccgttccgggtttattcttcacgttcctgagtggaatcgtgagctgtttgtttgccccgggggcgagatgttgcgtgggcagggttccggactgtacggtttccgtgtttgcctgtatcgtgtactcgatcgtgtattgattcaagttcgtgaaatcgtatcgattttctacccggatgattccttttctcagatcaacgggttgaaaccacacgtactggtagacctttttcacttcggttaaaccggggtgcggttctcgatcagggccaaccactccgttacacaaaaagttcccgtcagacggggagttttctccgaaatctccaccgtatgcccagaacggggttccttcttcatctttcacgaggattccttggtcaatccaatcccagatgaacccgccttgcaaattggggtaacgatagatcacattccagaggtccatgaggttcccggtactgtttcccatggcatgggcatattccgacatgatataagggcgatccgtttgcgtgttgccccatttctccagcgtggttgcgcccgggtattgcgggcagtagatgtccgtgttccattcgagaagggctctctcgtactgtacgggacgtgtcgtgtccttggattttagccaattgtaagtcatgtagaagttatacccgttcccggcttcattccccagagaccagaacgtgacgcagggataattcttcccggtttcgtacatgttcatggtccgatctatatgggcgttcagccagttcgggttatttcctaatgttcttcccttgcgaaggttgtagcccatgccgtgggattctatattcgcctcgttgcaaacgtagaatccgtattcatcacaaagttcgtaaaagcgcctttgttgggggtaatggcagcatcgtatggcgttaatattatgacgtttcatgttctcgaaatccttgcgcatatccgcctcgctgagaacgtgacccgtgtgctcgttgtgttcatgataattcacgcctttaatcagtacggcacgaccgtttactaggaattggttcccccggatttccagctttcggaaaccgacccggaaaggaatgatttccgggtttttccccggttgttcgatccggataaacagctggtgcaggtttggggtttcggctgtccacggggcgacttgagcaatcttcgcatcgaaatggactgttgcaatggaatctattttaatggtttgtgtcccttctgccactcgtgttcccgaggtgctttccagttggtaggacactgtggcttgagccgtttgccggggattggcgtttaccaagaataaatccagcccgaaaagtccgttcttgtacgtgctgtccagatcctgacggatggagaaatcccgaagatgcacgggggattgtgcgaacaagtaaacgtcccgttcgatcccactgattctccaaaagtcctgacattccagataacttcccgttgaccacctatatacttcaagagcgataaggttacgccccggttttaggtagcgggtaatgttatattccacggctgtcttggaatcctcactatacccgacttttgtgccgttcacgtacaggtagcaacccgattttactgcaccgatgtgcaagaatatctctttcccgttccattgttcgggtatctcgatgtatttccggtaagatcccactggattttcctccggtagaagaggtggttgcgggttacggggacagaattcgtaagggtgattcgtgtaaagtgcgtttccgtaaccgtttacttcccagtttgccgggacgtcaatctctccccatgcagaatcgtcgaaatctgttttatagaagttcattgggcgttttttgtaggaaggaacccagttgaatttccatttcccgttgagcgatttgtaatcaggggatgtgttgaaatcattactccgagctttatccacattactgtaggtcatgaatgccgtccggggatattctttcccgacaaagggtatggtctcgtcttgccattccggtttcacttgcatgaaagccgtggaacagattaaacaacagataatcgtggagaatagttttttcatcttgtatgtagtttgagattttagagtctaaagatagtgtttttttgttaaaagtggtaatctgtttcttcaaaccttcaatatagcgtgtgtcaagaaaataatttgaacagaatgatcattcatgatgacaaacaaaactatatctttgttgccaatttaatgtaatcatttacagttatgaatgtaaaagctaaaggatacgtgttaggggtcattgcggcagcaacttacgggatgaatcccttgtttgcccttcccctgtacgaggcggggatgaacccggattcagttctttttttcaggtacttgtttgctatcccggtgttgggtgcgatgattaagttgcggggaagagatttcaaattgaagcgaaaagaaatacttccgttaattatcatgggattgctggtggcactctcgtcacttaccttgtttcagagttataattacatggcagccggtattgcatcgaccttgttgttcgtttacccgatcatggtagccttaatcatggcctttctctttaaagagaaactgacgttacaaacaattttgtgtatcatgctggcgttgggtggtattgccttgctttacaagggggaggatggttcggtgttgagtctgacgggagtgattctcgttatcgcctcggccttgtcatatgccatttacattgtcgctgtgaatagacccttgttgcgagagattgcgacactgaagctgacgttctatgttttagttttcgggttgtctctgtttttggttcgtgttgattttggggccagtctgcgtgtggtagacacgtggtatctgtggggtaatttggttgccttggccgtgttcccgactgctatatcatttctttgtaccactcaggccatccagtatatcggttcgaccccaaccgctattttaggggctttggagcctttgacagcggtatttttcggggtgacggttttcggggaacctttaaccgtgagagtgggatgtggtattatgatgattgtttttgccgtgaccattatcgttgcgggaagtaatgttacgacttatttagtacgttttaggaaacttttcccgaaactcccgataaagagaaagccgacttgttaatttgttaaacgtatttcactagtgtctaaattgtatatttaggagaaatcgtttgttattgacgatatgtcgattgttttgattcataatgttttattgtattgtctttggctgtgttcattttggacaatttttttttatatgttttttttcgcatctttgtttcatccatgattagaaatggagtgtttgatggataaggagatgcgatatagaaagtttaagcataatgtggactaccttgtaaggcgattacaggatggtgatgagtatgcttttgcttttttcttggatacatatgggaaatctctttatttttattgtaattcaattcttaagaatagtactttctctgaagatattgtgcaggaaagtttcgtaaccctgtgggagagacgtcaagattttatgtccttacttccgattcgggtttttctttaccagacggctcgtaataaatgtttggatttattaaagcatgagcaggtcgttcataaacatgaagcggcgttgatacaagagttaagtgaggattctttggatgagaaaatgattgaagaagaggtgctcggggaaatttatcgggcaattgacgaattacctccagaatgtagacgtgtattccgattaggattggaaggattaagtaatcaggaaatagcagattcgttatctatatcgatcaatacggttcggactcagaaacagagagctatggctgtattaaaaaaacgctttagcatgggtattcttttggtacttttgggaatggtggatttatttaattgaatttttttttgaaaaaaaatctgcttcttgtcatctttttgagaagtgtggtcgttctttgtgtgaaatgtaaaaatgacagggtatgcatgatgataataatttgaaaatagcctcatgggttgtagctcggttgaatggtactattcagcaagaggaggaaaagatgttggaggaatggatccatgagagtgacgagcaccgactattttatgaacggctggtagagcggaattatttgatggggcggttgcaagaatatgaaaattattcattagaagcattgaaagaacgagtaatgttttcagtaggtaaacagggaaagcgtattcgtcttattcggcgggtaaaacaaattgctgcaattttattaataccacttattgccggaagtgtatttttattcatgatggagaaagaagaaatatctccgttagctacagatattattcctggtaaagaatgtgccgtgctagagatggctgacgggcggaaactggaactaggtctagggaaaaatctagggcaattacaattggaaggaactgtagtaacgaatgattccaatcgtcttgcctataaacaaggccactcgggtaatccatccgctctggaatataacaccattattattccccggggaggcgaatatcaactgatcttatccgatggttctcgggtatggctaaattctgatacccgtttacgatatccggttagttttatcggggaaaaacgagaggtgtatcttgagggagaggcttattttgaagtttctccttctgacaagccttttgaagtacatgggggaggacagagtgtatgtgttttaggaacttcatttaatgtgatggcttatggggatgaagctaaagtgcagacaactttggtctcgggtagtgtacgggtagtgttggatcaatctgataaaactgttttgttgacaccggggcatcaggcggaaatggataagaatattggaaagatatctatgcgggaagtaaatgttgagaattatatcggatggaaagataaacttttcatttttgacgaggaagatttggttactataatgaagaaattggcccgttggtatgatgtggatattattattgaaacaccggaattgaaagaaaaaatattttatggggtaattcgaaaatacgagaatatttctaaga

SEQ ID NO: 222 - DNA, 7135 bp, Butyricimonas faecihominis
ggttatgacagaattaaacgctaaaataccagcaggcccgctagcccagaaatggtcgaatcacaaagcccatatcaatgttgtgagtcctgctaataaaagaaaacttgatgttatcatcgtaggtaccggacttgccggtggatcggctgctgctagtcttgctgaactaggatacaatgtaaccacattctgctatcaagactctccccgtcgcgctcactctatcgctgcacaaggaggtatcaatgctgctaagaactacacgaacgataatgactctgtatacaggctattttatgaaactattaaaggtggtgactaccgtgctcgtgaggctaacgtgtatcgtttggcagaggtaagtaacgccatcatcgaccagtgtgtcgctcaaggtgtaccgtttgctcgtgattacggcggtcttttggacaaccgttctttcggtggagcattggtaagccgtacgttctatgctcgcggtcagaccggacaacagttgttgttaggatgctacggagctatgaaccgtcaaattgaaaaaggtaaaatcaaatcatacacccgccacgaagtattagacatcgttatcgtggacggaaaagcaagaggtgttattgcccgtaacctagttaccggaaagatcgaacgtttcggggctcatgccgtggtactggccaccggagggtacggtaacgtgttcttcttgtcaaccaacgccatgggatgtaacggtagtgccgcttggcaagcttacaaacgcggtgccatgttcggaaatccttgtttcgtacagatccacccgacttgtatcccggtacacggagaccaacaaagtaaattgactttgatgtccgagtcattacgtaatgacggacgtgtttgggttccgaaaaaattggaagatgccaagaaattacaggcaggtacgttacacccgaacgatattccggacgaagaccgtgacttctacttggagcgtcgttacccggcattcggaaacttggttccgcgtgacgtggcatcccgcgctgctaaagaaagatgcgacgccggattcggagtaaacaacaccggtaaagccgtattcttggatttcaaatacgctatcgaccgtttgggaagacacgtgattgaagaacgttacggaaacttgttccagatgtacgaaaagatcacggctgttgacccgtacaacaacccgatgatgatttaccccgcaatccactactctatgggaggtctttgggttgactacaacttgatgactaccatcccgggattgtacgctatcggagaatgtaacttctctgaccacggtgccaaccgtttgggggcatcagccttgatgcaaggtttggctgacggatatttcgttctgccgtacacgattggagattatctcgcacacgatattcaaaccccgaaaatcaaaacaaacacgccggagttcgacgctgctgaaaagaacgttaccgaccacttgcgtagattgtatgacatcaagggtacgaaatcaccggatcacttccacaaaatgttgggacacatcatgtgggattacatcggaatggctcgcgaggctgagggcttgaaaaaagcaatcaaattaattgccgagttgaaagaagaattttacaaggatttgcgcgtaaccggagagtttaccgccatgaacaacgagcttgaaaaagccggtcgtgtggcagacttcatcgacatcgcacacctgatggcattggatgccttgaatcgtaacgaatcttgcggaggtcacttccgtctggaatcagttactgaagaaggtgaggcaaaacgtgatgacgaacactaccagtatgtttccgtttgggaatacaagggagacaacaaagagcctgaattacacaaggaggcccttgtatttgaaaacattcaggtagctcaacgttcttataaataatcttaaatgaaaaatcgttatggcagataaaatattaaaagaactaaccctaaagatctggcgtcaaaaagatgcaaaatcaaaaggtgggtttgaaacttacaagattcatgatatttcaaccggtagctcattccttgaaatgcttgacattctgaatgaacaactggttagcgagaacaaagaaccggtggctttcgatcacgactgtcgcgaggggatctgtggaacctgtagtttattcatcgatggacgtgcccacggaccggatgatgacgtgaccacttgtcaattacatatgcgtcgtttcgaggatggcgcaaccatcaccatcgaaccgtggcgttgcggggctttcccggtaattaaagacttgatcgtggaccgtggtgcttacgagaagatccttcaagctggtggttacgtttcagtaaataccggtggtgttcctgacggaaatgcaattccaatcgcgaaaccggctgccgacgaggctatggacgctgccgcttgtatcggttgtggggcttgtgccgctacttgtaagaactcttcagcaatgcttttcgtggctgctaaagtttctcagttggcacttcttccgcaaggaaagatcgaggctgcccgccgtgcaaaagctatggtggctaaaatggacgaactcggattcggtaactgtaccaatacgggagcctgtgaatctgaatgtccgaagagcatctctatcgaacacatcgctcgtttgaacagagagttcttgaaagctaaattgaaagactaattttacttcatgtaatatgaaaaagaccgctttattgcggtcttttttttgcactgtactatcttattattccttctctatttgtaaatttgtatcacaaatcacaccaagtcaatatgaaattattctttcgtaccattggggagggggttcctctaattatacttcacggtctatggggtgcatctgaaaattggcttcccattgcccatttactagaagataaattccaagtcattttacctgatatccgtaatcacggtcaatccccccatgacgaggccatgaattacgaggtaatgagtaatgatgttattgaactcgttgaagacttaaaactccccgtacctccccatatcgtggggcactcgatgggagggaagatcgtgatggccttattactgaaaagaccagaacttgtgaatcgagccgtggtcgtggatattgcccccgtatcctattcccaacgggacgggggaagtcataaccggattattgattttatggcgaattttgacctttcccaattacatagtcgagaagaagtcaaggaagccattcaacaacatttcagaacggaacgctctcaacaattatttttaaagaacatcaaaaagacagcctccggtttcgaatggaaaatcaaccaccgggtaatcagcaagcatttcgacgagattagcggttgcccgtcttcactgcctaacagcacgtacgacaaagaaattctgtttattaagggggaacaatccaacttaatcacagggagggaatgcctgcaaaaagaatttccggctgcccgcctcgtcgaactcccacaatgtggtcattggattcatagcgaacagccggaaaaactggctcaagcaattaaaaatttccttatagaataatcccaacctgttatctgccaagcaagcatttatccgtaacatacacgacagcttggatacgactctctgctatcacactattagaggcaacaccgggctccaacataaccgcagtcaaacgaagtgtatactctttctttgaatcaattttattcaatttattaattttcccgatagtactctcgttaagggtatatttaccattatcataagagaataatccactctcaaaatacacatcggcttcattatcctttgaatacacctctattttataatacacgttttcaccttcaaatttattccattcaatctccagctggttaggataccctgcttttattgatgaagtaaaatcaatatctgttaatcgcatggatggaaaattatctgccgtaataaattcatcaaatttcacgtaatcagagccaatacgacaggaaaaacgtattctccgatcttctaccccgctaatatccgcctctcctttccaaacattattataatttttcagttttaccgactcatcatccgataacaaagcaagcacataccccgcacgcatacttcggtcatttgaaatccggaaaccaagttggggtttactcacatcatctacaaacttatttacccagaaagcgtcgcctgtcaagttttcaaggtaagatggcttcgtgatatactcacgttctccccatccattattcaccactaacttcttggacgtacaattttccacggtccacgtctcggcattcccattcttccaatccacggcaagtatattctccccttcatcccgccacgttcctgccacagaatcaatcacacctcgcaaatcaatgccctttatttccccgcttttatcaaaacgatttatttccagcacgttttcatccgagaatgacgaataatttttactcgtagttctattgtaataccaatcaacacctgtcattcgattgacatctaacataaaatctttatcatcgtcactacaactacccaaccataagctccccacgatgagacttaacattcctaatttcttcatttcactccgtttttatatcattaaccgtaattctattcgcaaaattaatccataaattataatcccccattcacaaaattcctatctttgttcttagtacaataattatgcctaacaaaataataaatcatgttatacccgttaaaattccatccaattctcaaaaaaaagatatggggaggtgaaagactagcttataaaagtgaagaacacgaagaatccattggtgaaagttgggaaatatcagccgtggaggacaatatctcggtggtttcaaacggaatccttgctgacaacgacttgcaagaattaatcgaagtgtacatgggagacctcgtcggggatcatatctacgagaaattcggcattgaatttcctctgttaattaaatatattgatgcgaacgacgatctatccatccaggtacacccggatgacgagacggcaaaagaacgtcataatgcctacggtaaaaccgaaatgtggtatatcgttgatgcggaaaaggatgcctccctcgtgttgggattcaaccatgaaattgacaaggcgacctatcttcaggcattacaccagaacaaactcatggatttattgaatgtccaaaaagtaaagaaaggggaaagtttctttattcctgccggattggtacacgctattgggaaaggatgcctgatcgcagaaattcaacagacttccgacattacataccgaatttacgactacaaccggaaagatgccaacgggaacacacgtgaactacacacggatttagccacagatgtgatcgattacagctatcaaccacaacaccgggtaaactataccccacaggataatcaatccgcaaaactcgtgaaatgtccctattttaccacaaatttactcgtatttgaccgggacatagagaaagagtacgttcaccttgattcatttgtaatctacatgtgcctgcaagggaaattcaccatcacaaccggggaatgcgaaccggtattggtcaacaagggggaaaccgttcttatacccgcatgctttaaaaatctcacgctatacccggatgacataacgcaagttctagagatatacgtggaagaataagagttaaaaggcacaatataagtaatacttttattagtaacaacattgttagtaataaaaatattacttatctttacatttgaatcatactcgaagaatcatggagaataagccttttatatttggagttgcaacatcaggcgacaatttcacggaccgagagaaagaaacgttacgcttggtattaaattttcagcatggtgtaaatacggtgctaatctcacctcgccgctgggggaagacctctttagtacagaaagcgtgcagtttggcacaatcagataaattaaaaatcgtctatctcgacattttttcttgtcgcagcgatcgagatttttatgacgcattcgcttccgctattctcaaacagacatcttcaaaattggatgaatggctcgaccacgctaaattgttcctttcccgtatcagtcctaaaatttcgatggggaccgatcctatgacggatttttccatatcgcttgaaataaatcccaagagcaacaatatcgatgaaatcttgcagctccctgaaaaaatagcccaaaaaaaaggttacaatatcgtcgtttgtatcgacgaattccagcagattgccgagttcaaagattctaaaaccttccagaagcgattacgctcgatttggcaattacaaaagtcggtatcgtattgtctattcggtagcaagaagcatttgatgaatgaactcttcgaaaaaaagagtctccctttctataaattcggggatgctatctatttgtcaaaaatcgagacacgggattggatagactatatatgtaggcgtttcgaagctacaggcaaacgaatttcagaaaagttagccgaaaaaatctgccaaatagtagataatcattcttcatacgtgcagcagttagcatggttagtatggattcatacggacaaaatagccacggaacaagatttagagacagcatatcaagatattatcgaccaaaatacaccgctattcgaaaagcaaaccgagagtcttacaacttatcaaatgaattttttacgagcaatcatagatggagttcatagtgagtttaccacacaagagattttgcataagtaccaactcggctcgtcggccaatgttagcatcgtaaaacgagccttggtaaagaaagaacttatagaaatagaaaaacgtcaagtgattattcccgatcccgtaatggccgtatggttgaaacgggagttacgaatgtaatacgggaaagaaacaaaacgtggattacaggacaagtacaggacatttaacccactgaataataatcatctgtaaggttcataaagtttataaagtgaaaattatctataaactttatgaaccttataac

SEQ ID NO: 223 - DNA, 7120 bp, Butyricimonas faecihominis
ctacaaatattctacgaaaatattttgctttaataaaaattggactttacatgataaataccttattccaaaacacccaataagacacgcaagtagctatctatttttagctatttatacgtttaaatatttaaaaagatctaataaagttccttgatttcttcagaaatatttacatgcatctttttctcgtcatgagaaatatacaagacatattcatcggatacgggaagaagaatttctttagaaaatatttttatcgtgagaaccacgttacctgaataattatccacctgctccacgacacccatctctcccgtcaactcgtccagtacggaatagccaattaagtctgaaagctcaaaaggcaattcatcctcttcttccaacaggtatttatccattagtaggtcacatcccaccaaacgatccgcctgttctttcgagtcaacaaaatcaaatttgacaatataagaagaatggttcctctccgtcaaaccatcttcggcaatataaaagggaaccggtgctccttctaaaagaataaacaccggttcatccatgtattgttcaagaagatcattatccgtataaacaataagggctccttgtaagttatgagtcttaccgatctctcctatctttacgcaatcttctctcttgaccataaaattactctgctgctggagtttctgcttgagcttccggagcctctactgcggctacttcagttgcggcagcctctacttctgctctggcagcagcttctgcttcagcttttgcagcggcaatttctgcttgttttttagccacgatctcagctttagcctcttttactttagcctcagcttccaaacgagccttataagcgctctctgattcgttagccaaacgagcaattttagcctgaattttagcaatcttctcttttttccaagcttcaaatttcgtgtcagcagcagccatatcaaatgcacctttcttcacaccttccaacaagtgctttttcataagtactccctcgtaagaaagaattcttttagccgtgtcagtcggttgagctccggtcatcaaccagtataacgctctgtcgaaatttaaatcaattgtagccggattggtcatcgggttgtaagaaccaattctttcaatgtaacgaccatcacgcggtgctctactatctgctaccactacatggtagaacggacgtcctttacgaccgtgtcttgctaatctaattttagttgccattctttttaattttaactcattaattacttacctattctcgataggcgggtgcaaagatagtcaattaattgaaagttgaaaattcttttagggcaaaacattttgaaaaacacgttctatttctttcaggtacttcggattaacaacaatctccttatatctgcttttcaatatcaacacggcttcctccggtaattcattataatactgcatcacgaaattattccctatatcatcccgaatctgttcgtgcaatcccaatttattcaactcgtcaatataagaattcacgaattgttccggttctgacatcaaaccagccaacttctcacccagcaaattattccaataggaaacctcgtaaattttatagcgatacacacgttgataaacatcaatatcattctttggcaacatccgatcaaatatattgaaatcagcggggatctcactttcatcttcccggttcaataacgaatgatacatgggataataaaaataagaggctgccaacggcactttcacttgtattcgaaataatttcacaaacgccggatcacaagtattctttttcacgaatgcagaaataatactatcattaaaatgcacaatagaatccatgatctgtctaaaatcatttggcggaagtacaaacatctcttgcgtggacgggaaccattgtttctgataataatcagccatcatccgtgtctctgaattactcccctctaaaaactcaacggattcgtaatctccctcttgtactttcttcacatccattttcaaacgaacactctttcccggttgcaaataaagaggaaaagcggccttcccatttgccaatcgcacataacccgctttcgtcaatggtagaacagcctcaaaactccccatactatctaaagcaacagttatcgttgtatcttgcccgcaaatttcaaagtacaatttatcccctttataatgaaacaaatcacccgaaatctgcactccattaataggattgcacgcccacaggcatgcaatccataaacctaggcaccacttcatcgcttacttcaccttagtaaaatgatacctgatcatgtgcatctccatcgggaattccccttctcccgaccaagctgcaagatctttatacgtattatacaagaaatctgtcggctcataatcaaacacggttacctccaaggtttcattatcttctaacaatctaaaaccaacctgcacggacctcaatttttcatttacacccgagaaattgacatttgcctgactcaaattcatcatggataccgtcacctgaggcggtcgtccgattcccccaaattcatacaaataaaccagttgctctttcaagaacgtgacatcggcatctctaaaatacttcgccatatctccggtcgcatgaaccttcaactgagttccaccattcacaaactccaacatatccgtcggtaaattattttccggcatatttgcgatctcttccccaccataccatgcattatttttcacgtaatccattgatgtcaattctttaaacacccatttgccttctaaccgatcgggagtcgtcattccctttatataaatttcggtttgatccacatcacccggcagaatacgatcatttccatccggtactaacaaaaacaaggtcgttttcccctcttcccatttcaaaaatctaatctttatcgtcccgtaactcttcttggctggaataacaaacatcttgtcgggattatccacaaattcataatgtacattttctatcgcagtagaatgttcccccacgataaaaggaacttttgtatccgtactcgccgaaaaatattttcccgtattcgcatcttttgcatccattcgaatctctacctccccgggtagaacgtaattctcttcttggaaagaacaaattaactgtccttttgtcagcacctcgatcaaggtgaaattatactcaccaagcacgtatccatcaacaggatataattccagttttatcgtctttccatcctcgaaattatttttaggtgttacggtaatactagcggtactctctcccgcaggaataacgaactcattagcagaaagctcatattcttctccttgcacggcagccccccttatattaaacttaacagaagtgtttgctggtaccggctctgaaacccgaatctcaacattcaacggctcttccgcatccagagtatagattaattctgaaaaagccagttgaggccctttctcttcactgtcgtcatcgttacacgccacaaagcacatcgacaacagtagacagataatcgatataatatttttcatcatatttcacttaaatctttagctattacaacccttgaatcgcattattatactcctccttcaacaaccgtatttcttcccgttcctccaaagtcaacggtctcgctttaggtagctggtaatcctgactttccgtcaaaatacgcggtggtacatcatctggtttatcacatcctccacaaaaagccaataaaacaaaccctaaacccatcaatattattctcgttttcatatttacctcctttacattacttgacatagccttcattttgaatcattcccggaatcaaatcaatatcccttgaaggaatcggtgcggtatacataaattgtttcgtctcgtatttaagtccatccttggcaatccagaactccggacatccgttccgttttaagtcgaaccaacggtctccctccatgaacaactctttccgtcgttcacaatgtatcgcccacaacaatggggtaaaagcccctccttccacatttacccgaaccaaggcagtttcatccacggcaggtaaatttcccattgtataaggagtataacctgaaatccgttttgatctcaacagatttagatattcaagtgcctcttttgtctgattcaaataagcatacgattcagctaaaatcaagcacatctctgcactcctgatacaagccagcgggaccttctgagcctctcgcttattattaaacaaaaatgaataccgaacatctcgctctttctcaacaaacaagtcaataaaacttttacttaccggtttcacggctaaatatcccttcgctccattataattttgatcaccgctaacgtgagataacacataggaacgtaaaagaatattgcctttttgtgcatgttgagcagacaacatatcaacatactctgtcccctccaccaatggataagcctccaatatttcttttgccacgggtatagcctgttcccaattctgagaccaaaaatatagcctagccaaataagcttttgccacatccaccgtgtaacggaaaatttccgacttggaattataagaaatccccttctttaaatcttcctcgataagcgacacgacctccgacaagcttgaccgtttcggtcgcgcttccatatcaaaacgagtcacgatagaaagccctaattgttccccagccttttgcttgttatagggttcacaaaaaagacgcatcaaattgtaataagcgacacctctcatcgtgtatgccgtggcataacatgactttgccatctcagtattctcctcttccatttcatgtatcaccagattacagttctttattaatgcatacaacttctcgtattcagacttaaatgaattcaaacgatctcctacatatttgggaattgctcccatccctgtcacatttttagtcaaactattctctacgttatcactaaaacactccaattccaatttttccatggcattacccaatatggcctcatcatagccatcatcgatctcgctcaaatggctatttaacaaagctgcaaactcctcagcagtcttaggaataacctcacctttcggcttcacatccaagtactctttacaagacacgcatacaaagaataccattaaaagcacacttatatttttcaaattcttcataatctcacaaattaaaagcctaaactaagtccaaatgaacaagaacgtgccaagggataagttgccccgggtgtttccggatctaaccctgaataatttgttattgtaaataaattcgtcaggataaaagaaaaactcaaggaagaaatacccattttactcaccacatccagaggtaatgaataagacaacgacatattcttcacccgcaagaaagaaacattctccaacatggttgcccgagtaatcgtactagaagtcggataaatctggtcataatagagtctttcgccataagtatcaataattctaggatacttcgtgccagttctgttatcttctgtccagcgattagtcacgtctttcctcacattcaaatggttcacgtacaaatcattttcactagtcggaatcttttcccccgatgacatcccagtaacacttattgtgttataacttactggtgatgttatctcatccacaacctttcctcctaacgaataagcaccaccaacacttaaggagagtgttttccatgagaaactaaaattaaaacctcccgtcaccggagccgttgacgttcctttataatatatatagttattcacatcactcaaatcagtcggtttcaaaatatctgcatctggacgtaatttatatttatacaacccggtttccgggtttattcccattgacttacctgcaaaaatcgaacctaaaggataaccaacaaaattgttagccgaatacgatataggagaggtgtaacgtttcaatatattactattccaagcaacatttaccgaagcattaaatttaaaatccctatacctgaaaacaagtgcctgcaatgttgcttcaattcctttattctcaatctgagaggtgttataaccttgtcccctgaaccccgtcacataaggaacatcaacacttgttacaagatccttactcaaacgataatacgcctcaaccaaaccattaattcgattattaaaaagtccgaaatccaaagcgaccttcatatcccgtgttttctcccaacgtaaatgaggattaggagctttccgaacttccccgattcgaagattttccacgtcggttttccgataagaagtagagtaatacataatcaactccggtttttctgttttattcacgtttccggtatatcccattgccacgctcaattttaagcgactaagaacaggacgaagtttttccataaaatgttcatctcccacgtgccaagccaaccccaaagaccaagtcggattaaactgttcgtcactaccgaaattattggatccatctgtacggaaagagagactggcaatatacttatcatacaaactataatccacggaagcataaaacgatgcgaaacgggtttcttcaatagactgcccggcaagtccatcaatcagattcgccatatccaccaatttattatagtcaacctgatcatctgtcttttccggagccggggtagaagaatttccggtaacaggatcataaccatagcgtttttcgtaaatactcttcgctttagaacctcgtatttctgctccggccaatacctgcaagcgatgaatcgaattgaaaatatccgaataattcagttgtcctctcgcactataatttgtattattagctgaagattgagttatcgacccgtaagttctccgactattccaatcgtccaactcgctaggtttatccttaaaagcggcataagtatcaattccatttatattatccgacttattattgataaaactataagaaagcaaacccgaaaaacggaactttgaagaaattatataattcaaacttaacatcaaattggcagcataatcatccgcaacactagatgtctcattaatttcacgcataat

SEQ ID NO: 224 - DNA, 7116 bp, Butyricimonas faecihominis
tttcataacttgtcattattatctttcataccgggtaaatctaactaacgcaccttccgtttcaccgggctccggtgcctctcgaaggggttcttcacctctggcagctctcgcctcattttcagcagccaatttccgagtgaagaaatagaaccaataatccgtcattcccatatcaacgctactcggatcaccaactaacgaatagaaaaagtcatcgttcatcttgattcctaaatctgccgtggcatcaatcataaactgatgcttcactttaccatattttccagcgaaataatacgatgcataaaaatcccagtatttcggttgcatcaatatatctgccacccgaatgatcttcttctgatatttttcgtagccgggaataaagttttcattgtgaccgatctgaacacataatgtcacctcctgttgttttaatgaaggatcacgttttaatattatcggaaaacgtacggtattttttcccgctggaatcttgtaataatcggcaacaagcggatcatcaaaagcaatataatgctttcctgccacggcttgttctccctctcctttcttcacttgttccagtacaaacgaacgttcatgatcttctacataccccatcgtttcaacttccaaccaaacggtatcgaatacccgggtttcaacatcgtaaacaaatgtacgaggaatcacggtatcggccatcgtgaatggttcatatataaaattcaaacgattctccggtgaattatacacccccatctcatcttcacatgcgaataatccgaaaatcggtaataaccatagtatatatttatttatctttttcatagctttctacttttaatttgcgttcagttctgtacttggtaatggcacaatataatcctgttcgccaacctcccgatccgtcttccataacatattttttattcccaaacgtttgtaagtatagaacatttgtccttctccaaagaattctctacgatattcccggattatctcggtcatcaactgttcttgttgtaaaggagacgcatccacgtttctcgctttcatataaggaatataaagagcattagcctcattcagcgtgggagcagattcgatagcaatcaagtacatctcggacaaacgaatcaatggaaccacctgtttctgcgtggccaacacctccatatccgtgttcgtggttgaggacggttgattgtacttttttagcaaaggttttatagccccttgattatcaggtgtacgatcccacacttgcactcggttattcacggccgtagattgtccggcaaacaaatcattattaaactgtttttctgtaaggtatattctttcagttttatcggatttaaacaatttctctgtattactttcaatctcgtaattacttaaagccaaaatacattctgaaggcaaagcaaaattactactactaatatctcccgctcccgccaattccaaaactttcttaccattcttatcgacggcatcaataatttcttttgctgcagtatatgcttctgttttcttccccatatacatatacaaccttgcccgaattgctttcacagcataataattgaaacggaaacgtctaaatcccataaactcgtccgccagctctacattataattttttgtatcgaagaaattatccaattcttggaaagaataagtaaataacggatcatgatctttaaacaaagcttcagccgcatctaaatcagcaagaatcaaattcgtgaaatcattatatgaataatgcggaatcatcaccgtggacacggttttagcatacgccaaagatacctgtttatcagaattttgcggcatttgcccaaacaaacgtaatatttccatgtgacaaaatgcccgaatcgttaatgcctctgcctctacaattgcccgcatatcctcgttcgtgatcacctccttgtgatcgggcatattctgtagtataatattggcttgggcaattgtattatacatctccccgtaaattgcggatattaatgtcttcggataatcgttttcatatttgaaagccttgagatcctctgccccccgataattactctcctgataactccaatgttgggccataaattcaatatccgtaatcgtcaaacttagcccatataaatttttggaattcaatttaatatagcaggcagtcaaggcatttttaaacccggaaaccgacttgaacatatctttttcatcggtttgagtctccggctttacatccagccaatcattacaagaggctagcgataaagttgcgaataacgtgatatatagtaaaattcttttcataataccattgtttaaaacattaatgaaagggttaaagccagtctgcgggcaaacggataagaagttcctctttcacgcttgatagaagaaatatagaatatatccgacatattagccccgatactgattgtctcaactttccacttgtcacgcaagaaatctgaatgtaaccgatactccacactggcactttggaattggaacacgttatcatccatcacgaaacgggaagttgcttttgtctccacggaaccgtatcccttgtaaggtttcacgtctccaatatgctgccatctctttttcaacacacgactatcaacattattcttatcaatttcaccattggtcacttccaccttgttaagcaaggtttcgttatattgttggcccccccattgataagcaaatgacagattcacggaaagatccttccaagcaaagtaagtactgatattacctctgtatttaggttcatcgactccaaaataacgcttgtcggatggattccatttatccgtgatattcccattcttatccaagaaaatttcatatccggtactcggatcaattcccatggaaggaacagcccaaattgaattctgtgcatacccttcatacaataactgattaatctctacatcttttgatttgtaaagctcattctgccgtttgattgcttcagaaagcttggtaatttcattcttcgtgtaagctaatttggctgtcatagaccagatgatattccggtgcgtatcacgcattaaatatccactaatcatggcctcgtagcccgtatttttcacctctcccacgttatccacgtaagaactgaatccgttcgccaaaggcaaatccatttgagacaacaaattagaagtctttttactataaatatcgaaagatgccgacaagcgtccgtcgaaaagtccaacttcaacaccaccgtttaattgcttggtaacctgccatttcaacttttcatttcctaatcccatcaactcagacccgttccaaataatgtaacgttttcccgtataactctggaaagttgacaaagcctgataggaagaaaactgttgagatccggtttctccgtacgatcctctaatccgaagattattcacgatattctgattctgcatgaacttctcgttatgcacgttccacccgataccggcactccagaacggggcaaatttattttttgtcccgaacaacgatgaaccatccacacggaaagataaatccatgaaataacgattgttataaatgtagttgacattcccggtaaaaccaacccgacgagacaattcttccgtacctttcggtaccccatttttctcatactgcaaagcattaccgatgaaatccaatttaccatcaggaaatccttccacgataaacgtgtagaaatgatttttcttctgggctatagaataatcgaatccggcatatagctggtgtttttcatgaaatatctttgaataactcaacgtcacgtttgcatcaatattaatatcctcacctgttccgtaagtgtactttcctttgcgaaaataactatcactatctgtagcagtcgcaaaagtcgtgtgatcggcaggtaaataattatcagaagtactatttttcttttgtaagcctaattgagctcgtaaacgcaaatcatgattaatgctccattcaatagaaaaattattcgtgatcaaggtatatttatcctcgtcgattacccccaactgggcattataaagcgggttatactgttttgtcccttttatcgtgtacaccttgatatattctccattctcatcttttatccggtaatacggattcattttggcataatcagagaatgttccatatttactttcttttcctttatttatatcaatactagtctgattcttaaagagcacattcttcacggaatatgacaaagttaccgtaccactgaaagtatttctctcggatcccttcatcgctcctataacagaattataagaaatatttgttccccaacgaaaagactcatttccaccctctagacgcaaattatatttctgaccaataccggtctgtaccggttggctcaaccaatgcgtgttcacacctttcaacacctccgaatataattgaccatatttctcctttaacgcccgatcgttaacgacatcatcttcatcatcatagagtccgacaatccgctccaattccaatttgtcacgggcattcaataaatcgtatgaagaaaggtctggcatttcaatattcattcctccttgcacgtaaattttcaatttaccggcttgaggagccttcgtggtaacaacaataacaccatttgcaccccgagaaccataaattgccgtggcagaagcatctttcagtatgttgatactttcaatctcctcgtcattaaaatccattaacttctgcaaagtaatctcgaatccatccatgattactaacggagcattcaattgtttggatgcttgttgatttaattcatccacgctcatgggtaaagaggaattaccccggatattaatttccggtatcacgttcgggttacttcccaaagcattgtccatcacgacattgattgaagggtcgatgttacgcaacgtggctaacagattttggcctttgtacatcttcaactctttggcagaaacggccgtaacagcccccgtgtaactttccttggatttcgtgaaaataccggtcacaaccacgtcgtccaatgtttccgaatcctcgactaacttcacgtctagttgcgtcttcgaaccgacggcaatttcttgagtcttcatcccgacgaaagagaagatcaagacttgctcactatcaccgggtatttccaatttatactccccgtcagcaccagttgccgttcccaaggtcgtacctttaatgataaccgtaactcccggcaacacgtttccttgctcatccgaaaccttacctgtaattgttttcgattttttttcttcttggcttacagcctttttacgaataatgatcgtcttaccatttatctcgtaaccgagatcagtccctttaagacaatccgttaaaatttgttcaatcgttgcatctttaaaagcaacatcttgtcgggcaaatgattccagattcacgtcacgataaacgaaatcataatcagaattcttacggatctcactgataatctcttttaaagacgcatttttcaatgaaaacgtaatctttctttcctgcgaatacgcattcagactaatttgggttgtgaaaattaagaaaaggaggaataaaaaccgcctcttcccgacgacattagaaattttcttcataactttgttttttgaattcaacaattcctcacaccctgtgccaacagggagtgaaatacgaaaagtagtgttagcagcgctacttttttattttacaataaccgtgttatcttttatttcaaattgtacttctccggttttaccgattaattctaatacttgagtaaattcttcgtgttttttcatgttcaaagagaattggtatgaacgcaattcatcccgactatagaatacatcaatgttataccatcgtcccaagtcggtcaggattttttccaacggacaattatcatacaccaaacgtccgtccgcccatgccaagtacaaatcgacatccacgtcccgaacttccaaccccatcgttgatttattaaacaacacttgtttattcggaacaagtttcacacttttaccttccacccttaccgttacttgaccactttccaacgtggtttgtatatccttttcgtctttatatgcccgaacaccgaaagtagttccggtaaccagcacttccaattctccggctgtcacgacaaaaggatgttccgtatttttcgccaccttaaaataggcttcaccggttaaatacaccttacgctccttaccctgaaatttcacgggaaaacttaacgttgattccgaatttaaatagatcatcgtaccatctgatagcgtaagtaaatattctccaccccgtggaatctccaacgtgtgaaaaatttccgtcgtgtcgggagaatcaatatccctgtattttaaagatctggcgctaaccaataataaactgtcactctgagccagatcagaacgtaacacctcgttttccagatcaactttacgcccatcgggtaaaatcaaaacggcccgggaaccgggaacttgcacctcattcttagctatcggaagaatttcggtttgttctttatccccggaaaaataaaaaacacctcccacgcttaatattaatacaatagcagccgcatacgggaaccattttatcttccgaacagatcgaccggatcgtgctctctgttggagttgccaccatcctctctcctcctcttcttccgttttcacgaaacgggaaatacttttttccacgtgttcgcttgacaacattcgttgaaaaagttcttcatgcctcggggaaaccgatctccattcgttcagttctttttcctgcacattgtccgtcattccctgtatatgcaggaaaatcaaccgggctatatgttcttctttgcttaacatcttttttggcttttatactaaagcgatttggggtgcgtttggtgtaataaaaaaatcactttttttctcacttttttattatcatctctgtatttgcaagttagcctcttcgttttctggcaatagatgtcgaacagatacaaaagcatctatttataaatcattgatttacaagaaagatatttataac

SEQ ID NO: 225 - DNA, 7055 bp, Butyricimonas faecihominis
gtatatatatcatacccctattttttatccttctaggatgtcatgatgaaaacaatccaaaggtggaattacaagccgggaagtacacgttaaccgatgatcccaacgattacgtacaacattacatttatgacttttaccagaaatacggcgtggtcatcctaaccaacccggattccagcgattacgtttataactttaacaatcaaaacccgatctcgctaaaagccccggaacaggaaaaagaagtccttaaaaccggactgcaatttatcgaggagcagttcttgaatatctatgacgacaatttcaaaaagaaatatttcccgttcacgattcaactggccaatcgtattgagttatggatactgggtgattatgatttagtcaacgcctattcaagctccggctttatcgctatcgcaaacatcaatgacgatctggcaactctcgatgaaaccacccgcaacaattaccggggagatattaatcaaagtctttggaccgaatatttactaaagcgtgaggcatggttcgtaccgggagccttcctcgaagtaagcaaggagtattacggggactacagcctgtttgaatcgtacacggtagaagagggaattattgaggccagagaatgtggattcatcacgttcgatccttatatgtccgaaaccgaagacccggaagattgtcttctatttatcccaagtcaagagatggacgtgcagcaatattttcaattcttgttctcttccacgaaagaggaactagacgaactcatggaagaatatcccttggtagaacaaaaatatttactgttacaagatgctatccaaaaacaactggatatagatatcttttctttttgtctgccttcataaaacagctcctcccccttgatacaagggggaggctgattaccaatcggtttgcgagtgtgtcaaaagtcattttattcaacaaactcctccgtcagctacgctgccacctcctctataaacgaggccactgaaaaagtccctctttttgaggtaatattttgattttacttacagtttgaaactagaaagagaatttaatacctatataagactatattttgttaaatattcgccaaaaactggttgtatatctctagctaacttacaaattgtaagtgttaaaacgtttttcagtggcctcataaacagaggaggagctggtgaatcttcccgaagatagagagtattttagctctccctctgtttatagagggagtacggcggagccgggagggagttcataaaataacttttgacacgctcttttattctccacattccaacggaaatacgaacctttgcacaagggacgacgtaatttaacaaatacttccaatggaattaaccttcaacacgaaactaaaagggacaattgccctcacggattcttttcaactcacgaaaacactccgtgaagataacagtttgtacaaatttatctgggcaaggaaaggaaccgtcacgatagacgttgaccatcaactcatcacgctacaagaaaacgatattatttccctgaccaaccttcaccacttggaaatcaaggaatccgaaggagactacatgatactcctttttaacagtaatttctattgcatctacgggaacgaccacgaagtttcatgtagcggattccttttcaacggtacctcccgcatcatgcacttccgcctttcggaagaagaaaaagcaacttgcgaggccatcatcaccagcctgcaaagcgaatttcaagtaaacgacaacttgaaagaagaaatgttgcgcatcctgttgaaacattttatcattcacgcaacacgggttgcccgcaaaaacctgcatatcacaccggacatggaagagagtttcaactccgtccgtcgcttttacgtgcttgtagaccagcatttcaaagaaaagaaacaagtgcaggattacgctgatatgttatgcaaatcccctaaaaccctttcgcaccttttatcgttatacaatttaccttccccgttgaaagtgatccaccagagggtagaggcggaagcaaaacggcttttactatatagcgaaatgacagccaaggagatcgcccatctcttaggtttcgaagaccaagcaagtttcagccgtttcttcaagaaagtttccggggaaagtattacacaatacaaacgtcagttgaaagaatcgggaaaaattgacaactaaaacggaaaaattgccatttttaaccacatgcggatagccgatctttgtacctgaagttaaacaatctaattcaggaataaaatgaacgagcaagtaacaaaatccattcatcgttttttaacgatagcagcatcaagcaaaggtttaggcataaaactgatccgtgtggccatcctcatcattttcgtgtggatcggggggctgaaatactatcactacgaggctgacgggattgtgccgttcgttgccaacagtcccttcatgagtttcttctacaacaaacaagccccggaatacaaggaatacaaaaacgcggaaggagcctacgtaatcaaaaaccgggaatggcatcaagtaaacggaacgtacaccttcgcctacgggctgggagccctgatctgtaccatcgggatactggttttccttggattattctttccccgcatcggcatcatcggggatattctggccattattatgactatcggaaccttgtcatttcttgccacgacacccgaagtatgggtccccaatctgggaagcggggaatttggttttcccctgttatcgggagccggacgcctcgtgattaaagacacggccatattagcaggagccatagtgctactatccgattctgcacaacgcatattaaatcaattaaaacatcaagaatcatgaaagaatttgacgctatcatcatcggtttcggcaaaggtggtaaaacccttgccacggaactggctcaacatgactggaaagttgccatgattgaacgatcagataaaatgtacgggggaacctgcatcaacatcgggtgtatcccgaccaaagcactcatccaccaagcagaacttgccacgctgaaaaaagggctctctttcgaagaacggaaagcggactaccggaaggctatcgcgttcaaaaataatgtaacagacaagctacgccaaaaaaactacgataacctcgccgggaaccccaacatcacggtttacacgggcgaaggacaattcgtctcacccgagatcgttcgggtgacaacaaaagaagagactttcgaactaacggcaaaacacatttttatcaacacgggagcggaaaccgtgatacccccgatcagcgggattcaggataatcccaaagtattcacaagcacaacgatcatggaactggaagaacttccccgacagttaatcattgtcggaggtggttacatcgggttggaatttgcctccatgtacgcctccttcggagcggaagtcaccgtgttggaaggattctcggcattgattccccgggaagatcgggatattgcagccaacgtgcaggaagtactggagaaaaaagggattcgcttcatcttgaatgctaacgtgcaatccgtgactaatggcgaaaaagaagctaccctcacctataaggatacagcaagcggcgaattgaacacgctccaagcggatgcaattctcctcgccacgggtaggaaacccaacacggaaagcttgaatctaaaggcggccggggtcgaagtcaacgaaagaggagccatcatcgtggacgaatatttgaagacaacaacaccccatatccgtgccataggagacgtaaaaggcggtctgcaattcacctatgtttctctggacgattatcgaatcatccgggaagatttattcggtaatagggatcgggcaacaaccaaccgggaaccaatcagttattccgtgtttatcgagcccccgctttcccgcatcggaatgaatgaagaagaggcccggaaaaagaacctgaatttcaaggtaaacaaattcaccgtctcttccattccacgagtacacacgatcggcaaaacagagggaatgttgaaagctatcattgatgcagacacgaaaaagatactgggctgtacactattttgtccggaatcaagcgaaatcatcaatatcgtagctatcgccatgaaaacgggacaggattacacattcctgcgggatttcatcttcacgcacccctccatgagcgaatcattcaacgacctgttcagatttaaactatgaattaatccgcttgttgccacgaagatttcggcaaggtaaaccagaaggttgatccttgccccacttctgatattaccccaatctgtccccctaaccgggtcacgatactctcacagatggaaagtcccaatcccgtaccctgttggaaagagttcaatttcacaaatcgcccgaacacctcttttaacttgtccgcgggaataccacatcccgtgtccgagacataaaaatacaacgactcatcctcttgtagccgatacccgacacgaatactcccgttagtggtaaattttatggcgttcgtaacaagattatgcaacacctgcatcaaacgattcgcatcagagtagatcacgcactcgggcaaatactccacgaattccacaacgaccgaatcattctttaatcgtaaacgagctgcccggacaacttctgtcagtaatacattcagattgatttcggaatacacgaattcgaacacaccggcttcaattttcgataaatccaaaatatccccgatcagttgcaacaacaacgtgttattattctctataatcttaatatattcctgccgttcattctcgtcctcggtgtaagccaacacgttagaaaaaccgacaatagcgttcaacggggtccggatttcatgactcatattagcgagaaaagctgacttcaaatgattcgatatttcggccgcctctttcgccttcaacaattcctcttccatcctcttccgttcatcaataagtagagatcctccaaccaacaaggtgggatgaccctctccatccctctcgctcacggtcacgaaactctcgaaccaaacatactcttttgatctcccccgaaacatagacctatgttcttttcgaacaatatcagcccgatcgtaatacaagtcataataggcctcatgcattcctgctcgatcatccggatgaacaagcatatccccttccatttcagtcatcatcctcgaatccttcgtcttacaaagctcgtgagtcacgtatgtaatgtcataattaatcgtcttattcaacagatcccacgtccatgggataagccgtgtcacacccagcaccagttcatacctccggttcaacgcctccagcgaaacttgatgctccttcattttcaaggaaaccagatattcttccgtccgatcgataaagaacacatccataaaattcttctcggaactcgggaaagataatttatcgtaataatgaatttcattattttcttccggaaaaacaaaagaagttattcgtttggattccttatccatcatataatccaaaagctggttatccacgtccgcctccgtcaaacgtttcccgactacccggtcccgagtacaatgaaagactttctcgaaaagattattgacatcacaaaatataaaatcaacgacattccccgcctcgtcgaaaagcaattgcttacgaatataaatgacaggcatattgtcgactaatttccgatattgtgaaagtaattgaaattcccgttgccgctgctgacgtctctgacacatgacatgaaaacgcatcatcccgagcgctccaagcaacatgataaatgccaaagcgataataatatactccttgtaaagttggtaaaaattaggcgggacttgataaaacacgacatctcccgtgatgctatcagggtctacaccatgatgttgtaaatgatgatagtttaaatagattttcggtttgccccccacccgatccattatctcccgggccggcttaccacccaaaatttgccgtatggtttgaatagccactttaccaaaatccgatgccgagataaaatatcctccggcaaaagcacccgtttccatatccatctccgttaacgtgaacacgggggcatcaacaaaaccatatataattttctgaagattatctgacaagtaatgactctcggattgccttttacctaaaaaccaagaattataaataatacccacttccctgctgtactccatcaatgtatccagcaatttctctgttgacatctccatcgatgtcaacaaatccaatcccaactcggggaaatccttcttcaacacgctactcacttcctcccgaaccatggtactaatataacgatcatccgaaataagagctatcgtctttaccccaggctgtaatctccgaatcaaatcaatcgtattcctaacataaaagggatgtttcaccacggtcagattatatccctcggtagccacctccgtcgacatgaatttcccttttcctaaaaaatccttgttgacaaaattttctaaactactcggcatggaatccctagaataacagataacggcaggaacatccttccattcccgatcaaataaaggctgacacacaagccacgccggatccccgataaaaacgaccactttaggcggctttaaatatcgggacaataaatattcccttttttcttccacatcttcgatccgcgtcatcatcggaatagacaattcttccgcctcaacatgaaaccccggggacgagaattcatcccgtatattctggtatagattgttcgcccaagcctcgttaaaattaatcgagttaagcaccagtatatattccttcccccgtgtattttcagcaaaccctagaacatacacgcccaagaagaaaaatagtgccgtgatcctcctcatcataacttcaattcatacatcagcaccaaaattacgaaaataataatatgtttaccccctctttgtagtctatttttt

SEQ ID NO: 226 - DNA, 7030 bp, Butyricimonas faecihominis
gatatacactagggttaactttaaatttataaacacatgaaaaaacggatatatataattttgctattgctcccgttagcgagttgcaatgatatgttcaagaattttttgaacgaagagcccgagactctcgtcacgaacacgaatttctggaaaacggaaaaagatgtcgaggccgccgtgtatgaacttcacgtcatgttcagatcttggggtggatacgttgaaacacgactttaccgggacaggggcctcccgtttgattatctcggtttgatctggagaaatatctcggacaacgagttacagaaggatatggacataacaacagctccaagctggcgtggcgagtaccaagcaatcgggatgtgcaatttcattttaggcaacattcaccgggcaaagatacccgaagaacgcatcaattactacaaaggacaagcgctgacaatacgggcttacttgtatttctatgttttacgcacgtggggcaatgccgtgttaatcacgaacgaagaagatgttggtgaaaaagccgtaaccccgtggcgggaaatcatgaaagtcgtgatagatgatctcgttgaggccacgaaattattatccccggtgaacgagatgaaggatgccaataacaccccagtgacaagcaaacaaatcccctcaagaggaacagcattcgccattctcgctcatgcttatgcttggctggccggattcggggaggaaccggaatattaccagaaaggtatcgaggcagcaaccgaggtcatccaatccggtgactactcgctagtaaacaatcctcatgaaatctgcgaaatcgtgttacccggcaatagccaagaaggtattcttgaaatcgatttcctaaaccccgaagcggtcaatcggtccgggaatggtttgccgggtatcacacaaaaatggccggcagacccgaacgccaccccctcgacaaggagaaccttgctccgtttgaacaacgagagcgccatggccatgtttccggataggaatgacaagagacgggaagaatatttctacaagctggattccatggcaggggttaaaacctcaatcacgcaaggagcggcgtatatttacaagttcagaagaccgctactgcacacgagtggcagccagctcggtaagctcttgggatatgacctgaatgaaatcctgattcgtctcgcagatatatacctgctccgagctgaaatgagagcgaaatccggtgatattccgggagcaatagccgacttgaacgtgatcagaaaacgagccggggcaaaagaatataccccggatgagaacttggaagaggcaattgcactagaaagagacaaagaattatttctcgaaggggtatgcacgagatattttgatattgtccgtaacaggacattccgtgaaaaactcaggggtaaattcaagaccctctccgaccaagatgtgaaagacggggctttattcttcccgatctcttttgacgccttccaaaacaataccaaaatgacgcagaatatttactggaaaagaaatggattcgcaatttaaacgatacaagatgagaacaatactatttatatgcattaccgtcacccttctcgcaagctgtgaaaaagattaccagcatgacaccggactggcggacggttatcacgattgctcgatgatggactatttgagaagtgatcacaacaactgggattcgatcgtcgttgccattgaatacgcgggattaaccgatattttcgagggaacaaatcctgattacaaggaaatcacgtttttcggccccacgaacatgagtatccgaaaattctttctcgaacaaaccggagaggcaatctatcataccatccgggaaatacccgttgaactggtcagggatatgattctcgcttacctagtcgaagggaaaaagatgaaagagacgttcgattacgaggtaaaagggacactcacgggaggaacggaagtgtattccttgaataacgtcaagctccgggtatatcgtacccaatccgagtttaacggaatccccgacatcggagcggaagggctaaaaattcatgccgaaatcagcgggcagatggcaagcattgcctcggccgacatagagacaaataacggggtggtacattccctgtcaaacaggtttacatgggttgaactataaaacgaatcgtatgaaatatatatggatgatgatattactttccgccctattatatagcggatgcaaagatgtaaaagtcgggtacttgttcacgcataatgcaaaatacaatcccgattctgtggtgttcaaggcatatctcgatgaggccaatgatgacgacgctcacaggaagaaattcgagatcccttggcaaagtcaatctcttgaaggagtacaaggcacgaaccccatccgttattcgattgaaagaatcgactcggatcataatgacccggaaattctaaaccagttttctgcagttcagaaagggatcattcaattaccatggaatcacaccgttcctcaaggtaagtatatcatatccttacgaatcagcaatgaaggttatagtgttgtgctggactctatgattatagttatcattaaataaatggattattattagagtttaccagagggggtactattgtgtaaaaacgttcattttgatacaatagtactccttaatatagacgacctctgccaaaataagcgggatttacacacaaagcccacaactattcatccaacaaatccgggcgcaaagccttcgtccgttccaatgcttgttgctcctgccattcgtctatcaaggcatgattaccggataacagaacttccggtacccgccacccgttaaattctgcaggacgcgtgtatacaggcggggctaacaagttatcttgaaaagaatcggtcaaggcagaagtttcatcccccatggctcccggcaacaggcgtacaacggcatccgtcatgatgcaggcaggtaactcaccgcccgtcaacacgtaatcacccacggatatttccctcgtaatcagatgttcacgcacccggtgatccacccccttgtagtgtccgcaaagaatcatgatattctctttcaacgacaattcgtttgccgtcttctggttaaaaacaggagcatccggagccgtatagataatctcgtcataatgccgctgggaagtcaactcgttgatacaatcaaaaataggctgaactgccatcactaacccggcatcacccccgaaagaataatcgtccaccttccggtgtttatctttcgaccaatcccgaatgttatgaatatggatttccacgattcccttttctttcgcccgtttaataatcgagtgattcaaagggctttccagcaattccggcactacacttaatatatcgatacgcatgactaaacaattgaaagttgaaaaatgaaaattgaaaatgacttttcaaattcggtacaaagatagtaatttatttatctttgcccgtatatttaaaaatgacgaaaatggttattgaaaaaggtgtacacgcagatattgatgaactggcacggctatacgatgatttaaatgattttctggactcggatataaatcaccccggatggatcaaaggagtatatcccgttcggcaaatcgcagaagctgggattaacgagcaacacctttacgtggtaaggcaggaaggacgaattatcggttcaatcattttaaatcatcatccggaaccggcatacgatcaagcaccttggggaatagagtcagattacagcaaaatattcgtgattcacacactcgtggttcaccccgatttcctgaaagcaggtgtagggaaaaaactgatctcttttgcctgtgagttgggaaaagagctacacatgaaagctatccggctcgatgtatacgagaacaacattcccgccatcaaactatatgaaaaattcggctttaactatatcgacacagttgatttaggcttgggtgactacggactacacaaattccgcctttacgaaaagatactataaataagaggtgtggcaaaatgattttaccacacctccattttcaattctccattttcaattacctcaagtagtcctcgaaataattcgtcactttctgcatcagatgaatccgatcccgtcccatcacgttatgctcggcacacgggtaagggaagtaatccacctgcacgttattcttgatacactcccggataaagctcaagctttgctcccaaaccactaccggatcaactgctccctgacagatcaacaatttacctttcagatctttcgccttggcaatcaagctcgttttagcatatccttccgggttctcctgcggggtatccatgtaacgttccccgtacatcacttcataccatttccagtcgatcacgggacctccggcaacggccactttataaatatcaggataattggtaatcaacgaaatagtcatgaaaccaccgtaactccaaccatgaaccccgatacgattcgcatccacccacgggaaagatttcaaccactcgattcccttcacctgatctttcatttcaacctgtccgcattgacggtgaataatatcctcgaaagccttaccgcggttcggcgtaccgtgattatcgatcacgaataccacgtaaccatgttgagccatatacatttcccacatccgcaaggaagcattccacgtattggttaccaactgtgaatgaggcccaccatacacgtaatgaatcacgggatatttcttgttcgggtcaaaatccatcggtttaatcaaacgatagtataaatcactaccatcatctgccttaatcttacccaacgtgatctccccgaaattataatccttattcgggttctccacttcctgcaaacgacgtacaacctttccggaattcatcgtcagatccacgttacgaggtactttgatgctactataattatcaacgaaataagcacagtcaccactcatcgtgatattgtgccatccttcttccatcgtcaaacggtttttcttcccgctctttacctctacccggaaaagttgtttctccaccggagagatttccgatgaaagataatatacatattttccggcaggatcaacagccacgaattccacgtccgcatccacgtctgtcagacgacgaattaatttaccgttcacatcgtgcaggtaaaggttcatgaaaccatcccggttattcgtagaataaataaattgtttcgggttgttagccaagaataccaaaccgctttgcggttccacgtaagtattggacttttcctcgaataaggtagcgatcaatttacccgttgacgcatcatatttattcaaacgcatatgattttgtccccggttaagcacctgaacatataccatatcagactccggagaccaagtaattcccgtcaggtattgttcgcgaccaaaatcattcgcatccagaaaagtcgtcttagcagaagctatatcataaaccccaagactcaccaactcggatttcattcctgccatgggatacttgatctcctttaattcacccgtacgagtattgatgtccagcaacgggaaattcgttacctgactttcgtctttacggtaaaatcccagtttctttccgtccggagaccaaaaaataccgccagtaattccgaattcattccggctaaccacctgcccgttcacgatattcttgtcctcgtccgcggtaacggtataactattcccacgttcgtccatgtaatacaagttattatcgatcgtgtaagcatacatattacccgctttagaataagtctcgttagcagcccctttcgggaaagtaaatttctgtttcacttgtttcttagcaacatcaatatggtagatactcccttgacgagctatcaccaaagtgttatcatccaaccaagaaaaattagggaatcctctcaactcggctcccaaaatacgattcaattccgccacagtgagtagcacactcttttcacctttatcgacagattcacccatcaaaccttcccggtccagataggtcaactgattcttgtcgccttgccattgaatatacttggaccggggatataaatgataccctaccacggcctcttccatggttaaaacctttttctgtgcgcttaaatcgaacatcatacttaatccgattattgccaaaaacatccttttcatgctttacttttagctgttattattaatcttcaattgtaaattcatcccgatcttccaacactgggaacttctcacgaaattcccgtaaagctttcaaatcaatatccacctgtttcacctcgtcggcaaaaggttcgcaagcgaccagcacgtcccctttaggagagatgaccgctgaatcaccggagtaactcaagccaaccccgtcctcgcccactcggttcaccccgatcacgtaacattgattctcaattgccctagccatcaacaagatctgccacggttgtcttctcgcttccggccagttggccacgtacacggccaaatcgtacccgcacgtgttacgactccacacggggaaacgcaaatcataacaaataaatggagctattctcaccccttgataatcaaataccaacaactcatctcctgccgtgaaatgctctttttcctctcccatcgtaaacagatgtttcttgtcataatgcaagattttaccatccgggaaggccaccagcagacggttgtagtaatgttcatcctcaaaataaacagtcgatcccatgatcaacgcatccttttctctggcccattcctgcatacactggtaaacagcctcgtaaaaaggtgccacccgctctttccctttcatggtaaaccccgatgcgaacatctcgggtaaaacgatcacgttagctccttctatcgccgctatccgcttgttaaaaagcttcaggttcaccggcacattctcccattccaagtgtgcctgtacgatcgcaacattcatatatac

(The sequence listing continues in the following parts.)
